United States Patent Application Publication US 2011/0183924 A1 - sequence listing, part 188

SEQ ID NO: 453278 - DNA, 4246 bp, Homo sapiens
acgccatacgccggggcggggccgagagtttggagccccggagtggggtgtcggcgcctcattcgggtggagctgagccggagacaggcagttgtgaaaaacttcaggacaaaaatgtttcatttaaggacttgtgctgctaagttgaggccattgacggcttcccagactgttaagacattttcacaaaacagaccagcagcagctaggacatttcaacagattcggtgctattctgcacctgttgctgctgagccctttctcagtgggactagttcgaactatgtggaggagatgtactgtgcttggctggaaaaccccaaaagtgtacataagtcatgggacattttttttcgcaacacgaatgccggagccccaccgggcactgcctaccagagtccccttcccctgagccgaggctccctggctgctgtggcccatgcacagtccctggtagaagcacagcccaacgtggacaagctcgtggaggaccacctggcagtgcagtcgctcatcagggcatatcagatacgagggcaccatgtagcacagctggaccccctggggattttggatgctgatctggactcctccgtgcccgctgacattatctcatccacagacaaacttgggttctatggcctggatgagtctgacctcgacaaggtcttccacttgcccaccaccactttcatcgggggacaggaatcagcacttcctctgcgggagatcatccgtcggctggagatggcctactgccagcatattggggtggagttcatgttcatcaatgacctggagcagtgccagtggatccggcagaagtttgagacccctgggatcatgcagttcacaaatgaggagaaacggaccctgctggccaggcttgtgcggtccaccaggtttgaggagttcctacagcggaagtggtcctctgagaagcgctttggtctagaaggctgcgaggtactgatccctgccctcaagaccatcattgacaagtctagtgagaatggcgtggactacgtgatcatgggcatgccacacagagggcggctgaacgtgcttgcaaatgtcatcaggaaggagctggaacagatcttctgtcaattcgattcaaagctggaggcagctgatgagggctccggagatgtgaagtaccacctgggcatgtatcaccgcaggatcaatcgtgtcaccgacaggaacattaccttgtccttggtggccaacccttcccaccttgaggccgctgaccccgtggtgatgggcaagaccaaagccgaacagttttactgtggcgacactgaagggaaaaaggtcatgtccatcctgttgcatggggatgctgcatttgctggccagggcattgtgtacgagaccttccacctcagcgacctgccatcctacacaactcatggcaccgtgcacgtggtcgtcaacaaccagatcggcttcaccaccgaccctcggatggcccgctcctccccctaccccactgacgtggcccgagtggtgaatgcccccattttccacgtgaactcagatgaccccgaggctgtcatgtacgtgtgcaaagtggcggccgagtggaggagcaccttccacaaggacgtggttgtcgatttggtgtgttaccggcgcaacggccacaacgagatggatgagcccatgttcacgcagccgctcatgtacaagcagatccgcaagcagaagcctgtgttacagaagtacgctgagctgctggtgtcgcagggtgtggtcaaccagcctgagtatgaggaggaaatttccaagtatgataagatctgtgaggaagcttttgccagatctaaagatgagaagatcttgcacattaagcactggctggactctccctggcctggcttcttcaccctggacgggcagcccaggagcatgtcctgcccctccacgggtctgacggaggatattctgacacacatcgggaatgtggctagttctgtgcctgtggaaaactttactattcatggagggctgagccggatcttgaagactcgtggggaaatggtgaagaaccggactgtggactgggctctagcggagtacatggcgtttggctcgctcctgaaggagggcatccacattcggctgagcggccaggacgtggagcggggcacattcagccaccgccaccatgtgctccatgaccagaatgtggacaagagaacctgcatccccatgaaccatctctggcccaatcaggccccctatactgtgtgcaacagctcactgtctgagtacggcgtgctgggctttgagctgggcttcgccatggccagtcctaatgccctggtcctctgggaagcccaatttggtgacttccacaacacggcccagtgtatcatcgaccagttcatctgcccgggacaagccaagtgggtgcggcagaatggcatcgtgttgctgctgccccatggcatggagggcatgggtccagaacattcctccgcccgcccagagcggttcttgcagatgtgcaacgatgacccagatgtcctgccagaccttaaagaagccaacttcgacatcaatcagctatatgactgcaattgggttgttgtcaactgctccactcctggcaacttcttccacgtgctacgacgccagatcctgctgccattccggaagccgttaattatcttcacccccaaatccctgttgcgccaccccgaggccagatccagctttgatgagatgcttccaggaacccacttccagcgggtgatcccagaagatggccctgcagctcagaacccagaaaatgtcaaaaggcttctcttctgcaccggcaaagtgtattatgacctcacccgggagcgcaaagcacgcgacatggtggggcaggtggccatcacaaggattgagcagctgtcgccattcccctttgacctcctgctgaaggaggtgcagaagtaccccaatgctgagctggcctggtgccaggaggagcacaagaaccaaggctactatgactacgtgaagccaagacttcggaccaccatcagccgcgccaagcccgtctggtatgccggccgggacccagcggctgctccagccaccggcaacaagaagacccacctgacggagctgcagcgcctcctggacacggccttcgacctggacgtcttcaagaacttctcgtagatgctgcctagggttgcttgggccactgccctctccacacccatgactgccccttgcttctcaactaaagaatagtgcctcagcgctgcccacaccaccgccctcctcgctgtgccaccacccctccctctgctctcataggagttaggctgtcgtccccctccagtgcttggctgccccacaggccacacgctgcccaggctctgctgacttctgagcagttttccaggaggccggggggagcaggaggaggaaaggtagcccccgagggatgtccttggggaggggtcagctctggccacaatcctccccaccagtctcacccactaggataggaactgggccttgtgtgctggcttccgctgtcacccagcaaggcacaggctcctgtatttgagactaggatagcttcatcttgagcctgagccttagaatctgtagaggagcctggagtcggatctagccatggctggcagaggtttctagggtgggccccagccgtggcgtgaactgaggatgacccggggcagctggcaggagagagccttggcctgacctggcacagaaagggcagcttcagtctctgcagtgtccattatctgctgttccttcgagggttccaggctgtgtgtggggcccaagcatgccccacccacccctcctgggcccaggcagcacctggagcccacagagtctgtgtgtagccaggaagccccgctcaggtagccaccgccggggcactggctgctctgtcttggtcctgttaaccctccacctcctctcttggactccctccccaccccaaccactctttctttctcctttaacccaatggagactttctgatgcatcgttttctttgctgtgccaaagcaggtcagaagagggagaggaggggctgggggtgaggggccaggccatggccaaggggccagctgcccctcatttatcactctgaccttcacagggacagatctgatttatttattttggttaaaaaaaaattactgggcctcgtttacaacgtcgtgactgggccctggcgtaccctttcgcctgc

SEQ ID NO: 453279 - DNA, 7909 bp, Homo sapiens
aatccattccatgggagttttctggattgcaaaataacgatgacttgcatagatgaatggttttgtgaagttggagctgaaattttgaaacaatgagagcataaatctctaggttttgctgctgaaagttggaaacaagagtctgaatctctagatctgaaaatctaaaacttgtcatttgtcttgttttcctaagaattgactgtgagtttttaagataaatttagaactttctaactttatttttggttgatagggaaaaaacacctggagaaagcagtacagcattgccttgcacttctcaatcttactctgcaaaaggaaaatctttttatggaccttctaagagagagtcaactggctctaatagtctgtcctttagaacagcttttgcagggaattaatcccagaactaagaaggcagataatgtggtaaacattgccagatacctatatcatggcaatactaatccagaattggcttttgaaagtgccaagatcctctgttgtatctcttgcaactctaatattcagataaagttggttggagatttcacacatgaccagagtataagtcagaaactaatggctggatttgtggagtgtttggattgtgaagatgcagaagaatttgtacgtctggaagagggatcagaacttgaaaagaaattagttgcaattcgtcatgaaacaagaatccacatcttgaatcttctcattacctctctggaatgcaatccacccaatcttgctctctacctgttgggctttgaattgaaaaaacctgtcagtactacaaacctacaagatccaggagtgttaggttgccctcggacatgccttcacgccattctaaacatcttggagaaaggaacggaagggagaacaggcccagtggcggtgcgagaatctcctcagctggctgagctatgttaccaggtcatatatcagttatgtgcatgctctgatacatctggtcctactatgaggtacttgagaaccagccaggatttcttattttcccagttgcagtatctaccattttctaacaaagaatatgaaatatctatgctgaaccagatgtcatggcttatgaaaactgcctcaatagagctaagggtaacctctctgaatcgtcagcggtcacatacccagaggctcctacacctcttactggatgacatgccagtgaaaccatactcagatggtgaaggaggaatagaagatgaaaacaggtctgtttctgggttccttcactttgacactgctacaaaagtacgtcgaaaaattctaaatattcttgactcgattgacttcagtcaggagatccctgagcctttgcagttggatttttttgatcgggcccagattgaacaagttattgctaactgtgaacacaagaatttacggggacagacagtctgcaatgtcaagcttcttcatagggttcttgtagctgaagtaaatgcccttcagggtatggcagccataggacagagacctctactaatggaggaaatcagcactgtacttcagtatgtggtaggaagaaataaattgctgcagtgtcttcatgcaaaacgtcatgctctggagtcgtggaggcaactagtagaaattatactgacagcttgtccccaggacctcattcaggcagaggatcgacaactgattattcgtgatattttacaagatgtgcatgataagatactggatgatgaagctgcgcaagagttaatgcctgtggtcgccggggcagtgttcacactgactgctcacctaagccaggccgtcctcactgaacagaagcaaacatcagtcttgggaccagcagaggcccattacgcttttatgcttgatagttgcttcacctcacctcctcctgaagagaacccattagtgggttttgcttctattggagattcttcactttacatcatattgaagaaactgttagacttcattttgaagacaggtggtggattccaacgagtgaggactcacttgtatggctctctgctttattacttacagattgcccagagacctgatgaaccagacaccttagaagcagccaagaaaaccatgtgggaaaggctgacagcccctgaagatgtatttagcaaattacagcgagaaaacatagccattattgaaagttatggcgccgccctcatggaagtggtctgtcgagatgcttgtgatggtcatgagattggaaggatgctggccctggctctacttgatagaattgtctccgtggataaacagcagcagtggcttttgtatctttctaacagtggctacttgaaggtcctcgtagacagcttggtagaagatgaccgtactttgcagagcttactcaccccacagcctccccttttaaaagcactttatacttatgaatctaaaatggcatttctcacaagagtggcaaagatacagcagggtgcattagagctgctaagatcaggggtgattgtgagactagctcaatgccaagtctatgacatgcgcccagaaacggacccgcagagcatgtttggcatgagagaccctccaatgttcatccctaccccagtggatcgctaccgccagattctcctcccagctctccagctgtgccaggtcatcctcacatctagtatggcccagcacttgcaggcagcagggcaggtattgcagtttcttatttcacattctgataccatacaagcaattctgcgctgtcaggatgttagtgctgggtctttgcaggaattggctctgctgacaggaattataagtaaagcagcacttcctggaatattaagtgaacttgacgttgatgtaaatgaagggtctctaatggagctacagggacatattggaagattccagcgccagtgcttaggactactaagtcgctttggtggctctgacagactgcgtcagtttaaatttcaagacgataatgtggagggagataaagtaagcaagaaagatgagattgaactggctatgcagcagatttgtgccaatgtaatggaatattgccagtcactcatgttacagagttcccctaccttccagcatgctgtgtgtctcttcactcctagcctttcagaaacagttaatagagatggaccgcggcaagatacccaagctccagtggttccatactggcgcctgcctggtttaggcattatcatctacctgctgaaacagagtgctaatgatttcttcagctattatgacagtcatcgacagagtgtcagcaagctacaaaatgtagagcagcttcccccagatgagataaaagagttgtgtcagtctgtgatgcctgctggtgttgataaaatctccactgctcagaaatatgttctagcaagacggcgcttggtgaaggtgatcaacaatcgagctaaactgctttccctttgttcttttatcatagagacctgcctatttattctttggcgccatctggagtactacttgttacattgcatgcccacggattctcaagattccttatttgcctcgagaaccttgtttaaaagcagaagactgcaagattccttcgcctcagaaaccaatctagattttagaagtgggctggctatagtgagccaacatgatttagaccagcttcaggctgatgcaatcaacgcttttggagaatcactacaaaagaaacttctggacattgaaggattatattcaaaagttcgatctcgatatagtttcatacaggctcttgtcagacgtatccgtggcctctaaactagaggccacggacaaatacaaagattgcttagtgggattaagattccaccattcccagactgttaagacattttcacaaaacagaccagcagcagctaggacatttcaacagattcggtgctattctgcacctgttgctgctgagccctttctcagtgggactagttcgaactatgtggaggagatgtactgtgcttggctggaaaaccccaaaagtgtacataagtcatgggacattttttttcgcaacacgaatgccggagccccaccgggcactgcctaccagagtccccttcccctgagccgaggctccctggctgctgtggcccatgcacagtccctggtagaagcacagcccaacgtggacaagctcgtggaggaccacctggcagtgcagtcgctcatcagggcatatcagatacgagggcaccatgtagcacagctggaccccctggggattttggatgctgatctggactcctccgtgcccgctgacattatctcatccacagacaaacttgggttctatggcctggatgagtctgacctcgacaaggtcttccacttgcccaccaccactttcatcgggggacaggaatcagcacttcctctgcgggagatcatccgtcggctggagatggcctactgccagcatattggggtggagttcatgttcatcaatgacctggagcagtgccagtggatccggcagaagtttgagacccctgggatcatgcagttcacaaatgaggagaaacggaccctgctggccaggcttgtgcggtccaccaggtttgaggagttcctacagcggaagtggtcctctgagaagcgctttggtctagaaggctgcgaggtactgatccctgccctcaagaccatcattgacaagtctagtgagaatggcgtggactacgtgatcatgggcatgccacacagagggcggctgaacgtgcttgcaaatgtcatcaggaaggagctggaacagatcttctgtcaattcgattcaaagctggaggcagctgatgagggctccggagatgtgaagtaccacctgggcatgtatcaccgcaggatcaatcgtgtcaccgacaggaacattaccttgtccttggtggccaacccttcccaccttgaggccgctgaccccgtggtgatgggcaagaccaaagccgaacagttttactgtggcgacactgaagggaaaaaggtcatgtccatcctgttgcatggggatgctgcatttgctggccagggcattgtgtacgagaccttccacctcagcgacctgccatcctacacaactcatggcaccgtgcacgtggtcgtcaacaaccagatcggcttcaccaccgaccctcggatggcccgctcctccccctaccccactgacgtggcccgagtggtgaatgcccccattttccacgtgaactcagatgaccccgaggctgtcatgtacgtgtgcaaagtggcggccgagtggaggagcaccttccacaaggacgtggttgtcgatttggtgtgttaccggcgcaacggccacaacgagatggatgagcccatgttcacgcagccgctcatgtacaagcagatccgcaagcagaagcctgtgttacagaagtacgctgagctgctggtgtcgcagggtgtggtcaaccagcctgagtatgaggaggaaatttccaagtatgataagatctgtgaggaagcttttgccagatctaaagatgagaagatcttgcacattaagcactggctggactctccctggcctggcttcttcaccctggacgggcagcccaggagcatgtcctgcccctccacgggtctgacggaggatattctgacacacatcgggaatgtggctagttctgtgcctgtggaaaactttactattcatggagggctgagccggatcttgaagactcgtggggaaatggtgaagaaccggactgtggactgggctctagcggagtacatggcgtttggctcgctcctgaaggagggcatccacattcggctgagcggccaggacgtggagcggggcacattcagccaccgccaccatgtgctccatgaccagaatgtggacaagagaacctgcatccccatgaaccatctctggcccaatcaggccccctatactgtgtgcaacagctcactgtctgagtacggcgtgctgggctttgagctgggcttcgccatggccagtcctaatgccctggtcctctgggaagcccaatttggtgacttccacaacacggcccagtgtatcatcgaccagttcatctgcccgggacaagccaagtgggtgcggcagaatggcatcgtgttgctgctgccccatggcatggagggcatgggtccagaacattcctccgcccgcccagagcggttcttgcagatgtgcaacgatgacccagatgtcctgccagaccttaaagaagccaacttcgacatcaatcagctatatgactgcaattgggttgttgtcaactgctccactcctggcaacttcttccacgtgctacgacgccagatcctgctgccattccggaagccgttaattatcttcacccccaaatccctgttgcgccaccccgaggccagatccagctttgatgagatgcttccaggaacccacttccagcgggtgatcccagaagatggccctgcagctcagaacccagaaaatgtcaaaaggcttctcttctgcaccggcaaagtgtattatgacctcacccgggagcgcaaagcacgcgacatggtggggcaggtggccatcacaaggattgagcagctgtcgccattcccctttgacctcctgctgaaggaggtgcagaagtaccccaatgctgagctggcctggtgccaggaggagcacaagaaccaaggctactatgactacgtgaagccaagacttcggaccaccatcagccgcgccaagcccgtctggtatgccggccgggacccagcggctgctccagccaccggcaacaagaagacccacctgacggagctgcagcgcctcctggacacggccttcgacctggacgtcttcaagaacttctcgtagatgctgcctagggttgcttgggccactgccctctccacacccatgactgccccttgcttctcaactaaagaatagtgcctcagcgctgcccacaccaccgccctcctcgctgtgccaccacccctccctctgctctcataggagttaggctgtcgtccccctccagtgcttggctgccccacaggccacacgctgcccaggctctgctgacttctgagcagttttccaggaggccggggggagcaggaggaggaaaggtagcccccgagggatgtccttggggaggggtcagctctggccacaatcctccccaccagtctcacccactaggataggaactgggccttgtgtgctggcttccgctgtcacccagcaaggcacaggctcctgtatttgagactaggatagcttcatcttgagcctgagccttagaatctgtagaggagcctggagtcggatctagccatggctggcagaggtttctagggtgggccccagccgtggcgtgaactgaggatgacccggggcagctggcaggagagagccttggcctgacctggcacagaaagggcagcttcagtctctgcagtgtccattatctgctgttccttcgagggttccaggctgtgtgtggggcccaagcatgccccacccacccctcctgggcccaggcagcacctggagcccacagagtctgtgtgtagccaggaagccccgctcaggtagccaccgccggggcactggctgctctgtcttggtcctgttaaccctccacctcctctcttggactccctccccaccccaaccactctttctttctcctttaacccaatggagactttctgatgcatcgttttctttgctgtgccaaagcaggtcagaagagggagaggaggggctgggggtgaggggccaggccatggccaaggggccagctgcccctcatttatcactctgaccttcacagggacagatctgatttatttattttggttaaaaaaaaaaaaggaacagaaacaactttgcattgcattggcttgacccataaactaagttatatccgtg

SEQ ID NO: 453280 - DNA, 6429 bp, Homo sapiens
gaatcgagctcggtaccaacgtcatatagcgggaggaaatcagcactgtacttcagtatgtggtaggaagaaataaattgctgcagtgtcttcatgcaaaacgtcatgctctggagtcgtggaggcaactagtagaaattatactgacagcttgtccccaggacctcattcaggcagaggatcgacaactgattattcgtgatattttacaagatgtgcatgataagatactggatgatgaagctgcgcaagagttaatgcctgtggtcgccggggcagtgttcacactgactgctcacctaagccaggccgtcctcactgaacagaagcaaacatcagtcttgggaccagcagaggcccattacgcttttatgcttgatagttgcttcacctcacctcctcctgaagagaacccattagtgggttttgcttctattggagattcttcactttacatcatattgaagaaactgttagacttcattttgaagacaggtggtggattccaacgagtgaggactcacttgtatggctctctgctttattacttacagattgcccagagacctgatgaaccagacaccttagaagcagccaagaaaaccatgtgggaaaggctgacagcccctgaagatgtatttagcaaattacagcgagaaaacatagccattattgaaagttatggcgccgccctcatggaagtggtctgtcgagatgcttgtgatggtcatgagattggaaggatgctggccctggctctacttgatagaattgtctccgtggataaacagcagcagtggcttttgtatctttctaacagtggctacttgaaggtcctcgtagacagcttggtagaagatgaccgtactttgcagagcttactcaccccacagcctccccttttaaaagcactttatacttatgaatctaaaatggcatttctcacaagagtggcaaagatacagcagggtgcattagagctgctaagatcaggggtgattgtgagactagctcaatgccaagtctatgacatgcgcccagaaacggacccgcagagcatgtttggcatgagagaccctccaatgttcatccctaccccagtggatcgctaccgccagattctcctcccagctctccagctgtgccaggtcatcctcacatctagtatggcccagcacttgcaggcagcagggcaggtattgcagtttcttatttcacattctgataccatacaagcaattctgcgctgtcaggatgttagtgctgggtctttgcaggaattggctctgctgacaggaattataagtaaagcagcacttcctggaatattaagtgaacttgacgttgatgtaaatgaagggtctctaatggagctacagggacatattggaagattccagcgccagtgcttaggactactaagtcgctttggtggctctgacagactgcgtcagtttaaatttcaagacgataatgtggagggagataaagtaagcaagaaagatgagattgaactggctatgcagcagatttgtgccaatgtaatggaatattgccagtcactcatgttacagagttcccctaccttccagcatgctgtgtgtctcttcactcctagcctttcagaaacagttaatagagatggaccgcggcaagatacccaagctccagtggttccatactggcgcctgcctggtttaggcattatcatctacctgctgaaacagagtgctaatgatttcttcagctattatgacagtcatcgacagagtgtcagcaagctacaaaatgtagagcagcttcccccagatgagataaaagagttgtgtcagtctgtgatgcctgctggtgttgataaaatctccactgctcagaaatatgttctagcaagacggcgcttggtgaaggtgatcaacaatcgagctaaactgctttccctttgttcttttatcatagagacctgcctatttattctttggcgccatctggagtactacttgttacattgcatgcccacggattctcaagattccttatttgcctcgagaaccttgtttaaaagcagaagactgcaagattccttcgcctcagaaaccaatctagattttagaagtgggctggctatagtgagccaacatgatttagaccagcttcaggctgatgcaatcaacgcttttggagaatcactacaaaagaaacttctggacattgaaggattatattcaaaagttcgatctcgatatagtttcatacaggctcttgtcagacgtatccgtggcctctaaactagaggccacggacaaatacaaagattgcttagtgggattaagattccaccattcccagactgttaagacattttcacaaaacagaccagcagcagctaggacatttcaacagattcggtgctattctgcacctgttgctgctgagccctttctcagtgggactagttcgaactatgtggaggagatgtactgtgcttggctggaaaaccccaaaagtgtacataagtcatgggacattttttttcgcaacacgaatgccggagccccaccgggcactgcctaccagagtccccttcccctgagccgaggctccctggctgctgtggcccatgcacagtccctggtagaagcacagcccaacgtggacaagctcgtggaggaccacctggcagtgcagtcgctcatcagggcatatcagatacgagggcaccatgtagcacagctggaccccctggggattttggatgctgatctggactcctccgtgcccgctgacattatctcatccacagacaaacttgggttctatggcctggatgagtctgacctcgacaaggtcttccacttgcccaccaccactttcatcgggggacaggaatcagcacttcctctgcgggagatcatccgtcggctggagatggcctactgccagcatattggggtggagttcatgttcatcaatgacctggagcagtgccagtggatccggcagaagtttgagacccctgggatcatgcagttcacaaatgaggagaaacggaccctgctggccaggcttgtgcggtccaccaggtttgaggagttcctacagcggaagtggtcctctgagaagcgctttggtctagaaggctgcgaggtactgatccctgccctcaagaccatcattgacaagtctagtgagaatggcgtggactacgtgatcatgggcatgccacacagagggcggctgaacgtgcttgcaaatgtcatcaggaaggagctggaacagatcttctgtcaattcgattcaaagctggaggcagctgatgagggctccggagatgtgaagtaccacctgggcatgtatcaccgcaggatcaatcgtgtcaccgacaggaacattaccttgtccttggtggccaacccttcccaccttgaggccgctgaccccgtggtgatgggcaagaccaaagccgaacagttttactgtggcgacactgaagggaaaaaggtcatgtccatcctgttgcatggggatgctgcatttgctggccagggcattgtgtacgagaccttccacctcagcgacctgccatcctacacaactcatggcaccgtgcacgtggtcgtcaacaaccagatcggcttcaccaccgaccctcggatggcccgctcctccccctaccccactgacgtggcccgagtggtgaatgcccccattttccacgtgaactcagatgaccccgaggctgtcatgtacgtgtgcaaagtggcggccgagtggaggagcaccttccacaaggacgtggttgtcgatttggtgtgttaccggcgcaacggccacaacgagatggatgagcccatgttcacgcagccgctcatgtacaagcagatccgcaagcagaagcctgtgttacagaagtacgctgagctgctggtgtcgcagggtgtggtcaaccagcctgagtatgaggaggaaatttccaagtatgataagatctgtgaggaagcttttgccagatctaaagatgagaagatcttgcacattaagcactggctggactctccctggcctggcttcttcaccctggacgggcagcccaggagcatgtcctgcccctccacgggtctgacggaggatattctgacacacatcgggaatgtggctagttctgtgcctgtggaaaactttactattcatggagggctgagccggatcttgaagactcgtggggaaatggtgaagaaccggactgtggactgggctctagcggagtacatggcgtttggctcgctcctgaaggagggcatccacattcggctgagcggccaggacgtggagcggggcacattcagccaccgccaccatgtgctccatgaccagaatgtggacaagagaacctgcatccccatgaaccatctctggcccaatcaggccccctatactgtgtgcaacagctcactgtctgagtacggcgtgctgggctttgagctgggcttcgccatggccagtcctaatgccctggtcctctgggaagcccaatttggtgacttccacaacacggcccagtgtatcatcgaccagttcatctgcccgggacaagccaagtgggtgcggcagaatggcatcgtgttgctgctgccccatggcatggagggcatgggtccagaacattcctccgcccgcccagagcggttcttgcagatgtgcaacgatgacccagatgtcctgccagaccttaaagaagccaacttcgacatcaatcagctatatgactgcaattgggttgttgtcaactgctccactcctggcaacttcttccacgtgctacgacgccagatcctgctgccattccggaagccgttaattatcttcacccccaaatccctgttgcgccaccccgaggccagatccagctttgatgagatgcttccaggaacccacttccagcgggtgatcccagaagatggccctgcagctcagaacccagaaaatgtcaaaaggcttctcttctgcaccggcaaagtgtattatgacctcacccgggagcgcaaagcacgcgacatggtggggcaggtggccatcacaaggattgagcagctgtcgccattcccctttgacctcctgctgaaggaggtgcagaagtaccccaatgctgagctggcctggtgccaggaggagcacaagaaccaaggctactatgactacgtgaagccaagacttcggaccaccatcagccgcgccaagcccgtctggtatgccggccgggacccagcggctgctccagccaccggcaacaagaagacccacctgacggagctgcagcgcctcctggacacggccttcgacctggacgtcttcaagaacttctcgtagatgctgcctagggttgcttgggccactgccctctccacacccatgactgccccttgcttctcaactaaagaatagtgcctcagcgctgcccacaccaccgccctcctcgctgtgccaccacccctccctctgctctcataggagttaggctgtcgtccccctccagtgcttggctgccccacaggccacacgctgcccaggctctgctgacttctgagcagttttccaggaggccggggggagcaggaggaggaaaggtagcccccgagggatgtccttggggaggggtcagctctggccacaatcctccccaccagtctcacccactaggataggaactgggccttgtgtgctggcttccgctgtcacccagcaaggcacaggctcctgtatttgagactaggatagcttcatcttgagcctgagccttagaatctgtagaggagcctggagtcggatctagccatggctggcagaggtttctagggtgggccccagccgtggcgtgaactgaggatgacccggggcagctggcaggagagagccttggcctgacctggcacagaaagggcagcttcagtctctgcagtgtccattatctgctgttccttcgagggttccaggctgtgtgtggggcccaagcatgccccacccacccctcctgggcccaggcagcacctggagcccacagagtctgtgtgtagccaggaagccccgctcaggtagccaccgccggggcactggctgctctgtcttggtcctgttaaccctccacctcctctcttggactccctccccaccccaaccactctttctttctcctttaacccaatggagactttctgatgcatcgttttctttgctgtgccaaagcaggtcagaagagggagaggaggggctgggggtgaggggccaggccatggccaaggggccagctgcccctcatttatcactctgaccttcacagggacagatctgatttatttattttggttaaaaaaaaaaaaggaacagaaacaactttgcattgcattggcttgacccataaactaagttatatccgtg

SEQ ID NO: 453281 - DNA, 9659 bp, Homo sapiens
  misc_feature (1880)..(1880): n is a, c, g, or t
cagaagggctctgttagtgcgcctctaagatggcgacgcctttggcggtaaattcggctgctagtctatggggtccttacaaagacatttggcataaagtgggaaatgctctttggagaagacaacctgaagctgttcaccttcttgataagattttgaagaaacacaaacctgacttcatctcattgttcaaaaatccgccaaaaaatgttcaacagcatgagaaggttcagaaagccagtacagagggagtcgccattcagggtcaacagggaactcgacttcttcctgaacagctcattaaagaagcctttattctcagtgacctttttgatattggagaattggcagctgttgagcttcttcttgctggagagcatcaacagccacattttcctggccttaccagaggattagtagctgttcttctgtactgggatggaaagcgatgcattgcgaattccttgaaagccttgatacagtctagacggggaaagacatggaccctagaactcagtccagagctggcttccatgacaacacgctttacagatgagctgatggagcaaggattgacttataaagttcttacgctggtgtcacagattgatgtgaataatgagtttgagaaactacagcgagagagaggtttgggcagtgaaaaacatcgcaaagaggtttctgatctcattaaggagtgcaggcagtctcttgcagaaagcctttttgcctgggcttgccagtcacctttaggcaaagaagacactctcctcctcattggacatttggaaagagtgacagttgaggctaatggctcactggatgcagtgaatctggctcttcttatggcgcttctatactgttttgatatcagttttatagagcaaagcacagaggaacgagatgatatgattcatcaacttccactgttgacagaaaaacagtacattgcaacaattcactctcgtcttcaggactcacagctttggaaactgcctgggctccaagccactgttagacttgcctgggcgctggcattgaggggaatatcccagctacctgatgtgacagctctggcagaattcacagaggcagatgaagcaatggcagaactcgcaattgctgacaacgttttcctgttcctcatggaatctgtagtggtatcagaatacttttatcaggaagaattttatattcgcagagtccataatctcatcacagatttccttgcacttatgccaatgaaggtgaaacagctgaggaatcgggcagatgaagatgctcgaatgattcacatgagtatgcagatgggtaatgaaccccccatttcacttagaagggacctggaacacttaatgcttttgattggcgagctatataaaaagaacccttttcatctggagcttgctctagaatattggtgtcccacagagcctcttcagactccgactatcatgggctcttatctaggggtggctcatcagcggccccctcaacgccaggttgtcttgtcaaagtttgttaggcaaatgggtgacctgttgcctccaactatttatattccttatttgaagatgctccagggattggccaatgggcctcagtgtgcccactactgtttcagcctgctcaaagtcaatggtagtagtcatgttgaaaatattcagggagcaggtggcagtcctgtttcctgggaacatttctttcactccttgatgctttaccacgaacaccttcggaaggatcttccaagtgcagatagtgtccagtaccgtcaccttccttcccgtggcatcacccagaaggagcaagatggattgattgcttttttgcagctcacgtctaccatcattacttggagtgaaaatgctcgcttggcnctctgtgaacaccctcagtggacccctgttgtggtgattctgggactcctccaatgcagtattccccctgtcctaaaagctgagctactgaagacactcgcagcttttggaaaatctcctgaaattgctgcttccctctggcagtcattggaatacactcagatactgcagaccgtgaggattccaagccaaaggcaagctattggtattgaggttgaactaaatgaaatagaatcccggtgtgaagaatacccattgactcgggccttttgccagcttattagtactctggtggagagctcatttccttctaatttgggtgctggacttgcggccccctggctttgacccttatttgcagttccttagagactctgtgtttctacgattccgtacaagagcttaccggagagcagctgaaaagtgggaagttgctgaggtggttttggaggtgttttataaattgctcagagattatgagcctcagcttgaagattttgtagaccagtttgtggaactacaaggagaagaaatcatagcctataagccacctggatttagtctgatgtatcatctgctgaatgagtcaccaatgttggagcttgctctcagtttactggaagaaggagttaagcagcttgacacctatgccccctttcctgggaaaaaacacctggagaaagcagtacagcattgccttgcacttctcaatcttactctgcaaaaggaaaatctttttatggaccttctaagagagagtcaactggctctaatagtctgtcctttagaacagcttttgcagggaattaatcccagaactaagaaggcagataatgtggtaaacattgccagatacctatatcatggcaatactaatccagaattggcttttgaaagtgccaagatcctctgttgtatctcttgcaactctaatattcagataaagttggttggagatttcacacatgaccagagtataagtcagaaactaatggctggatttgtggagtgtttggattgtgaagatgcagaagaatttgtacgtctggaagagggatcagaacttgaaaagaaattagttgcaattcgtcatgaaacaagaatccacatcttgaatcttctcattacctctctggaatgcaatccacccaatcttgctctctacctgttgggctttgaattgaaaaaacctgtcagtactacaaacctacaagatccaggagtgttaggttgccctcggacatgccttcacgccattctaaacatcttggagaaaggaacggaagggagaacaggcccagtggcggtgcgagaatctcctcagctggctgagctatgttaccaggtcatatatcagttatgtgcatgctctgatacatctggtcctactatgaggtacttgagaaccagccaggatttcttattttcccagttgcagtatctaccattttctaacaaagaatatgaaatatctatgctgaaccagatgtcatggcttatgaaaactgcctcaatagagctaagggtaacctctctgaatcgtcagcggtcacatacccagaggctcctacacctcttactggatgacatgccagtgaaaccatactcagatggtgaaggaggaatagaagatgaaaacaggtctgtttctgggttccttcactttgacactgctacaaaagtacgtcgaaaaattctaaatattcttgactcgattgacttcagtcaggagatccctgagcctttgcagttggatttttttgatcgggcccagattgaacaagttattgctaactgtgaacacaagaatttacggggacagacagtctgcaatgtcaagcttcttcatagggttcttgtagctgaagtaaatgcccttcagggtatggcagccataggacagagacctctactaatggaggaaatcagcactgtacttcagtatgtggtaggaagaaataaattgctgcagtgtcttcatgcaaaacgtcatgctctggagtcgtggaggcaactagtagaaattatactgacagcttgtccccaggacctcattcaggcagaggatcgacaactgattattcgtgatattttacaagatgtgcatgataagatactggatgatgaagctgcgcaagagttaatgcctgtggtcgccggggcagtgttcacactgactgctcacctaagccaggccgtcctcactgaacagaagcaaacatcagtcttgggaccagcagaggcccattacgcttttatgcttgatagttgcttcacctcacctcctcctgaagagaacccattagtgggttttgcttctattggagattcttcactttacatcatattgaagaaactgttagacttcattttgaagacaggtggtggattccaacgagtgaggactcacttgtatggctctctgctttattacttacagattgcccagagacctgatgaaccagacaccttagaagcagccaagaaaaccatgtgggaaaggctgacagcccctgaagatgtatttagcaaattacagcgagaaaacatagccattattgaaagttatggcgccgccctcatggaagtggtctgtcgagatgcttgtgatggtcatgagattggaaggatgctggccctggctctacttgatagaattgtctccgtggataaacagcagcagtggcttttgtatctttctaacagtggctacttgaaggtcctcgtagacagcttggtagaagatgaccgtactttgcagagcttactcaccccacagcctccccttttaaaagcactttatacttatgaatctaaaatggcatttctcacaagagtggcaaagatacagcagggtgcattagagctgctaagatcaggggtgattgtgagactagctcaatgccaagtctatgacatgcgcccagaaacggacccgcagagcatgtttggcatgagagaccctccaatgttcatccctaccccagtggatcgctaccgccagattctcctcccagctctccagctgtgccaggtcatcctcacatctagtatggcccagcacttgcaggcagcagggcaggtattgcagtttcttatttcacattctgataccatacaagcaattctgcgctgtcaggatgttagtgctgggtctttgcaggaattggctctgctgacaggaattataagtaaagcagcacttcctggaatattaagtgaacttgacgttgatgtaaatgaagggtctctaatggagctacagggacatattggaagattccagcgccagtgcttaggactactaagtcgctttggtggctctgacagactgcgtcagtttaaatttcaagacgataatgtggagggagataaagtaagcaagaaagatgagattgaactggctatgcagcagatttgtgccaatgtaatggaatattgccagtcactcatgttacagagttcccctaccttccagcatgctgtgtgtctcttcactcctagcctttcagaaacagttaatagagatggaccgcggcaagatacccaagctccagtggttccatactggcgcctgcctggtttaggcattatcatctacctgctgaaacagagtgctaatgatttcttcagctattatgacagtcatcgacagagtgtcagcaagctacaaaatgtagagcagcttcccccagatgagataaaagagttgtgtcagtctgtgatgcctgctggtgttgataaaatctccactgctcagaaatatgttctagcaagacggcgcttggtgaaggtgatcaacaatcgagctaaactgctttccctttgttcttttatcatagagacctgcctatttattctttggcgccatctggagtactacttgttacattgcatgcccacggattctcaagattccttatttgcctcgagaaccttgtttaaaagcagaagactgcaagattccttcgcctcagaaaccaatctagattttagaagtgggctggctatagtgagccaacatgatttagaccagcttcaggctgatgcaatcaacgcttttggagaatcactacaaaagaaacttctggacattgaaggattatattcaaaagttcgatctcgatatagtttcatacaggctcttgtcagacgtatccgtggcctctaaactagaggccacggacaaatacaaagattgcttagtgggattaagattccaccattcccagactgttaagacattttcacaaaacagaccagcagcagctaggacatttcaacagattcggtgctattctgcacctgttgctgctgagccctttctcagtgggactagttcgaactatgtggaggagatgtactgtgcttggctggaaaaccccaaaagtgtacataagtcatgggacattttttttcgcaacacgaatgccggagccccaccgggcactgcctaccagagtccccttcccctgagccgaggctccctggctgctgtggcccatgcacagtccctggtagaagcacagcccaacgtggacaagctcgtggaggaccacctggcagtgcagtcgctcatcagggcatatcagatacgagggcaccatgtagcacagctggaccccctggggattttggatgctgatctggactcctccgtgcccgctgacattatctcatccacagacaaacttgggttctatggcctggatgagtctgacctcgacaaggtcttccacttgcccaccaccactttcatcgggggacaggaatcagcacttcctctgcgggagatcatccgtcggctggagatggcctactgccagcatattggggtggagttcatgttcatcaatgacctggagcagtgccagtggatccggcagaagtttgagacccctgggatcatgcagttcacaaatgaggagaaacggaccctgctggccaggcttgtgcggtccaccaggtttgaggagttcctacagcggaagtggtcctctgagaagcgctttggtctagaaggctgcgaggtactgatccctgccctcaagaccatcattgacaagtctagtgagaatggcgtggactacgtgatcatgggcatgccacacagagggcggctgaacgtgcttgcaaatgtcatcaggaaggagctggaacagatcttctgtcaattcgattcaaagctggaggcagctgatgagggctccggagatgtgaagtaccacctgggcatgtatcaccgcaggatcaatcgtgtcaccgacaggaacattaccttgtccttggtggccaacccttcccaccttgaggccgctgaccccgtggtgatgggcaagaccaaagccgaacagttttactgtggcgacactgaagggaaaaaggtcatgtccatcctgttgcatggggatgctgcatttgctggccagggcattgtgtacgagaccttccacctcagcgacctgccatcctacacaactcatggcaccgtgcacgtggtcgtcaacaaccagatcggcttcaccaccgaccctcggatggcccgctcctccccctaccccactgacgtggcccgagtggtgaatgcccccattttccacgtgaactcagatgaccccgaggctgtcatgtacgtgtgcaaagtggcggccgagtggaggagcaccttccacaaggacgtggttgtcgatttgccaccgccaccatgtgctccatgaccagaatgtggacaagagaacctgcatccccatgaaccatctctggcccaatcaggccccctatactgtgtgcaacagctcactgtctgagtacggcgtgctgggctttgagctgggcttcgccatggccagtcctaatgccctggtcctctgggaagcccaatttggtgacttccacaacacggcccagtgtatcatcgaccagttcatctgcccgggacaagccaagtgggtgcggcagaatggcatcgtgttgctgctgccccatggcatggagggcatgggtccagaacattcctccgcccgcccagagcggttcttgcagatgtgcaacgatgacccagatgtcctgccagaccttaaagaagccaacttcgacatcaatcagctatatgactgcaattgggttgttgtcaactgctccactcctggcaacttcttccacgtgctacgacgccagatcctgctgccattccggaagccgttaattatcttcacccccaaatccctgttgcgccaccccgaggccagatccagctttgatgagatgcttccaggaacccacttccagcgggtgatcccagaagatggccctgcagctcagaacccagaaaatgtcaaaaggcttctcttctgcaccggcaaagtgtattatgacctcacccgggagcgcaaagcacgcgacatggtggggcaggtggccatcacaaggattgagcagctgtcgccattcccctttgacctcctgctgaaggaggtgcagaagtaccccaatgctgagctggcctggtgccaggaggagcacaagaaccaaggctactatgactacgtgaagccaagacttcggaccaccatcagccgcgccaagcccgtctggtatgccggccgggacccagcggctgctccagccaccggcaacaagaagacccacctgacggagctgcagcgcctcctggacacggccttcgacctggacgtcttcaagaacttctcgtagatgctgcctagggttgcttgggccactgccctctccacacccatgactgccccttgcttctcaactaaagaatagtgcctcagcgctgcccacaccaccgccctcctcgctgtgccaccacccctccctctgctctcataggagttaggctgtcgtccccctccagtgcttggctgccccacaggccacacgctgcccaggctctgctgacttctgagcagttttccaggaggccggggggagcaggaggaggaaaggtagcccccgagggatgtccttggggaggggtcagctctggccacaatcctccccaccagtctcacccactaggataggaactgggccttgtgtgctggcttccgctgtcacccagcaaggcacaggctcctgtatttgagactaggatagcttcatcttgagcctgagccttagaatctgtagaggagcctggagtcggatctagccatggctggcagaggtttctagggtgggccccagccgtggcgtgaactgaggatgacccggggcagctggcaggagagagccttggcctgacctggcacagaaagggcagcttcagtctctgcagtgtccattatctgctgttccttcgagggttccaggctgtgtgtggggcccaagcatgccccacccacccctcctgggcccaggcagcacctggagcccacagagtctgtgtgtagccaggaagccccgctcaggtagccaccgccggggcactggctgctctgtcttggtcctgttaaccctccacctcctctcttggactccctccccaccccaaccactctttctttctcctttaacccaatggagactttctgatgcatcgttttctttgctgtgccaaagcaggtcagaagagggagaggaggggctgggggtgaggggccaggccatggccaaggggccagctgcccctcatttatcactctgaccttcacagggacagatctgatttatttattttggttaaaaaaaaaaaaggaacagaaacaactttgcattgcattggcttgacccataaactaagttatatccgtg

SEQ ID NO: 453282 - DNA, 4759 bp, Homo sapiens
ctagaggccacggagagcacatccacatgaatgccactcagtgggaaactctgactgattgtactaagtggctgggcagagaaggtaagaatgagattttaaagttgctttttctttcccacttctaatcttcataggatgagatgtttgggataagaaaagagcaaaaaaattgggtcagtgttttgctttttcatcgtgttaattgattccattttgggagcataatttctgccctaagttaatagaacatcatataactgttggacattaaatacttagatagaactgaataaatacttatgcaaggtaatacagttgtctctccgtaattcatagatgcccacggattctcaagattccttatttgcctcgagaaccttgtttaaaagcagaagactgcaagattccttcgcctcagaaaccaatctagattttagaagtgggctggctatagtgagccaacatgatttagaccagcttcaggctgatgcaatcaacgcttttggagaatcactacaaaagaaacttctggacattgaaggattatattcaaaagttcgatctcgatatagtttcatacaggctcttgtcagacgtatccgtggcctctaaactagaggccacggacaaatacaaagattgcttagtgggattaagattccaccattcccagactgttaagacattttcacaaaacagaccagcagcagctaggacatttcaacagattcggtgctattctgcacctgttgctgctgagccctttctcagtgggactagttcgaactatgtggaggagatgtactgtgcttggctggaaaaccccaaaagtgtacataagtcatgggacattttttttcgcaacacgaatgccggagccccaccgggcactgcctaccagagtccccttcccctgagccgaggctccctggctgctgtggcccatgcacagtccctggtagaagcacagcccaacgtggacaagctcgtggaggaccacctggcagtgcagtcgctcatcagggcatatcagatacgagggcaccatgtagcacagctggaccccctggggattttggatgctgatctggactcctccgtgcccgctgacattatctcatccacagacaaacttgggttctatggcctggatgagtctgacctcgacaaggtcttccacttgcccaccaccactttcatcgggggacaggaatcagcacttcctctgcgggagatcatccgtcggctggagatggcctactgccagcatattggggtggagttcatgttcatcaatgacctggagcagtgccagtggatccggcagaagtttgagacccctgggatcatgcagttcacaaatgaggagaaacggaccctgctggccaggcttgtgcggtccaccaggtttgaggagttcctacagcggaagtggtcctctgagaagcgctttggtctagaaggctgcgaggtactgatccctgccctcaagaccatcattgacaagtctagtgagaatggcgtggactacgtgatcatgggcatgccacacagagggcggctgaacgtgcttgcaaatgtcatcaggaaggagctggaacagatcttctgtcaattcgattcaaagctggaggcagctgatgagggctccggagatgtgaagtaccacctgggcatgtatcaccgcaggatcaatcgtgtcaccgacaggaacattaccttgtccttggtggccaacccttcccaccttgaggccgctgaccccgtggtgatgggcaagaccaaagccgaacagttttactgtggcgacactgaagggaaaaaggtcatgtccatcctgttgcatggggatgctgcatttgctggccagggcattgtgtacgagaccttccacctcagcgacctgccatcctacacaactcatggcaccgtgcacgtggtcgtcaacaaccagatcggcttcaccaccgaccctcggatggcccgctcctccccctaccccactgacgtggcccgagtggtgaatgcccccattttccacgtgaactcagatgaccccgaggctgtcatgtacgtgtgcaaagtggcggccgagtggaggagcaccttccacaaggacgtggttgtcgatttggtgtgttaccggcgcaacggccacaacgagatggatgagcccatgttcacgcagccgctcatgtacaagcagatccgcaagcagaagcctgtgttacagaagtacgctgagctgctggtgtcgcagggtgtggtcaaccagcctgagtatgaggaggaaatttccaagtatgataagatctgtgaggaagcttttgccagatctaaagatgagaagatcttgcacattaagcactggctggactctccctggcctggcttcttcaccctggacgggcagcccaggagcatgtcctgcccctccacgggtctgacggaggatattctgacacacatcgggaatgtggctagttctgtgcctgtggaaaactttactattcatggagggctgagccggatcttgaagactcgtggggaaatggtgaagaaccggactgtggactgggctctagcggagtacatggcgtttggctcgctcctgaaggagggcatccacattcggctgagcggccaggacgtggagcggggcacattcagccaccgccaccatgtgctccatgaccagaatgtggacaagagaacctgcatccccatgaaccatctctggcccaatcaggccccctatactgtgtgcaacagctcactgtctgagtacggcgtgctgggctttgagctgggcttcgccatggccagtcctaatgccctggtcctctgggaagcccaatttggtgacttccacaacacggcccagtgtatcatcgaccagttcatctgcccgggacaagccaagtgggtgcggcagaatggcatcgtgttgctgctgccccatggcatggagggcatgggtccagaacattcctccgcccgcccagagcggttcttgcagatgtgcaacgatgacccagatgtcctgccagaccttaaagaagccaacttcgacatcaatcagctatatgactgcaattgggttgttgtcaactgctccactcctggcaacttcttccacgtgctacgacgccagatcctgctgccattccggaagccgttaattatcttcacccccaaatccctgttgcgccaccccgaggccagatccagctttgatgagatgcttccaggaacccacttccagcgggtgatcccagaagatggccctgcagctcagaacccagaaaatgtcaaaaggcttctcttctgcaccggcaaagtgtattatgacctcacccgggagcgcaaagcacgcgacatggtggggcaggtggccatcacaaggattgagcagctgtcgccattcccctttgacctcctgctgaaggaggtgcagaagtaccccaatgctgagctggcctggtgccaggaggagcacaagaaccaaggctactatgactacgtgaagccaagacttcggaccaccatcagccgcgccaagcccgtctggtatgccggccgggacccagcggctgctccagccaccggcaacaagaagacccacctgacggagctgcagcgcctcctggacacggccttcgacctggacgtcttcaagaacttctcgtagatgctgcctagggttgcttgggccactgccctctccacacccatgactgccccttgcttctcaactaaagaatagtgcctcagcgctgcccacaccaccgccctcctcgctgtgccaccacccctccctctgctctcataggagttaggctgtcgtccccctccagtgcttggctgccccacaggccacacgctgcccaggctctgctgacttctgagcagttttccaggaggccggggggagcaggaggaggaaaggtagcccccgagggatgtccttggggaggggtcagctctggccacaatcctccccaccagtctcacccactaggataggaactgggccttgtgtgctggcttccgctgtcacccagcaaggcacaggctcctgtatttgagactaggatagcttcatcttgagcctgagccttagaatctgtagaggagcctggagtcggatctagccatggctggcagaggtttctagggtgggccccagccgtggcgtgaactgaggatgacccggggcagctggcaggagagagccttggcctgacctggcacagaaagggcagcttcagtctctgcagtgtccattatctgctgttccttcgagggttccaggctgtgtgtggggcccaagcatgccccacccacccctcctgggcccaggcagcacctggagcccacagagtctgtgtgtagccaggaagccccgctcaggtagccaccgccggggcactggctgctctgtcttggtcctgttaaccctccacctcctctcttggactccctccccaccccaaccactctttctttctcctttaacccaatggagactttctgatgcatcgttttctttgctgtgccaaagcaggtcagaagagggagaggaggggctgggggtgaggggccaggccatggccaaggggccagctgcccctcatttatcactctgaccttcacagggacagatctgatttatttattttggttaaaaaaaaaaaaggaacagaaacaactttgcattgcattggcttgacccataaactaagttatatccgtg

SEQ ID NO: 453283 - DNA, 4232 bp, Homo sapiens
ggcgtccttgtgaactttccgcttggatcctgactctgctgttagtagcctatgaccttggatgaaatgcagttgtgaaaaacttcaggacaaaaatgtttcatttaaggacttgtgctgctaagttgaggccattgacggcttcccagactgttaagacattttcacaaaacagaccagcagcagctaggacatttcaacagattcggtgctattctgcacctgttgctgctgagccctttctcagtgggactagttcgaactatgtggaggagatgtactgtgcttggctggaaaaccccaaaagtgtacataagtcatgggacattttttttcgcaacacgaatgccggagccccaccgggcactgcctaccagagtccccttcccctgagccgaggctccctggctgctgtggcccatgcacagtccctggtagaagcacagcccaacgtggacaagctcgtggaggaccacctggcagtgcagtcgctcatcagggcatatcagatacgagggcaccatgtagcacagctggaccccctggggattttggatgctgatctggactcctccgtgcccgctgacattatctcatccacagacaaacttgggttctatggcctggatgagtctgacctcgacaaggtcttccacttgcccaccaccactttcatcgggggacaggaatcagcacttcctctgcgggagatcatccgtcggctggagatggcctactgccagcatattggggtggagttcatgttcatcaatgacctggagcagtgccagtggatccggcagaagtttgagacccctgggatcatgcagttcacaaatgaggagaaacggaccctgctggccaggcttgtgcggtccaccaggtttgaggagttcctacagcggaagtggtcctctgagaagcgctttggtctagaaggctgcgaggtactgatccctgccctcaagaccatcattgacaagtctagtgagaatggcgtggactacgtgatcatgggcatgccacacagagggcggctgaacgtgcttgcaaatgtcatcaggaaggagctggaacagatcttctgtcaattcgattcaaagctggaggcagctgatgagggctccggagatgtgaagtaccacctgggcatgtatcaccgcaggatcaatcgtgtcaccgacaggaacattaccttgtccttggtggccaacccttcccaccttgaggccgctgaccccgtggtgatgggcaagaccaaagccgaacagttttactgtggcgacactgaagggaaaaaggtcatgtccatcctgttgcatggggatgctgcatttgctggccagggcattgtgtacgagaccttccacctcagcgacctgccatcctacacaactcatggcaccgtgcacgtggtcgtcaacaaccagatcggcttcaccaccgaccctcggatggcccgctcctccccctaccccactgacgtggcccgagtggtgaatgcccccattttccacgtgaactcagatgaccccgaggctgtcatgtacgtgtgcaaagtggcggccgagtggaggagcaccttccacaaggacgtggttgtcgatttggtgtgttaccggcgcaacggccacaacgagatggatgagcccatgttcacgcagccgctcatgtacaagcagatccgcaagcagaagcctgtgttacagaagtacgctgagctgctggtgtcgcagggtgtggtcaaccagcctgagtatgaggaggaaatttccaagtatgataagatctgtgaggaagcttttgccagatctaaagatgagaagatcttgcacattaagcactggctggactctccctggcctggcttcttcaccctggacgggcagcccaggagcatgtcctgcccctccacgggtctgacggaggatattctgacacacatcgggaatgtggctagttctgtgcctgtggaaaactttactattcatggagggctgagccggatcttgaagactcgtggggaaatggtgaagaaccggactgtggactgggctctagcggagtacatggcgtttggctcgctcctgaaggagggcatccacattcggctgagcggccaggacgtggagcggggcacattcagccaccgccaccatgtgctccatgaccagaatgtggacaagagaacctgcatccccatgaaccatctctggcccaatcaggccccctatactgtgtgcaacagctcactgtctgagtacggcgtgctgggctttgagctgggcttcgccatggccagtcctaatgccctggtcctctgggaagcccaatttggtgacttccacaacacggcccagtgtatcatcgaccagttcatctgcccgggacaagccaagtgggtgcggcagaatggcatcgtgttgctgctgccccatggcatggagggcatgggtccagaacattcctccgcccgcccagagcggttcttgcagatgtgcaacgatgacccagatgtcctgccagaccttaaagaagccaacttcgacatcaatcagctatatgactgcaattgggttgttgtcaactgctccactcctggcaacttcttccacgtgctacgacgccagatcctgctgccattccggaagccgttaattatcttcacccccaaatccctgttgcgccaccccgaggccagatccagctttgatgagatgcttccaggaacccacttccagcgggtgatcccagaagatggccctgcagctcagaacccagaaaatgtcaaaaggcttctcttctgcaccggcaaagtgtattatgacctcacccgggagcgcaaagcacgcgacatggtggggcaggtggccatcacaaggattgagcagctgtcgccattcccctttgacctcctgctgaaggaggtgcagaagtaccccaatgctgagctggcctggtgccaggaggagcacaagaaccaaggctactatgactacgtgaagccaagacttcggaccaccatcagccgcgccaagcccgtctggtatgccggccgggacccagcggctgctccagccaccggcaacaagaagacccacctgacggagctgcagcgcctcctggacacggccttcgacctggacgtcttcaagaacttctcgtagatgctgcctagggttgcttgggccactgccctctccacacccatgactgccccttgcttctcaactaaagaatagtgcctcagcgctgcccacaccaccgccctcctcgctgtgccaccacccctccctctgctctcataggagttaggctgtcgtccccctccagtgcttggctgccccacaggccacacgctgcccaggctctgctgacttctgagcagttttccaggaggccggggggagcaggaggaggaaaggtagcccccgagggatgtccttggggaggggtcagctctggccacaatcctccccaccagtctcacccactaggataggaactgggccttgtgtgctggcttccgctgtcacccagcaaggcacaggctcctgtatttgagactaggatagcttcatcttgagcctgagccttagaatctgtagaggagcctggagtcggatctagccatggctggcagaggtttctagggtgggccccagccgtggcgtgaactgaggatgacccggggcagctggcaggagagagccttggcctgacctggcacagaaagggcagcttcagtctctgcagtgtccattatctgctgttccttcgagggttccaggctgtgtgtggggcccaagcatgccccacccacccctcctgggcccaggcagcacctggagcccacagagtctgtgtgtagccaggaagccccgctcaggtagccaccgccggggcactggctgctctgtcttggtcctgttaaccctccacctcctctcttggactccctccccaccccaaccactctttctttctcctttaacccaatggagactttctgatgcatcgttttctttgctgtgccaaagcaggtcagaagagggagaggaggggctgggggtgaggggccaggccatggccaaggggccagctgcccctcatttatcactctgaccttcacagggacagatctgatttatttattttggttaaaaaaaaaaaaggaacagaaacaactttgcattgcattggcttgacccataaactaagttatatccgtg

SEQ ID NO: 453284 - DNA, 4240 bp, Homo sapiens
acgccatacgccggggcggggccgagagtttggagccccggagtggggtgtcggcgcctcattcgggtggagctgagccggagacaggcagttgtgaaaaacttcaggacaaaaatgtttcatttaaggacttgtgctgctaagttgaggccattgacggcttcccagactgttaagacattttcacaaaacagaccagcagcagctaggacatttcaacagattcggtgctattctgcacctgttgctgctgagccctttctcagtgggactagttcgaactatgtggaggagatgtactgtgcttggctggaaaaccccaaaagtgtacataagtcatgggacattttttttcgcaacacgaatgccggagccccaccgggcactgcctaccagagtccccttcccctgagccgaggctccctggctgctgtggcccatgcacagtccctggtagaagcacagcccaacgtggacaagctcgtggaggaccacctggcagtgcagtcgctcatcagggcatatcaggtcaggggtcaccacattgcaaaaccttgatcctctcggaattagttgtgtaaattttgatgatgctccagtaactgtttcttcaaacgtggggttctatggcctggatgagtctgacctcgacaaggtcttccacttgcccaccaccactttcatcgggggacaggaatcagcacttcctctgcgggagatcatccgtcggctggagatggcctactgccagcatattggggtggagttcatgttcatcaatgacctggagcagtgccagtggatccggcagaagtttgagacccctgggatcatgcagttcacaaatgaggagaaacggaccctgctggccaggcttgtgcggtccaccaggtttgaggagttcctacagcggaagtggtcctctgagaagcgctttggtctagaaggctgcgaggtactgatccctgccctcaagaccatcattgacaagtctagtgagaatggcgtggactacgtgatcatgggcatgccacacagagggcggctgaacgtgcttgcaaatgtcatcaggaaggagctggaacagatcttctgtcaattcgattcaaagctggaggcagctgatgagggctccggagatgtgaagtaccacctgggcatgtatcaccgcaggatcaatcgtgtcaccgacaggaacattaccttgtccttggtggccaacccttcccaccttgaggccgctgaccccgtggtgatgggcaagaccaaagccgaacagttttactgtggcgacactgaagggaaaaaggtcatgtccatcctgttgcatggggatgctgcatttgctggccagggcattgtgtacgagaccttccacctcagcgacctgccatcctacacaactcatggcaccgtgcacgtggtcgtcaacaaccagatcggcttcaccaccgaccctcggatggcccgctcctccccctaccccactgacgtggcccgagtggtgaatgcccccattttccacgtgaactcagatgaccccgaggctgtcatgtacgtgtgcaaagtggcggccgagtggaggagcaccttccacaaggacgtggttgtcgatttggtgtgttaccggcgcaacggccacaacgagatggatgagcccatgttcacgcagccgctcatgtacaagcagatccgcaagcagaagcctgtgttacagaagtacgctgagctgctggtgtcgcagggtgtggtcaaccagcctgagtatgaggaggaaatttccaagtatgataagatctgtgaggaagcttttgccagatctaaagatgagaagatcttgcacattaagcactggctggactctccctggcctggcttcttcaccctggacgggcagcccaggagcatgtcctgcccctccacgggtctgacggaggatattctgacacacatcgggaatgtggctagttctgtgcctgtggaaaactttactattcatggagggctgagccggatcttgaagactcgtggggaaatggtgaagaaccggactgtggactgggctctagcggagtacatggcgtttggctcgctcctgaaggagggcatccacattcggctgagcggccaggacgtggagcggggcacattcagccaccgccaccatgtgctccatgaccagaatgtggacaagagaacctgcatccccatgaaccatctctggcccaatcaggccccctatactgtgtgcaacagctcactgtctgagtacggcgtgctgggctttgagctgggcttcgccatggccagtcctaatgccctggtcctctgggaagcccaatttggtgacttccacaacacggcccagtgtatcatcgaccagttcatctgcccgggacaagccaagtgggtgcggcagaatggcatcgtgttgctgctgccccatggcatggagggcatgggtccagaacattcctccgcccgcccagagcggttcttgcagatgtgcaacgatgacccagatgtcctgccagaccttaaagaagccaacttcgacatcaatcagctatatgactgcaattgggttgttgtcaactgctccactcctggcaacttcttccacgtgctacgacgccagatcctgctgccattccggaagccgttaattatcttcacccccaaatccctgttgcgccaccccgaggccagatccagctttgatgagatgcttccaggaacccacttccagcgggtgatcccagaagatggccctgcagctcagaacccagaaaatgtcaaaaggcttctcttctgcaccggcaaagtgtattatgacctcacccgggagcgcaaagcacgcgacatggtggggcaggtggccatcacaaggattgagcagctgtcgccattcccctttgacctcctgctgaaggaggtgcagaagtaccccaatgctgagctggcctggtgccaggaggagcacaagaaccaaggctactatgactacgtgaagccaagacttcggaccaccatcagccgcgccaagcccgtctggtatgccggccgggacccagcggctgctccagccaccggcaacaagaagacccacctgacggagctgcagcgcctcctggacacggccttcgacctggacgtcttcaagaacttctcgtagatgctgcctagggttgcttgggccactgccctctccacacccatgactgccccttgcttctcaactaaagaatagtgcctcagcgctgcccacaccaccgccctcctcgctgtgccaccacccctccctctgctctcataggagttaggctgtcgtccccctccagtgcttggctgccccacaggccacacgctgcccaggctctgctgacttctgagcagttttccaggaggccggggggagcaggaggaggaaaggtagcccccgagggatgtccttggggaggggtcagctctggccacaatcctccccaccagtctcacccactaggataggaactgggccttgtgtgctggcttccgctgtcacccagcaaggcacaggctcctgtatttgagactaggatagcttcatcttgagcctgagccttagaatctgtagaggagcctggagtcggatctagccatggctggcagaggtttctagggtgggccccagccgtggcgtgaactgaggatgacccggggcagctggcaggagagagccttggcctgacctggcacagaaagggcagcttcagtctctgcagtgtccattatctgctgttccttcgagggttccaggctgtgtgtggggcccaagcatgccccacccacccctcctgggcccaggcagcacctggagcccacagagtctgtgtgtagccaggaagccccgctcaggtagccaccgccggggcactggctgctctgtcttggtcctgttaaccctccacctcctctcttggactccctccccaccccaaccactctttctttctcctttaacccaatggagactttctgatgcatcgttttctttgctgtgccaaagcaggtcagaagagggagaggaggggctgggggtgaggggccaggccatggccaaggggccagctgcccctcatttatcactctgaccttcacagggacagatctgatttatttattttggttaaaaaaaaaaaaggaacagaaacaactttgcattgcattggcttgacccataaactaagttatatccgtg

SEQ ID NO: 453285 - DNA, 10012 bp, Homo sapiens
  misc_feature (1880)..(1880): n is a, c, g, or t
cagaagggctctgttagtgcgcctctaagatggcgacgcctttggcggtaaattcggctgctagtctatggggtccttacaaagacatttggcataaagtgggaaatgctctttggagaagacaacctgaagctgttcaccttcttgataagattttgaagaaacacaaacctgacttcatctcattgttcaaaaatccgccaaaaaatgttcaacagcatgagaaggttcagaaagccagtacagagggagtcgccattcagggtcaacagggaactcgacttcttcctgaacagctcattaaagaagcctttattctcagtgacctttttgatattggagaattggcagctgttgagcttcttcttgctggagagcatcaacagccacattttcctggccttaccagaggattagtagctgttcttctgtactgggatggaaagcgatgcattgcgaattccttgaaagccttgatacagtctagacggggaaagacatggaccctagaactcagtccagagctggcttccatgacaacacgctttacagatgagctgatggagcaaggattgacttataaagttcttacgctggtgtcacagattgatgtgaataatgagtttgagaaactacagcgagagagaggtttgggcagtgaaaaacatcgcaaagaggtttctgatctcattaaggagtgcaggcagtctcttgcagaaagcctttttgcctgggcttgccagtcacctttaggcaaagaagacactctcctcctcattggacatttggaaagagtgacagttgaggctaatggctcactggatgcagtgaatctggctcttcttatggcgcttctatactgttttgatatcagttttatagagcaaagcacagaggaacgagatgatatgattcatcaacttccactgttgacagaaaaacagtacattgcaacaattcactctcgtcttcaggactcacagctttggaaactgcctgggctccaagccactgttagacttgcctgggcgctggcattgaggggaatatcccagctacctgatgtgacagctctggcagaattcacagaggcagatgaagcaatggcagaactcgcaattgctgacaacgttttcctgttcctcatggaatctgtagtggtatcagaatacttttatcaggaagaattttatattcgcagagtccataatctcatcacagatttccttgcacttatgccaatgaaggtgaaacagctgaggaatcgggcagatgaagatgctcgaatgattcacatgagtatgcagatgggtaatgaaccccccatttcacttagaagggacctggaacacttaatgcttttgattggcgagctatataaaaagaacccttttcatctggagcttgctctagaatattggtgtcccacagagcctcttcagactccgactatcatgggctcttatctaggggtggctcatcagcggccccctcaacgccaggttgtcttgtcaaagtttgttaggcaaatgggtgacctgttgcctccaactatttatattccttatttgaagatgctccagggattggccaatgggcctcagtgtgcccactactgtttcagcctgctcaaagtcaatggtagtagtcatgttgaaaatattcagggagcaggtggcagtcctgtttcctgggaacatttctttcactccttgatgctttaccacgaacaccttcggaaggatcttccaagtgcagatagtgtccagtaccgtcaccttccttcccgtggcatcacccagaaggagcaagatggattgattgcttttttgcagctcacgtctaccatcattacttggagtgaaaatgctcgcttggcnctctgtgaacaccctcagtggacccctgttgtggtgattctgggactcctccaatgcagtattccccctgtcctaaaagctgagctactgaagacactcgcagcttttggaaaatctcctgaaattgctgcttccctctggcagtcattggaatacactcagatactgcagaccgtgaggattccaagccaaaggcaagctattggtattgaggttgaactaaatgaaatagaatcccggtgtgaagaatacccattgactcgggccttttgccagcttattagtactctggtggagagctcatttccttctaatttgggtgctggacttgcggccccctggctttgacccttatttgcagttccttagagactctgtgtttctacgattccgtacaagagcttaccggagagcagctgaaaagtgggaagttgctgaggtggttttggaggtgttttataaattgctcagagattatgagcctcagcttgaagattttgtagaccagtttgtggaactacaaggagaagaaatcatagcctataagccacctggatttagtctgatgtatcatctgctgaatgagtcaccaatgttggagcttgctctcagtttactggaagaaggagttaagcagcttgacacctatgccccctttcctgggaaaaaacacctggagaaagcagtacagcattgccttgcacttctcaatcttactctgcaaaaggaaaatctttttatggaccttctaagagagagtcaactggctctaatagtctgtcctttagaacagcttttgcagggaattaatcccagaactaagaaggcagataatgtggtaaacattgccagatacctatatcatggcaatactaatccagaattggcttttgaaagtgccaagatcctctgttgtatctcttgcaactctaatattcagataaagttggttggagatttcacacatgaccagagtataagtcagaaactaatggctggatttgtggagtgtttggattgtgaagatgcagaagaatttgtacgtctggaagagggatcagaacttgaaaagaaattagttgcaattcgtcatgaaacaagaatccacatcttgaatcttctcattacctctctggaatgcaatccacccaatcttgctctctacctgttgggctttgaattgaaaaaacctgtcagtactacaaacctacaagatccaggagtgttaggttgccctcggacatgccttcacgccattctaaacatcttggagaaaggaacggaagggagaacaggcccagtggcggtgcgagaatctcctcagctggctgagctatgttaccaggtcatatatcagttatgtgcatgctctgatacatctggtcctactatgaggtacttgagaaccagccaggatttcttattttcccagttgcagtatctaccattttctaacaaagaatatgaaatatctatgctgaaccagatgtcatggcttatgaaaactgcctcaatagagctaagggtaacctctctgaatcgtcagcggtcacatacccagaggctcctacacctcttactggatgacatgccagtgaaaccatactcagatggtgaaggaggaatagaagatgaaaacaggtctgtttctgggttccttcactttgacactgctacaaaagtacgtcgaaaaattctaaatattcttgactcgattgacttcagtcaggagatccctgagcctttgcagttggatttttttgatcgggcccagattgaacaagttattgctaactgtgaacacaagaatttacggggacagacagtctgcaatgtcaagcttcttcatagggttcttgtagctgaagtaaatgcccttcagggtatggcagccataggacagagacctctactaatggaggaaatcagcactgtacttcagtatgtggtaggaagaaataaattgctgcagtgtcttcatgcaaaacgtcatgctctggagtcgtggaggcaactagtagaaattatactgacagcttgtccccaggacctcattcaggcagaggatcgacaactgattattcgtgatattttacaagatgtgcatgataagatactggatgatgaagctgcgcaagagttaatgcctgtggtcgccggggcagtgttcacactgactgctcacctaagccaggccgtcctcactgaacagaagcaaacatcagtcttgggaccagcagaggcccattacgcttttatgcttgatagttgcttcacctcacctcctcctgaagagaacccattagtgggttttgcttctattggagattcttcactttacatcatattgaagaaactgttagacttcattttgaagacaggtggtggattccaacgagtgaggactcacttgtatggctctctgctttattacttacagattgcccagagacctgatgaaccagacaccttagaagcagccaagaaaaccatgtgggaaaggctgacagcccctgaagatgtatttagcaaattacagcgagaaaacatagccattattgaaagttatggcgccgccctcatggaagtggtctgtcgagatgcttgtgatggtcatgagattggaaggatgctggccctggctctacttgatagaattgtctccgtggataaacagcagcagtggcttttgtatctttctaacagtggctacttgaaggtcctcgtagacagcttggtagaagatgaccgtactttgcagagcttactcaccccacagcctccccttttaaaagcactttatacttatgaatctaaaatggcatttctcacaagagtggcaaagatacagcagggtgcattagagctgctaagatcaggggtgattgtgagactagctcaatgccaagtctatgacatgcgcccagaaacggacccgcagagcatgtttggcatgagagaccctccaatgttcatccctaccccagtggatcgctaccgccagattctcctcccagctctccagctgtgccaggtcatcctcacatctagtatggcccagcacttgcaggcagcagggcaggtattgcagtttcttatttcacattctgataccatacaagcaattctgcgctgtcaggatgttagtgctgggtctttgcaggaattggctctgctgacaggaattataagtaaagcagcacttcctggaatattaagtgaacttgacgttgatgtaaatgaagggtctctaatggagctacagggacatattggaagattccagcgccagtgcttaggactactaagtcgctttggtggctctgacagactgcgtcagtttaaatttcaagacgataatgtggagggagataaagtaagcaagaaagatgagattgaactggctatgcagcagatttgtgccaatgtaatggaatattgccagtcactcatgttacagagttcccctaccttccagcatgctgtgtgtctcttcactcctagcctttcagaaacagttaatagagatggaccgcggcaagatacccaagctccagtggttccatactggcgcctgcctggtttaggcattatcatctacctgctgaaacagagtgctaatgatttcttcagctattatgacagtcatcgacagagtgtcagcaagctacaaaatgtagagcagcttcccccagatgagataaaagagttgtgtcagtctgtgatgcctgctggtgttgataaaatctccactgctcagaaatatgttctagcaagacggcgcttggtgaaggtgatcaacaatcgagctaaactgctttccctttgttcttttatcatagagacctgcctatttattctttggcgccatctggagtactacttgttacattgcatgcccacggattctcaagattccttatttgcctcgagaaccttgtttaaaagcagaagactgcaagattccttcgcctcagaaaccaatctagattttagaagtgggctggctatagtgagccaacatgatttagaccagcttcaggctgatgcaatcaacgcttttggagaatcactacaaaagaaacttctggacattgaaggattatattcaaaagttcgatctcgatatagtttcatacaggctcttgtcagacgtatccgtggcctctaaactagaggccacggacaaatacaaagattgcttagtgggattaagattccaccattcccagactgttaagacattttcacaaaacagaccagcagcagctaggacatttcaacagattcggtgctattctgcacctgttgctgctgagccctttctcagtgggactagttcgaactatgtggaggagatgtactgtgcttggctggaaaaccccaaaagtgtacataagtcatgggacattttttttcgcaacacgaatgccggagccccaccgggcactgcctaccagagtccccttcccctgagccgaggctccctggctgctgtggcccatgcacagtccctggtagaagcacagcccaacgtggacaagctcgtggaggaccacctggcagtgcagtcgctcatcagggcatatcagatacgagggcaccatgtagcacagctggaccccctggggattttggatgctgatctggactcctccgtgcccgctgacattatctcatccacagacaaacttgggttctatggcctggatgagtctgacctcgacaaggtcttccacttgcccaccaccactttcatcgggggacaggaatcagcacttcctctgcgggagatcatccgtcggctggagatggcctactgccagcatattggggtggagttcatgttcatcaatgacctggagcagtgccagtggatccggcagaagtttgagacccctgggatcatgcagttcacaaatgaggagaaacggaccctgctggccaggcttgtgcggtccaccaggtttgaggagttcctacagcggaagtggtcctctgagaagcgctttggtctagaaggctgcgaggtactgatccctgccctcaagaccatcattgacaagtctagtgagaatggcgtggactacgtgatcatgggcatgccacacagagggcggctgaacgtgcttgcaaatgtcatcaggaaggagctggaacagatcttctgtcaattcgattcaaagctggaggcagctgatgagggctccggagatgtgaagtaccacctgggcatgtatcaccgcaggatcaatcgtgtcaccgacaggaacattaccttgtccttggtggccaacccttcccaccttgaggccgctgaccccgtggtgatgggcaagaccaaagccgaacagttttactgtggcgacactgaagggaaaaaggtcatgtccatcctgttgcatggggatgctgcatttgctggccagggcattgtgtacgagaccttccacctcagcgacctgccatcctacacaactcatggcaccgtgcacgtggtcgtcaacaaccagatcggcttcaccaccgaccctcggatggcccgctcctccccctaccccactgacgtggcccgagtggtgaatgcccccattttccacgtgaactcagatgaccccgaggctgtcatgtacgtgtgcaaagtggcggccgagtggaggagcaccttccacaaggacgtggttgtcgatttggtgtgttaccggcgcaacggccacaacgagatggatgagcccatgttcacgcagccgctcatgtacaagcagatccgcaagcagaagcctgtgttacagaagtacgctgagctgctggtgtcgcagggtgtggtcaaccagcctgagtatgaggaggaaatttccaagtatgataagatctgtgaggaagcttttgccagatctaaagatgagaagatcttgcacattaagcactggctggactctccctggcctggcttcttcaccctggacgggcagcccaggagcatgtcctgcccctccacgggtctgacggaggatattctgacacacatcgggaatgtggctagttctgtgcctgtggaaaactttactattcatggagggctgagccggatcttgaagactcgtggggaaatggtgaagaaccggactgtggactgggctctagcggagtacatggcgtttggctcgctcctgaaggagggcatccacattcggctgagcggccaggacgtggagcggggcacattcagccaccgccaccatgtgctccatgaccagaatgtggacaagagaacctgcatccccatgaaccatctctggcccaatcaggccccctatactgtgtgcaacagctcactgtctgagtacggcgtgctgggctttgagctgggcttcgccatggccagtcctaatgccctggtcctctgggaagcccaatttggtgacttccacaacacggcccagtgtatcatcgaccagttcatctgcccgggacaagccaagtgggtgcggcagaatggcatcgtgttgctgctgccccatggcatggagggcatgggtccagaacattcctccgcccgcccagagcggttcttgcagatgtgcaacgatgacccagatgtcctgccagaccttaaagaagccaacttcgacatcaatcagctatatgactgcaattgggttgttgtcaactgctccactcctggcaacttcttccacgtgctacgacgccagatcctgctgccattccggaagccgttaattatcttcacccccaaatccctgttgcgccaccccgaggccagatccagctttgatgagatgcttccaggaacccacttccagcgggtgatcccagaagatggccctgcagctcagaacccagaaaatgtcaaaaggcttctcttctgcaccggcaaagtgtattatgacctcacccgggagcgcaaagcacgcgacatggtggggcaggtggccatcacaaggattgagcagctgtcgccattcccctttgacctcctgctgaaggaggtgcagaagtaccccaatgctgagctggcctggtgccaggaggagcacaagaaccaaggctactatgactacgtgaagccaagacttcggaccaccatcagccgcgccaagcccgtctggtatgccggccgggacccagcggctgctccagccaccggcaacaagaagacccacctgacggagctgcagcgcctcctggacacggccttcgacctggacgtcttcaagaacttctcgtagatgctgcctagggttgcttgggccactgccctctccacacccatgactgccccttgcttctcaactaaagaatagtgcctcagcgctgcccacaccaccgccctcctcgctgtgccaccacccctccctctgctctcataggagttaggctgtcgtccccctccagtgcttggctgccccacaggccacacgctgcccaggctctgctgacttctgagcagttttccaggaggccggggggagcaggaggaggaaaggtagcccccgagggatgtccttggggaggggtcagctctggccacaatcctccccaccagtctcacccactaggataggaactgggccttgtgtgctggcttccgctgtcacccagcaaggcacaggctcctgtatttgagactaggatagcttcatcttgagcctgagccttagaatctgtagaggagcctggagtcggatctagccatggctggcagaggtttctagggtgggccccagccgtggcgtgaactgaggatgacccggggcagctggcaggagagagccttggcctgacctggcacagaaagggcagcttcagtctctgcagtgtccattatctgctgttccctccccaccccaaccactctttctttctcctttaacccaatggagactttctgatgcatcgttttctttgctgtgccaaagcaggtcagaagagggagaggaggggctgggggtgaggggccaggccatggccaaggggccagctgcccctcatttatcactctgaccttcacagggacagatctgatttatttattttggttaaaaaaaaaaaaggaacagaaacaactttgcattgcattggcttgacccataaactaagttatatccgtg

SEQ ID NO: 453286 - DNA, 2854 bp, Homo sapiens
catctcatattgttcctgtgtgaattgtatccgctatatgcgtcgacgacagatcggcttcaccaccgaccctcggatggcccgctcctccccctaccccactgacgtggcccgagtggtgaatgcccccattttccacgtgaactcagatgaccccgaggctgtcatgtacgtgtgcaaagtggcggccgagtggaggagcaccttccacaaggacgtggttgtcgatttggtgtgttaccggcgcaacggccacaacgagatggatgagcccatgttcacgcagccgctcatgtacaagcagatccgcaagcagaagcctgtgttacagaagtacgctgagctgctggtgtcgcagggtgtggtcaaccagcctgagtatgaggaggaaatttccaagtatgataagatctgtgaggaagcttttgccagatctaaagatgagaagatcttgcacattaagcactggctggactctccctggcctggcttcttcaccctggacgggcagcccaggagcatgtcctgcccctccacgggtctgacggaggatattctgacacacatcgggaatgtggctagttctgtgcctgtggaaaactttactattcatggagggctgagccggatcttgaagactcgtggggaaatggtgaagaaccggactgtggactgggctctagcggagtacatggcgtttggctcgctcctgaaggagggcatccacattcggctgagcggccaggacgtggagcggggcacattcagccaccgccaccatgtgctccatgaccagaatgtggacaagagaacctgcatccccatgaaccatctctggcccaatcaggccccctatactgtgtgcaacagctcactgtctgagtacggcgtgctgggctttgagctgggcttcgccatggccagtcctaatgccctggtcctctgggaagcccaatttggtgacttccacaacacggcccagtgtatcatcgaccagttcatctgcccgggacaagccaagtgggtgcggcagaatggcatcgtgttgctgctgccccatggcatggagggcatgggtccagaacattcctccgcccgcccagagcggttcttgcagatgtgcaacgatgacccagatgtcctgccagaccttaaagaagccaacttcgacatcaatcagctatatgactgcaattgggttgttgtcaactgctccactcctggcaacttcttccacgtgctacgacgccagatcctgctgccattccggaagccgttaattatcttcacccccaaatccctgttgcgccaccccgaggccagatccagctttgatgagatgcttccaggaacccacttccagcgggtgatcccagaagatggccctgcagctcagaacccagaaaatgtcaaaaggcttctcttctgcaccggcaaagtgtattatgacctcacccgggagcgcaaagcacgcgacatggtggggcaggtggccatcacaaggattgagcagctgtcgccattcccctttgacctcctgctgaaggaggtgcagaagtaccccaatgctgagctggcctggtgccaggaggagcacaagaaccaaggctactatgactacgtgaagccaagacttcggaccaccatcagccgcgccaagcccgtctggtatgccggccgggacccagcggctgctccagccaccggcaacaagaagacccacctgacggagctgcagcgcctcctggacacggccttcgacctggacgtcttcaagaacttctcgtagatgctgcctagggttgcttgggccactgccctctccacacccatgactgccccttgcttctcaactaaagaatagtgcctcagcgctgcccacaccaccgccctcctcgctgtgccaccacccctccctctgctctcataggagttaggctgtcgtccccctccagtgcttggctgccccacaggccacacgctgcccaggctctgctgacttctgagcagttttccaggaggccggggggagcaggaggaggaaaggtagcccccgagggatgtccttggggaggggtcagctctggccacaatcctccccaccagtctcacccactaggataggaactgggccttgtgtgctggcttccgctgtcacccagcaaggcacaggctcctgtatttgagactaggatagcttcatcttgagcctgagccttagaatctgtagaggagcctggagtcggatctagccatggctggcagaggtttctagggtgggccccagccgtggcgtgaactgaggatgacccggggcagctggcaggagagagccttggcctgacctggcacagaaagggcagcttcagtctctgcagtgtccattatctgctgttccttcgagggttccaggctgtgtgtggggcccaagcatgccccacccacccctcctgggcccaggcagcacctggagcccacagagtctgtgtgtagccaggaagccccgctcaggtagccaccgccggggcactggctgctctgtcttggtcctgttaaccctccacctcctctcttggactccctccccaccccaaccactctttctttctcctttaacccaatggagactttctgatgcatcgttttctttgctgtgccaaagcaggtcagaagagggagaggaggggctgggggtgaggggccaggccatggccaaggggccagctgcccctcatttatcactctgaccttcacagggacagatctgatttatttattttggttaaaaaaaaaaaaggaacagaaacaactttgcattgcattggcttgacccataaactaagttatatccgtg

SEQ ID NO: 453287 - DNA, 2679 bp, Homo sapiens
  misc_feature (4)..(4): n is a, c, g, or t
  misc_feature (9)..(9): n is a, c, g, or t
tgangatgntctagaggatccctcacgcccatgtcacaaggacgtggtgtacgattggtgtgttaccggcgcaacggccacaacgagatggatgagcccatgttcacgcagccgctcatgtacaagcagatccgcaagcagaagcctgtgttacagaagtacgctgagctgctggtgtcgcagggtgtggtcaaccagcctgagtatgaggaggaaatttccaagtatgataagatctgtgaggaagcttttgccagatctaaagatgagaagatcttgcacattaagcactggctggactctccctggcctggcttcttcaccctggacgggcagcccaggagcatgtcctgcccctccacgggtctgacggaggatattctgacacacatcgggaatgtggctagttctgtgcctgtggaaaactttactattcatggagggctgagccggatcttgaagactcgtggggaaatggtgaagaaccggactgtggactgggctctagcggagtacatggcgtttggctcgctcctgaaggagggcatccacattcggctgagcggccaggacgtggagcggggcacattcagccaccgccaccatgtgctccatgaccagaatgtggacaagagaacctgcatccccatgaaccatctctggcccaatcaggccccctatactgtgtgcaacagctcactgtctgagtacggcgtgctgggctttgagctgggcttcgccatggccagtcctaatgccctggtcctctgggaagcccaatttggtgacttccacaacacggcccagtgtatcatcgaccagttcatctgcccgggacaagccaagtgggtgcggcagaatggcatcgtgttgctgctgccccatggcatggagggcatgggtccagaacattcctccgcccgcccagagcggttcttgcagatgtgcaacgatgacccagatgtcctgccagaccttaaagaagccaacttcgacatcaatcagctatatgactgcaattgggttgttgtcaactgctccactcctggcaacttcttccacgtgctacgacgccagatcctgctgccattccggaagccgttaattatcttcacccccaaatccctgttgcgccaccccgaggccagatccagctttgatgagatgcttccaggaacccacttccagcgggtgatcccagaagatggccctgcagctcagaacccagaaaatgtcaaaaggcttctcttctgcaccggcaaagtgtattatgacctcacccgggagcgcaaagcacgcgacatggtggggcaggtggccatcacaaggattgagcagctgtcgccattcccctttgacctcctgctgaaggaggtgcagaagtaccccaatgctgagctggcctggtgccaggaggagcacaagaaccaaggctactatgactacgtgaagccaagacttcggaccaccatcagccgcgccaagcccgtctggtatgccggccgggacccagcggctgctccagccaccggcaacaagaagacccacctgacggagctgcagcgcctcctggacacggccttcgacctggacgtcttcaagaacttctcgtagatgctgcctagggttgcttgggccactgccctctccacacccatgactgccccttgcttctcaactaaagaatagtgcctcagcgctgcccacaccaccgccctcctcgctgtgccaccacccctccctctgctctcataggagttaggctgtcgtccccctccagtgcttggctgccccacaggccacacgctgcccaggctctgctgacttctgagcagttttccaggaggccggggggagcaggaggaggaaaggtagcccccgagggatgtccttggggaggggtcagctctggccacaatcctccccaccagtctcacccactaggataggaactgggccttgtgtgctggcttccgctgtcacccagcaaggcacaggctcctgtatttgagactaggatagcttcatcttgagcctgagccttagaatctgtagaggagcctggagtcggatctagccatggctggcagaggtttctagggtgggccccagccgtggcgtgaactgaggatgacccggggcagctggcaggagagagccttggcctgacctggcacagaaagggcagcttcagtctctgcagtgtccattatctgctgttccttcgagggttccaggctgtgtgtggggcccaagcatgccccacccacccctcctgggcccaggcagcacctggagcccacagagtctgtgtgtagccaggaagccccgctcaggtagccaccgccggggcactggctgctctgtcttggtcctgttaaccctccacctcctctcttggactccctccccaccccaaccactctttctttctcctttaacccaatggagactttctgatgcatcgttttctttgctgtgccaaagcaggtcagaagagggagaggaggggctgggggtgaggggccaggccatggccaaggggccagctgcccctcatttatcactctgaccttcacagggacagatctgatttatttattttggttaaaaaaaaaaaaggaacagaaacaactttgcattgcattggcttgacccataaactaagttatatccgtg

SEQ ID NO: 453288 - DNA, 1834 bp, Homo sapiens
agacctggggcagcagcaacacgatgccattctgccgcatggcatggagggcatgggtccagaacattcctccgcccgcccagagcggttcttgcagatgtgcaacgatgacccagatgtcctgccagaccttaaagaagccaacttcgacatcaatcagctatatgactgcaattgggttgttgtcaactgctccactcctggcaacttcttccacgtgctacgacgccagatcctgctgccattccggaagccgttaattatcttcacccccaaatccctgttgcgccaccccgaggccagatccagctttgatgagatgcttccaggaacccacttccagcgggtgatcccagaagatggccctgcagctcagaacccagaaaatgtcaaaaggcttctcttctgcaccggcaaagtgtattatgacctcacccgggagcgcaaagcacgcgacatggtggggcaggtggccatcacaaggattgagcagctgtcgccattcccctttgacctcctgctgaaggaggtgcagaagtaccccaatgctgagctggcctggtgccaggaggagcacaagaaccaaggctactatgactacgtgaagccaagacttcggaccaccatcagccgcgccaagcccgtctggtatgccggccgggacccagcggctgctccagccaccggcaacaagaagacccacctgacggagctgcagcgcctcctggacacggccttcgacctggacgtcttcaagaacttctcgtagatgctgcctagggttgcttgggccactgccctctccacacccatgactgccccttgcttctcaactaaagaatagtgcctcagcgctgcccacaccaccgccctcctcgctgtgccaccacccctccctctgctctcataggagttaggctgtcgtccccctccagtgcttggctgccccacaggccacacgctgcccaggctctgctgacttctgagcagttttccaggaggccggggggagcaggaggaggaaaggtagcccccgagggatgtccttggggaggggtcagctctggccacaatcctccccaccagtctcacccactaggataggaactgggccttgtgtgctggcttccgctgtcacccagcaaggcacaggctcctgtatttgagactaggatagcttcatcttgagcctgagccttagaatctgtagaggagcctggagtcggatctagccatggctggcagaggtttctagggtgggccccagccgtggcgtgaactgaggatgacccggggcagctggcaggagagagccttggcctgacctggcacagaaagggcagcttcagtctctgcagtgtccattatctgctgttccttcgagggttccaggctgtgtgtggggcccaagcatgccccacccacccctcctgggcccaggcagcacctggagcccacagagtctgtgtgtagccaggaagccccgctcaggtagccaccgccggggcactggctgctctgtcttggtcctgttaaccctccacctcctctcttggactccctccccaccccaaccactctttctttctcctttaacccaatggagactttctgatgcatcgttttctttgctgtgccaaagcaggtcagaagagggagaggaggggctgggggtgaggggccaggccatggccaaggggccagctgcccctcatttatcactctgaccttcacagggacagatctgatttatttattttggttaaaaaaaaaaaaggaacagaaacaactttgcattgcattggcttgacccataaactaagttatatccgtg

SEQ ID NO: 453289 - DNA, 9138 bp, Homo sapiens
  misc_feature (1880)..(1880): n is a, c, g, or t
  misc_feature (9015)..(9015): n is a, c, g, or t
  misc_feature (9031)..(9032): n is a, c, g, or t
  misc_feature (9034)..(9034): n is a, c, g, or t
  misc_feature (9048)..(9048): n is a, c, g, or t
  misc_feature (9053)..(9053): n is a, c, g, or t
  misc_feature (9060)..(9060): n is a, c, g, or t
  misc_feature (9062)..(9062): n is a, c, g, or t
cagaagggctctgttagtgcgcctctaagatggcgacgcctttggcggtaaattcggctgctagtctatggggtccttacaaagacatttggcataaagtgggaaatgctctttggagaagacaacctgaagctgttcaccttcttgataagattttgaagaaacacaaacctgacttcatctcattgttcaaaaatccgccaaaaaatgttcaacagcatgagaaggttcagaaagccagtacagagggagtcgccattcagggtcaacagggaactcgacttcttcctgaacagctcattaaagaagcctttattctcagtgacctttttgatattggagaattggcagctgttgagcttcttcttgctggagagcatcaacagccacattttcctggccttaccagaggattagtagctgttcttctgtactgggatggaaagcgatgcattgcgaattccttgaaagccttgatacagtctagacggggaaagacatggaccctagaactcagtccagagctggcttccatgacaacacgctttacagatgagctgatggagcaaggattgacttataaagttcttacgctggtgtcacagattgatgtgaataatgagtttgagaaactacagcgagagagaggtttgggcagtgaaaaacatcgcaaagaggtttctgatctcattaaggagtgcaggcagtctcttgcagaaagcctttttgcctgggcttgccagtcacctttaggcaaagaagacactctcctcctcattggacatttggaaagagtgacagttgaggctaatggctcactggatgcagtgaatctggctcttcttatggcgcttctatactgttttgatatcagttttatagagcaaagcacagaggaacgagatgatatgattcatcaacttccactgttgacagaaaaacagtacattgcaacaattcactctcgtcttcaggactcacagctttggaaactgcctgggctccaagccactgttagacttgcctgggcgctggcattgaggggaatatcccagctacctgatgtgacagctctggcagaattcacagaggcagatgaagcaatggcagaactcgcaattgctgacaacgttttcctgttcctcatggaatctgtagtggtatcagaatacttttatcaggaagaattttatattcgcagagtccataatctcatcacagatttccttgcacttatgccaatgaaggtgaaacagctgaggaatcgggcagatgaagatgctcgaatgattcacatgagtatgcagatgggtaatgaaccccccatttcacttagaagggacctggaacacttaatgcttttgattggcgagctatataaaaagaacccttttcatctggagcttgctctagaatattggtgtcccacagagcctcttcagactccgactatcatgggctcttatctaggggtggctcatcagcggccccctcaacgccaggttgtcttgtcaaagtttgttaggcaaatgggtgacctgttgcctccaactatttatattccttatttgaagatgctccagggattggccaatgggcctcagtgtgcccactactgtttcagcctgctcaaagtcaatggtagtagtcatgttgaaaatattcagggagcaggtggcagtcctgtttcctgggaacatttctttcactccttgatgctttaccacgaacaccttcggaaggatcttccaagtgcagatagtgtccagtaccgtcaccttccttcccgtggcatcacccagaaggagcaagatggattgattgcttttttgcagctcacgtctaccatcattacttggagtgaaaatgctcgcttggcnctctgtgaacaccctcagtggacccctgttgtggtgattctgggactcctccaatgcagtattccccctgtcctaaaagctgagctactgaagacactcgcagcttttggaaaatctcctgaaattgctgcttccctctggcagtcattggaatacactcagatactgcagaccgtgaggattccaagccaaaggcaagctattggtattgaggttgaactaaatgaaatagaatcccggtgtgaagaatacccattgactcgggccttttgccagcttattagtactctggtggagagctcatttccttctaatttgggtgctggacttgcggccccctggctttgacccttatttgcagttccttagagactctgtgtttctacgattccgtacaagagcttaccggagagcagctgaaaagtgggaagttgctgaggtggttttggaggtgttttataaattgctcagagattatgagcctcagcttgaagattttgtagaccagtttgtggaactacaaggagaagaaatcatagcctataagccacctggatttagtctgatgtatcatctgctgaatgagtcaccaatgttggagcttgctctcagtttactggaagaaggagttaagcagcttgacacctatgccccctttcctgggaaaaaacacctggagaaagcagtacagcattgccttgcacttctcaatcttactctgcaaaaggaaaatctttttatggaccttctaagagagagtcaactggctctaatagtctgtcctttagaacagcttttgcagggaattaatcccagaactaagaaggcagataatgtggtaaacattgccagatacctatatcatggcaatactaatccagaattggcttttgaaagtgccaagatcctctgttgtatctcttgcaactctaatattcagataaagttggttggagatttcacacatgaccagagtataagtcagaaactaatggctggatttgtggagtgtttggattgtgaagatgcagaagaatttgtacgtctggaagagggatcagaacttgaaaagaaattagttgcaattcgtcatgaaacaagaatccacatcttgaatcttctcattacctctctggaatgcaatccacccaatcttgctctctacctgttgggctttgaattgaaaaaacctgtcagtactacaaacctacaagatccaggagtgttaggttgccctcggacatgccttcacgccattctaaacatcttggagaaaggaacggaagggagaacaggcccagtggcggtgcgagaatctcctcagctggctgagctatgttaccaggtcatatatcagttatgtgcatgctctgatacatctggtcctactatgaggtacttgagaaccagccaggatttcttattttcccagttgcagtatctaccattttctaacaaagaatatgaaatatctatgctgaaccagatgtcatggcttatgaaaactgcctcaatagagctaagggtaacctctctgaatcgtcagcggtcacatacccagaggctcctacacctcttactggatgacatgccagtgaaaccatactcagatggtgaaggaggaatagaagatgaaaacaggtctgtttctgggttccttcactttgacactgctacaaaagtacgtcgaaaaattctaaatattcttgactcgattgacttcagtcaggagatccctgagcctttgcagttggatttttttgatcgggcccagattgaacaagttattgctaactgtgaacacaagaatttacggggacagacagtctgcaatgtcaagcttcttcatagggttcttgtagctgaagtaaatgcccttcagggtatggcagccataggacagagacctctactaatggaggaaatcagcactgtacttcagtatgtggtaggaagaaataaattgctgcagtgtcttcatgcaaaacgtcatgctctggagtcgtggaggcaactagtagaaattatactgacagcttgtccccaggacctcattcaggcagaggatcgacaactgattattcgtgatattttacaagatgtgcatgataagatactggatgatgaagctgcgcaagagttaatgcctgtggtcgccggggcagtgttcacactgactgctcacctaagccaggccgtcctcactgaacagaagcaaacatcagtcttgggaccagcagaggcccattacgcttttatgcttgatagttgcttcacctcacctcctcctgaagagaacccattagtgggttttgcttctattggagattcttcactttacatcatattgaagaaactgttagacttcattttgaagacaggtggtggattccaacgagtgaggactcacttgtatggctctctgctttattacttacagattgcccagagacctgatgaaccagacaccttagaagcagccaagaaaaccatgtgggaaaggctgacagcccctgaagatgtatttagcaaattacagcgagaaaacatagccattattgaaagttatggcgccgccctcatggaagtggtctgtcgagatgcttgtgatggtcatgagattggaaggatgctggccctggctctacttgatagaattgtctccgtggataaacagcagcagtggcttttgtatctttctaacagtggctacttgaaggtcctcgtagacagcttggtagaagatgaccgtactttgcagagcttactcaccccacagcctccccttttaaaagcactttatacttatgaatctaaaatggcatttctcacaagagtggcaaagatacagcagggtgcattagagctgctaagatcaggggtgattgtgagactagctcaatgccaagtctatgacatgcgcccagaaacggacccgcagagcatgtttggcatgagagaccctccaatgttcatccctaccccagtggatcgctaccgccagattctcctcccagctctccagctgtgccaggtcatcctcacatctagtatggcccagcacttgcaggcagcagggcaggtattgcagtttcttatttcacattctgataccatacaagcaattctgcgctgtcaggatgttagtgctgggtctttgcaggaattggctctgctgacaggaattataagtaaagcagcacttcctggaatattaagtgaacttgacgttgatgtaaatgaagggtctctaatggagctacagggacatattggaagattccagcgccagtgcttaggactactaagtcgctttggtggctctgacagactgcgtcagtttaaatttcaagacgataatgtggagggagataaagtaagcaagaaagatgagattgaactggctatgcagcagatttgtgccaatgtaatggaatattgccagtcactcatgttacagagttcccctaccttccagcatgctgtgtgtctcttcactcctagcctttcagaaacagttaatagagatggaccgcggcaagatacccaagctccagtggttccatactggcgcctgcctggtttaggcattatcatctacctgctgaaacagagtgctaatgatttcttcagctattatgacagtcatcgacagagtgtcagcaagctacaaaatgtagagcagcttcccccagatgagataaaagagttgtgtcagtctgtgatgcctgctggtgttgataaaatctccactgctcagaaatatgttctagcaagacggcgcttggtgaaggtgatcaacaatcgagctaaactgctttccctttgttcttttatcatagagacctgcctatttattctttggcgccatctggagtactacttgttacattgcatgcccacggattctcaagattccttatttgcctcgagaaccttgtttaaaagcagaagactgcaagattccttcgcctcagaaaccaatctagattttagaagtgggctggctatagtgagccaacatgatttagaccagcttcaggctgatgcaatcaacgcttttggagaatcactacaaaagaaacttctggacattgaaggattatattcaaaagttcgatctcgatatagtttcatacaggctcttgtcagacgtatccgtggcctctaaactagaggccacggacaaatacaaagattgcttagtgggattaagattccaccattcccagactgttaagacattttcacaaaacagaccagcagcagctaggacatttcaacagattcggtgctattctgcacctgttgctgctgagccctttctcagtgggactagttcgaactatgtggaggagatgtactgtgcttggctggaaaaccccaaaagtgtacataagtcatgggacattttttttcgcaacacgaatgccggagccccaccgggcactgcctaccagagtccccttcccctgagccgaggctccctggctgctgtggcccatgcacagtccctggtagaagcacagcccaacgtggacaagctcgtggaggaccacctggcagtgcagtcgctcatcagggcatatcagatacgagggcaccatgtagcacagctggaccccctggggattttggatgctgatctggactcctccgtgcccgctgacattatctcatccacagacaaacttgggttctatggcctggatgagtctgacctcgacaaggtcttccacttgcccaccaccactttcatcgggggacaggaatcagcacttcctctgcgggagatcatccgtcggctggagatggcctactgccagcatattggggtggagttcatgttcatcaatgacctggagcagtgccagtggatccggcagaagtttgagacccctgggatcatgcagttcacaaatgaggagaaacggaccctgctggccaggcttgtgcggtccaccaggtttgaggagttcctacagcggaagtggtcctctgagaagcgctttggtctagaaggctgcgaggtactgatccctgccctcaagaccatcattgacaagtctagtgagaatggcgtggactacgtgatcatgggcatgccacacagagggcggctgaacgtgcttgcaaatgtcatcaggaaggagctggaacagatcttctgtcaattcgattcaaagctggaggcagctgatgagggctccggagatgtgaagtaccacctgggcatgtatcaccgcaggatcaatcgtgtcaccgacaggaacattaccttgtccttggtggccaacccttcccaccttgaggccgctgaccccgtggtgatgggcaagaccaaagccgaacagttttactgtggcgacactgaagggaaaaaggtcatgtccatcctgttgcatggggatgctgcatttgctggccagggcattgtgtacgagaccttccacctcagcgacctgccatcctacacaactcatggcaccgtgcacgtggtcgtcaacaaccagatcggcttcaccaccgaccctcggatggcccgctcctccccctaccccactgacgtggcccgagtggtgaatgcccccattttccacgtgaactcagatgaccccgaggctgtcatgtacgtgtgcaaagtggcggccgagtggaggagcaccttccacaaggacgtggttgtcgatttggtgtgttaccggcgcaacggccacaacgagatggatgagcccatgttcacgcagccgctcatgtacaagcagatccgcaagcagaagcctgtgttacagaagtacgctgagctgctggtgtcgcagggtgtggtcaaccagcctgagtatgaggaggaaatttccaagtatgataagatctgtgaggaagcttttgccagatctaaagatgagaagatcttgcacattaagcactggctggactctccctggcctggcttcttcaccctggacgggcagcccaggagcatgtcctgcccctccacgggtctgacggaggatattctgacacacatcgggaatgtggctagttctgtgcctgtggaaaactttactattcatggagggctgagccggatcttgaagactcgtggggaaatggtgaagaaccggactgtggactgggctctagcggagtacatggcgtttggctcgctcctgaaggagggcatccacattcggctgagcggccaggacgtggagcggggcacattcagccaccgccaccatgtgctccatgaccagaatgtggacaagagaacctgcatccccatgaaccatctctggcccaatcaggccccctatactgtgtgcaacagctcactgtctgagtacggcgtgctgggctttgagctgggcttcgccatggccagtcctaatgccctggtcctctgggaagcccaatttggtgacttccacaacacggcccagtgtatcatcgaccagttcatctgcccgggacaagccaagtgggtgcggcagaatggcatcgtgttgctgctgccccatggcatggagggcatgggtccagaacattcctccgcccgcccagagcggttcttgcagatgtgcaacgatgacccagatgtcctgccagaccttaaagaagccaacttcgacatcaatcagctatatgactgcaattgggttgttgtcaactgctccactcctggcaacttcttccacgtgctacgacgccagatcctgctgccattccggaagccgttaattatcttcacccccaaatccctgttgcgccaccccgaggccagatccagctttgatgagatgcttccaggaacccacttccagcgggtgatcccagaagatggccctgcagctcagaacccagaaaatgtcaaaaggcttctcttctgcaccggcaaagtgtattatgacctcacccgggagcgcaaagcacgcgacatggtggggcaggtggccatcacaaggattgagcagctgtcgccattcccctttgacctcctgctgaaggaggtgcagaagtaccccaatgctgagctggcctggtgccaggaggagcacaagaaccaaggctactatgactacgtgaagccaagacttcggaccaccatcagccgcgccaagcccgtctgtatgcnggcggaccagggtgtnncncacggaaagaaacnctgangagtgangntctggaaggcttcgacggacgttcagactttcgtaatgtgctagggtgtgggcctgcctcaacagtgatgcctgtt

SEQ ID NO: 453290 - DNA, 1595 bp, Homo sapiens
caagaaaaaaaggtatctcaggtttgcctcctgagtagctgggcccagctactcaggaggccagatccagctttgatgagatgcttccaggaacccacttccagcgggtgatcccagaagatggccctgcagctcagaacccagaaaatgtcaaaaggcttctcttctgcaccggcaaagtgtattatgacctcacccgggagcgcaaagcacgcgacatggtggggcaggtggccatcacaaggattgagcagctgtcgccattcccctttgacctcctgctgaaggaggtgcagaagtaccccaatgctgagctggcctggtgccaggaggagcacaagaaccaaggctactatgactacgtgaagccaagacttcggaccaccatcagccgcgccaagcccgtctggtatgccggccgggacccagcggctgctccagccaccggcaacaagaagacccacctgacggagctgcagcgcctcctggacacggccttcgacctggacgtcttcaagaacttctcgtagatgctgcctagggttgcttgggccactgccctctccacacccatgactgccccttgcttctcaactaaagaatagtgcctcagcgctgcccacaccaccgccctcctcgctgtgccaccacccctccctctgctctcataggagttaggctgtcgtccccctccagtgcttggctgccccacaggccacacgctgcccaggctctgctgacttctgagcagttttccaggaggccggggggagcaggaggaggaaaggtagcccccgagggatgtccttggggaggggtcagctctggccacaatcctccccaccagtctcacccactaggataggaactgggccttgtgtgctggcttccgctgtcacccagcaaggcacaggctcctgtatttgagactaggatagcttcatcttgagcctgagccttagaatctgtagaggagcctggagtcggatctagccatggctggcagaggtttctagggtgggccccagccgtggcgtgaactgaggatgacccggggcagctggcaggagagagccttggcctgacctggcacagaaagggcagcttcagtctctgcagtgtccattatctgctgttccttcgagggttccaggctgtgtgtggggcccaagcatgccccacccacccctcctgggcccaggcagcacctggagcccacagagtctgtgtgtagccaggaagccccgctcaggtagccaccgccggggcactggctgctctgtcttggtcctgttaaccctccacctcctctcttggactccctccccaccccaaccactctttctttctcctttaacccaatggagactttctgatgcatcgttttctttgctgtgccaaagcaggtcagaagagggagaggaggggctgggggtgaggggccaggccatggccaaggggccagctgcccctcatttatcactctgaccttcacagggacagatctgatttatttattttggttaaaaaaaaaaaaggaacagaaacaactttgcattgcattggcttgacccataaactaagttatatccgtg

SEQ ID NO: 453291 - DNA, 6832 bp, Homo sapiens
  misc_feature (1880)..(1880): n is a, c, g, or t
cagaagggctctgttagtgcgcctctaagatggcgacgcctttggcggtaaattcggctgctagtctatggggtccttacaaagacatttggcataaagtgggaaatgctctttggagaagacaacctgaagctgttcaccttcttgataagattttgaagaaacacaaacctgacttcatctcattgttcaaaaatccgccaaaaaatgttcaacagcatgagaaggttcagaaagccagtacagagggagtcgccattcagggtcaacagggaactcgacttcttcctgaacagctcattaaagaagcctttattctcagtgacctttttgatattggagaattggcagctgttgagcttcttcttgctggagagcatcaacagccacattttcctggccttaccagaggattagtagctgttcttctgtactgggatggaaagcgatgcattgcgaattccttgaaagccttgatacagtctagacggggaaagacatggaccctagaactcagtccagagctggcttccatgacaacacgctttacagatgagctgatggagcaaggattgacttataaagttcttacgctggtgtcacagattgatgtgaataatgagtttgagaaactacagcgagagagaggtttgggcagtgaaaaacatcgcaaagaggtttctgatctcattaaggagtgcaggcagtctcttgcagaaagcctttttgcctgggcttgccagtcacctttaggcaaagaagacactctcctcctcattggacatttggaaagagtgacagttgaggctaatggctcactggatgcagtgaatctggctcttcttatggcgcttctatactgttttgatatcagttttatagagcaaagcacagaggaacgagatgatatgattcatcaacttccactgttgacagaaaaacagtacattgcaacaattcactctcgtcttcaggactcacagctttggaaactgcctgggctccaagccactgttagacttgcctgggcgctggcattgaggggaatatcccagctacctgatgtgacagctctggcagaattcacagaggcagatgaagcaatggcagaactcgcaattgctgacaacgttttcctgttcctcatggaatctgtagtggtatcagaatacttttatcaggaagaattttatattcgcagagtccataatctcatcacagatttccttgcacttatgccaatgaaggtgaaacagctgaggaatcgggcagatgaagatgctcgaatgattcacatgagtatgcagatgggtaatgaaccccccatttcacttagaagggacctggaacacttaatgcttttgattggcgagctatataaaaagaacccttttcatctggagcttgctctagaatattggtgtcccacagagcctcttcagactccgactatcatgggctcttatctaggggtggctcatcagcggccccctcaacgccaggttgtcttgtcaaagtttgttaggcaaatgggtgacctgttgcctccaactatttatattccttatttgaagatgctccagggattggccaatgggcctcagtgtgcccactactgtttcagcctgctcaaagtcaatggtagtagtcatgttgaaaatattcagggagcaggtggcagtcctgtttcctgggaacatttctttcactccttgatgctttaccacgaacaccttcggaaggatcttccaagtgcagatagtgtccagtaccgtcaccttccttcccgtggcatcacccagaaggagcaagatggattgattgcttttttgcagctcacgtctaccatcattacttggagtgaaaatgctcgcttggcnctctgtgaacaccctcagtggacccctgttgtggtgattctgggactcctccaatgcagtattccccctgtcctaaaagctgagctactgaagacactcgcagcttttggaaaatctcctgaaattgctgcttccctctggcagtcattggaatacactcagatactgcagaccgtgaggattccaagccaaaggcaagctattggtattgaggttgaactaaatgaaatagaatcccggtgtgaagaatacccattgactcgggccttttgccagcttattagtactctggtggagagctcatttccttctaatttgggtgctggacttgcggccccctggctttgacccttatttgcagttccttagagactctgtgtttctacgattccgtacaagagcttaccggagagcagctgaaaagtgggaagttgctgaggtggttttggaggtgttttataaattgctcagagattatgagcctcagcttgaagattttgtagaccagtttgtggaactacaaggagaagaaatcatagcctataagccacctggatttagtctgatgtatcatctgctgaatgagtcaccaatgttggagcttgctctcagtttactggaagaaggagttaagcagcttgacacctatgccccctttcctgggaaaaaacacctggagaaagcagtacagcattgccttgcacttctcaatcttactctgcaaaaggaaaatctttttatggaccttctaagagagagtcaactggctctaatagtctgtcctttagaacagcttttgcagggaattaatcccagaactaagaaggcagataatgtggtaaacattgccagatacctatatcatggcaatactaatccagaattggcttttgaaagtgccaagatcctctgttgtatctcttgcaactctaatattcagataaagttggttggagatttcacacatgaccagagtataagtcagaaactaatggctggatttgtggagtgtttggattgtgaagatgcagaagaatttgtacgtctggaagagggatcagaacttgaaaagaaattagttgcaattcgtcatgaaacaagaatccacatcttgaatcttctcattacctctctggaatgcaatccacccaatcttgctctctacctgttgggctttgaattgaaaaaacctgtcagtactacaaacctacaagatccaggagtgttaggttgccctcggacatgccttcacgccattctaaacatcttggagaaaggaacggaagggagaacaggcccagtggcggtgcgagaatctcctcagctggctgagctatgttaccaggtcatatatcagttatgtgcatgctctgatacatctggtcctactatgaggtacttgagaaccagccaggatttcttattttcccagttgcagtatctaccattttctaacaaagaatatgaaatatctatgctgaaccagatgtcatggcttatgaaaactgcctcaatagagctaagggtaacctctctgaatcgtcagcggtcacatacccagaggctcctacacctcttactggatgacatgccagtgaaaccatactcagatggtgaaggaggaatagaagatgaaaacaggtctgtttctgggttccttcactttgacactgctacaaaagtacgtcgaaaaattctaaatattcttgactcgattgacttcagtcaggagatccctgagcctttgcagttggatttttttgatcgggcccagattgaacaagttattgctaactgtgaacacaagaatttacggggacagacagtctgcaatgtcaagcttcttcatagggttcttgtagctgaagtaaatgcccttcagggtatggcagccataggacagagacctctactaatggaggaaatcagcactgtacttcagtatgtggtaggaagaaataaattgctgcagtgtcttcatgcaaaacgtcatgctctggagtcgtggaggcaactagtagaaattatactgacagcttgtccccaggacctcattcaggcagaggatcgacaactgattattcgtgatattttacaagatgtgcatgataagatactggatgatgaagctgcgcaagagttaatgcctgtggtcgccggggcagtgttcacactgactgctcacctaagccaggccgtcctcactgaacagaagcaaacatcagtcttgggaccagcagaggcccattacgcttttatgcttgatagttgcttcacctcacctcctcctgaagagaacccattagtgggttttgcttctattggagattcttcactttacatcatattgaagaaactgttagacttcattttgaagacaggtggtggattccaacgagtgaggactcacttgtatggctctctgctttattacttacagattgcccagagacctgatgaaccagacaccttagaagcagccaagaaaaccatgtgggaaaggctgacagcccctgaagatgtatttagcaaattacagcgagaaaacatagccattattgaaagttatggcgccgccctcatggaagtggtctgtcgagatgcttgtgatggtcatgagattggaaggatgctggccctggctctacttgatagaattgtctccgtggataaacagcagcagtggcttttgtatctttctaacagtggctacttgaaggtcctcgtagacagcttggtagaagatgaccgtactttgcagagcttactcaccccacagcctccccttttaaaagcactttatacttatgaatctaaaatggcatttctcacaagagtggcaaagatacagcagggtgcattagagctgctaagatcaggggtgattgtgagactagctcaatgccaagtctatgacatgcgcccagaaacggacccgcagagcatgtttggcatgagagaccctccaatgttcatccctaccccagtggatcgctaccgccagattctcctcccagctctccagctgtgccaggtcatcctcacatctagtatggcccagcacttgcaggcagcagggcaggtattgcagtttcttatttcacattctgataccatacaagcaattctgcgctgtcaggatgttagtgctgggtctttgcaggaattggctctgctgacaggaattataagtaaagcagcacttcctggaatattaagtgaacttgacgttgatgtaaatgaagggtctctaatggagctacagggacatattggaagattccagcgccagtgcttaggactactaagtcgctttggtggctctgacagactgcgtcagtttaaatttcaagacgataatgtggagggagataaagtaagcaagaaagatgagattgaactggctatgcagcagatttgtgccaatgtaatggaatattgccagtcactcatgttacagagttcccctaccttccagcatgctgtgtgtctcttcactcctagcctttcagaaacagttaatagagatggaccgcggcaagatacccaagctccagtggttccatactggcgcctgcctggtttaggcattatcatctacctgctgaaacagagtgctaatgatttcttcagctattatgacagtcatcgacagagtgtcagcaagctacaaaatgtagagcagcttcccccagatgagataaaagagttgtgtcagtctgtgatgcctgctggtgttgataaaatctccactgctcagaaatatgttctagcaagacggcgcttggtgaaggtgatcaacaatcgagctaaactgctttccctttgttcttttatcatagagacctgcctatttattctttggcgccatctggagtactacttgttacattgcatgcccacggattctcaagattccttatttgcctcgagaaccttgtttaaaagcagaagactgcaaggtaaactttctgctaaaaattaatgaaccataaatacctatttgtgccttgaaaagctagtaccagtttttttttatttttgtttccagattacttagagtgaattgggtgaatcaagagctgtttagtcactagacgtagctatttcttgcattttactttctgttcacgggacattgtgctgagcataagaatattctagagcctgctcatcagctgttccttagcttcttgctgcagttagggggctgatccagctctagaagaatggaggaggtctgctattatgctgattcttattgctggagtgggcctctgtgactgatggccatatattggatcccttaggtggaaggaaatagagaaaagctgagaaccctggtctggaccagtgaaatgctttctaggggcttccatttgctaaaagttgaaaattgagttcccaatcttgagccgtgtttttcatggtgctattgttattattcattgtcatcaggttcctccactgtgtggtagataggtacttgcacagccggtatgactctgtttttttatctctagattccttcgcctcagaaaccaatctagattttagaagtgggctggctatagtgagccaacatgatttagaccagcttcaggctgatgcaatcaacgcttttggagaatcactacaaaagaaacttctggacattgaaggattatattcaaaagttcgatctcgatatagtttcatacaggctcttgtcagacgtatccgtggcctcttgaggatatcaaggaactgagagcccgtgcttatgctcttctatgagagagatgaattggggagaattgtctccattttatagattagtttctttctaaattatgaccaaaaatattttgctatttctttctttgtatatggacatcttttctgtaaacttcttcccctagttccatcctcactagtaaaaaataaatactttttaaaaaaacaaaaaaaat

SEQ ID NO: 453292 - DNA, 6955 bp, Homo sapiens
  misc_feature (1880)..(1880): n is a, c, g, or t
cagaagggctctgttagtgcgcctctaagatggcgacgcctttggcggtaaattcggctgctagtctatggggtccttacaaagacatttggcataaagtgggaaatgctctttggagaagacaacctgaagctgttcaccttcttgataagattttgaagaaacacaaacctgacttcatctcattgttcaaaaatccgccaaaaaatgttcaacagcatgagaaggttcagaaagccagtacagagggagtcgccattcagggtcaacagggaactcgacttcttcctgaacagctcattaaagaagcctttattctcagtgacctttttgatattggagaattggcagctgttgagcttcttcttgctggagagcatcaacagccacattttcctggccttaccagaggattagtagctgttcttctgtactgggatggaaagcgatgcattgcgaattccttgaaagccttgatacagtctagacggggaaagacatggaccctagaactcagtccagagctggcttccatgacaacacgctttacagatgagctgatggagcaaggattgacttataaagttcttacgctggtgtcacagattgatgtgaataatgagtttgagaaactacagcgagagagaggtttgggcagtgaaaaacatcgcaaagaggtttctgatctcattaaggagtgcaggcagtctcttgcagaaagcctttttgcctgggcttgccagtcacctttaggcaaagaagacactctcctcctcattggacatttggaaagagtgacagttgaggctaatggctcactggatgcagtgaatctggctcttcttatggcgcttctatactgttttgatatcagttttatagagcaaagcacagaggaacgagatgatatgattcatcaacttccactgttgacagaaaaacagtacattgcaacaattcactctcgtcttcaggactcacagctttggaaactgcctgggctccaagccactgttagacttgcctgggcgctggcattgaggggaatatcccagctacctgatgtgacagctctggcagaattcacagaggcagatgaagcaatggcagaactcgcaattgctgacaacgttttcctgttcctcatggaatctgtagtggtatcagaatacttttatcaggaagaattttatattcgcagagtccataatctcatcacagatttccttgcacttatgccaatgaaggtgaaacagctgaggaatcgggcagatgaagatgctcgaatgattcacatgagtatgcagatgggtaatgaaccccccatttcacttagaagggacctggaacacttaatgcttttgattggcgagctatataaaaagaacccttttcatctggagcttgctctagaatattggtgtcccacagagcctcttcagactccgactatcatgggctcttatctaggggtggctcatcagcggccccctcaacgccaggttgtcttgtcaaagtttgttaggcaaatgggtgacctgttgcctccaactatttatattccttatttgaagatgctccagggattggccaatgggcctcagtgtgcccactactgtttcagcctgctcaaagtcaatggtagtagtcatgttgaaaatattcagggagcaggtggcagtcctgtttcctgggaacatttctttcactccttgatgctttaccacgaacaccttcggaaggatcttccaagtgcagatagtgtccagtaccgtcaccttccttcccgtggcatcacccagaaggagcaagatggattgattgcttttttgcagctcacgtctaccatcattacttggagtgaaaatgctcgcttggcnctctgtgaacaccctcagtggacccctgttgtggtgattctgggactcctccaatgcagtattccccctgtcctaaaagctgagctactgaagacactcgcagcttttggaaaatctcctgaaattgctgcttccctctggcagtcattggaatacactcagatactgcagaccgtgaggattccaagccaaaggcaagctattggtattgaggttgaactaaatgaaatagaatcccggtgtgaagaatacccattgactcgggccttttgccagcttattagtactctggtggagagctcatttccttctaatttgggtgctggacttgcggccccctggctttgacccttatttgcagttccttagagactctgtgtttctacgattccgtacaagagcttaccggagagcagctgaaaagtgggaagttgctgaggtggttttggaggtgttttataaattgctcagagattatgagcctcagcttgaagattttgtagaccagtttgtggaactacaaggagaagaaatcatagcctataagccacctggatttagtctgatgtatcatctgctgaatgagtcaccaatgttggagcttgctctcagtttactggaagaaggagttaagcagcttgacacctatgccccctttcctgggaaaaaacacctggagaaagcagtacagcattgccttgcacttctcaatcttactctgcaaaaggaaaatctttttatggaccttctaagagagagtcaactggctctaatagtctgtcctttagaacagcttttgcagggaattaatcccagaactaagaaggcagataatgtggtaaacattgccagatacctatatcatggcaatactaatccagaattggcttttgaaagtgccaagatcctctgttgtatctcttgcaactctaatattcagataaagttggttggagatttcacacatgaccagagtataagtcagaaactaatggctggatttgtggagtgtttggattgtgaagatgcagaagaatttgtacgtctggaagagggatcagaacttgaaaagaaattagttgcaattcgtcatgaaacaagaatccacatcttgaatcttctcattacctctctggaatgcaatccacccaatcttgctctctacctgttgggctttgaattgaaaaaacctgtcagtactacaaacctacaagatccaggagtgttaggttgccctcggacatgccttcacgccattctaaacatcttggagaaaggaacggaagggagaacaggcccagtggcggtgcgagaatctcctcagctggctgagctatgttaccaggtcatatatcagttatgtgcatgctctgatacatctggtcctactatgaggtacttgagaaccagccaggatttcttattttcccagttgcagtatctaccattttctaacaaagaatatgaaatatctatgctgaaccagatgtcatggcttatgaaaactgcctcaatagagctaagggtaacctctctgaatcgtcagcggtcacatacccagaggctcctacacctcttactggatgacatgccagtgaaaccatactcagatggtgaaggaggaatagaagatgaaaacaggtctgtttctgggttccttcactttgacactgctacaaaagtacgtcgaaaaattctaaatattcttgactcgattgacttcagtcaggagatccctgagcctttgcagttggatttttttgatcgggcccagattgaacaagttattgctaactgtgaacacaagaatttacggggacagacagtctgcaatgtcaagcttcttcatagggttcttgtagctgaagtaaatgcccttcagggtatggcagccataggacagagacctctactaatggaggaaatcagcactgtacttcagtatgtggtaggaagaaataaattgctgcagtgtcttcatgcaaaacgtcatgctctggagtcgtggaggcaactagtagaaattatactgacagcttgtccccaggacctcattcaggcagaggatcgacaactgattattcgtgatattttacaagatgtgcatgataagatactggatgatgaagctgcgcaagagttaatgcctgtggtcgccggggcagtgttcacactgactgctcacctaagccaggccgtcctcactgaacagaagcaaacatcagtcttgggaccagcagaggcccattacgcttttatgcttgatagttgcttcacctcacctcctcctgaagagaacccattagtgggttttgcttctattggagattcttcactttacatcatattgaagaaactgttagacttcattttgaagacaggtggtggattccaacgagtgaggactcacttgtatggctctctgctttattacttacagattgcccagagacctgatgaaccagacaccttagaagcagccaagaaaaccatgtgggaaaggctgacagcccctgaagatgtatttagcaaattacagcgagaaaacatagccattattgaaagttatggcgccgccctcatggaagtggtctgtcgagatgcttgtgatggtcatgagattggaaggatgctggccctggctctacttgatagaattgtctccgtggataaacagcagcagtggcttttgtatctttctaacagtggctacttgaaggtcctcgtagacagcttggtagaagatgaccgtactttgcagagcttactcaccccacagcctccccttttaaaagcactttatacttatgaatctaaaatggcatttctcacaagagtggcaaagatacagcagggtgcattagagctgctaagatcaggggtgattgtgagactagctcaatgccaagtctatgacatgcgcccagaaacggacccgcagagcatgtttggcatgagagaccctccaatgttcatccctaccccagtggatcgctaccgccagattctcctcccagctctccagctgtgccaggtcatcctcacatctagtatggcccagcacttgcaggcagcagggcaggtattgcagtttcttatttcacattctgataccatacaagcaattctgcgctgtcaggatgttagtgctgggtctttgcaggaattggctctgctgacaggaattataagtaaagcagcacttcctggaatattaagtgaacttgacgttgatgtaaatgaagggtctctaatggagctacagggacatattggaagattccagcgccagtgcttaggactactaagtcgctttggtggctctgacagactgcgtcagtttaaatttcaagacgataatgtggagggagataaagtaagcaagaaagatgagattgaactggctatgcagcagatttgtgccaatgtaatggaatattgccagtcactcatgttacagagttcccctaccttccagcatgctgtgtgtctcttcactcctagcctttcagaaacagttaatagagatggaccgcggcaagatacccaagctccagtggttccatactggcgcctgcctggtttaggcattatcatctacctgctgaaacagagtgctaatgatttcttcagctattatgacagtcatcgacagagtgtcagcaagctacaaaatgtagagcagcttcccccagatgagataaaagagttgtgtcagtctgtgatgcctgctggtgttgataaaatctccactgctcagaaatatgttctagcaagacggcgcttggtgaaggtgatcaacaatcgagctaaactgctttccctttgttcttttatcatagagacctgcctatttattctttggcgccatctggagtactacttgttacattgcatgcccacggattctcaagattccttatttgcctcgagaaccttgtttaaaagcagaagactgcaagattccttcgcctcagaaaccaatctagattttagaagtgggctggctatagtgagccaacatgatttagaccagcttcaggctgatgcaatcaacgcttttggagaatcactacaaaagaaacttctggacattgaaggattatattcaaaagttcgatctcgatatagtttcatacaggctcttgtcagacgtatccgtggcctctaaactagaggccacggacaaatacaaagattgcttagtgggattaagattccaccattcccagactgttaagacattttcacaaaacagaccagcagcagctaggacatttcaacagattcggtgctattctgcacctgttgctgctgagccctttctcagtgggactagttcgaactatgtggaggagatgtactgtgcttggctggaaaaccccaaaagtgtacataagtcatgggacattttttttcgcaacacgaatgccggagccccaccgggcactgcctaccagagtccccttcccctgagccgaggctccctggctgctgtggcccatgcacagtccctggtagaagcacagcccaacgtggacaagctcgtggaggaccacctggcagtgcagtcgctcatcagggcatatcaggtaaggcgggtgctttacccgcacacgggaaagggtgcagtgttccttaggtcatgcctcatgggccctattggcctttctgagtgtatgttgtcactttacttatacctcctcaaatactaggtgctttctccctgctttgggaggctaaaaaacaaatacacaagaaaaagaaccaggctagccctatttgagcaaatctcccagcaccactaatgcctgccttataaaagggatccttatttcctttccttccttggcaagaaatatttgtgggcagggaaaacaagtcagtacccgggcatcaaggagaagtgctgcccatctgccagtgagcagtgactgggaggggtggtgcttttgggtggttgatgcccccttctcagttgctaacaactgaatactataagagaagaaaaccatactatagagtttggggatgtggaggcagggagaggcagctgagggtacagctgagcctac

SEQ ID NO: 453293 - DNA, 6795 bp, Homo sapiens
  misc_feature (1880)..(1880): n is a, c, g, or t
cagaagggctctgttagtgcgcctctaagatggcgacgcctttggcggtaaattcggctgctagtctatggggtccttacaaagacatttggcataaagtgggaaatgctctttggagaagacaacctgaagctgttcaccttcttgataagattttgaagaaacacaaacctgacttcatctcattgttcaaaaatccgccaaaaaatgttcaacagcatgagaaggttcagaaagccagtacagagggagtcgccattcagggtcaacagggaactcgacttcttcctgaacagctcattaaagaagcctttattctcagtgacctttttgatattggagaattggcagctgttgagcttcttcttgctggagagcatcaacagccacattttcctggccttaccagaggattagtagctgttcttctgtactgggatggaaagcgatgcattgcgaattccttgaaagccttgatacagtctagacggggaaagacatggaccctagaactcagtccagagctggcttccatgacaacacgctttacagatgagctgatggagcaaggattgacttataaagttcttacgctggtgtcacagattgatgtgaataatgagtttgagaaactacagcgagagagaggtttgggcagtgaaaaacatcgcaaagaggtttctgatctcattaaggagtgcaggcagtctcttgcagaaagcctttttgcctgggcttgccagtcacctttaggcaaagaagacactctcctcctcattggacatttggaaagagtgacagttgaggctaatggctcactggatgcagtgaatctggctcttcttatggcgcttctatactgttttgatatcagttttatagagcaaagcacagaggaacgagatgatatgattcatcaacttccactgttgacagaaaaacagtacattgcaacaattcactctcgtcttcaggactcacagctttggaaactgcctgggctccaagccactgttagacttgcctgggcgctggcattgaggggaatatcccagctacctgatgtgacagctctggcagaattcacagaggcagatgaagcaatggcagaactcgcaattgctgacaacgttttcctgttcctcatggaatctgtagtggtatcagaatacttttatcaggaagaattttatattcgcagagtccataatctcatcacagatttccttgcacttatgccaatgaaggtgaaacagctgaggaatcgggcagatgaagatgctcgaatgattcacatgagtatgcagatgggtaatgaaccccccatttcacttagaagggacctggaacacttaatgcttttgattggcgagctatataaaaagaacccttttcatctggagcttgctctagaatattggtgtcccacagagcctcttcagactccgactatcatgggctcttatctaggggtggctcatcagcggccccctcaacgccaggttgtcttgtcaaagtttgttaggcaaatgggtgacctgttgcctccaactatttatattccttatttgaagatgctccagggattggccaatgggcctcagtgtgcccactactgtttcagcctgctcaaagtcaatggtagtagtcatgttgaaaatattcagggagcaggtggcagtcctgtttcctgggaacatttctttcactccttgatgctttaccacgaacaccttcggaaggatcttccaagtgcagatagtgtccagtaccgtcaccttccttcccgtggcatcacccagaaggagcaagatggattgattgcttttttgcagctcacgtctaccatcattacttggagtgaaaatgctcgcttggcnctctgtgaacaccctcagtggacccctgttgtggtgattctgggactcctccaatgcagtattccccctgtcctaaaagctgagctactgaagacactcgcagcttttggaaaatctcctgaaattgctgcttccctctggcagtcattggaatacactcagatactgcagaccgtgaggattccaagccaaaggcaagctattggtattgaggttgaactaaatgaaatagaatcccggtgtgaagaatacccattgactcgggccttttgccagcttattagtactctggtggagagctcatttccttctaatttgggtgctggacttgcggccccctggctttgacccttatttgcagttccttagagactctgtgtttctacgattccgtacaagagcttaccggagagcagctgaaaagtgggaagttgctgaggtggttttggaggtgttttataaattgctcagagattatgagcctcagcttgaagattttgtagaccagtttgtggaactacaaggagaagaaatcatagcctataagccacctggatttagtctgatgtatcatctgctgaatgagtcaccaatgttggagcttgctctcagtttactggaagaaggagttaagcagcttgacacctatgccccctttcctgggaaaaaacacctggagaaagcagtacagcattgccttgcacttctcaatcttactctgcaaaaggaaaatctttttatggaccttctaagagagagtcaactggctctaatagtctgtcctttagaacagcttttgcagggaattaatcccagaactaagaaggcagataatgtggtaaacattgccagatacctatatcatggcaatactaatccagaattggcttttgaaagtgccaagatcctctgttgtatctcttgcaactctaatattcagataaagttggttggagatttcacacatgaccagagtataagtcagaaactaatggctggatttgtggagtgtttggattgtgaagatgcagaagaatttgtacgtctggaagagggatcagaacttgaaaagaaattagttgcaattcgtcatgaaacaagaatccacatcttgaatcttctcattacctctctggaatgcaatccacccaatcttgctctctacctgttgggctttgaattgaaaaaacctgtcagtactacaaacctacaagatccaggagtgttaggttgccctcggacatgccttcacgccattctaaacatcttggagaaaggaacggaagggagaacaggcccagtggcggtgcgagaatctcctcagctggctgagctatgttaccaggtcatatatcagttatgtgcatgctctgatacatctggtcctactatgaggtacttgagaaccagccaggatttcttattttcccagttgcagtatctaccattttctaacaaagaatatgaaatatctatgctgaaccagatgtcatggcttatgaaaactgcctcaatagagctaagggtaacctctctgaatcgtcagcggtcacatacccagaggctcctacacctcttactggatgacatgccagtgaaaccatactcagatggtgaaggaggaatagaagatgaaaacaggtctgtttctgggttccttcactttgacactgctacaaaagtacgtcgaaaaattctaaatattcttgactcgattgacttcagtcaggagatccctgagcctttgcagttggatttttttgatcgggcccagattgaacaagttattgctaactgtgaacacaagaatttacggggacagacagtctgcaatgtcaagcttcttcatagggttcttgtagctgaagtaaatgcccttcagggtatggcagccataggacagagacctctactaatggaggaaatcagcactgtacttcagtatgtggtaggaagaaataaattgctgcagtgtcttcatgcaaaacgtcatgctctggagtcgtggaggcaactagtagaaattatactgacagcttgtccccaggacctcattcaggcagaggatcgacaactgattattcgtgatattttacaagatgtgcatgataagatactggatgatgaagctgcgcaagagttaatgcctgtggtcgccggggcagtgttcacactgactgctcacctaagccaggccgtcctcactgaacagaagcaaacatcagtcttgggaccagcagaggcccattacgcttttatgcttgatagttgcttcacctcacctcctcctgaagagaacccattagtgggttttgcttctattggagattcttcactttacatcatattgaagaaactgttagacttcattttgaagacaggtggtggattccaacgagtgaggactcacttgtatggctctctgctttattacttacagattgcccagagacctgatgaaccagacaccttagaagcagccaagaaaaccatgtgggaaaggctgacagcccctgaagatgtatttagcaaattacagcgagaaaacatagccattattgaaagttatggcgccgccctcatggaagtggtctgtcgagatgcttgtgatggtcatgagattggaaggatgctggccctggctctacttgatagaattgtctccgtggataaacagcagcagtggcttttgtatctttctaacagtggctacttgaaggtcctcgtagacagcttggtagaagatgaccgtactttgcagagcttactcaccccacagcctccccttttaaaagcactttatacttatgaatctaaaatggcatttctcacaagagtggcaaagatacagcagggtgcattagagctgctaagatcaggggtgattgtgagactagctcaatgccaagtctatgacatgcgcccagaaacggacccgcagagcatgtttggcatgagagaccctccaatgttcatccctaccccagtggatcgctaccgccagattctcctcccagctctccagctgtgccaggtcatcctcacatctagtatggcccagcacttgcaggcagcagggcaggtattgcagtttcttatttcacattctgataccatacaagcaattctgcgctgtcaggatgttagtgctgggtctttgcaggaattggctctgctgacaggaattataagtaaagcagcacttcctggaatattaagtgaacttgacgttgatgtaaatgaagggtctctaatggagctacagggacatattggaagattccagcgccagtgcttaggactactaagtcgctttggtggctctgacagactgcgtcagtttaaatttcaagacgataatgtggagggagataaagtaagcaagaaagatgagattgaactggctatgcagcagatttgtgccaatgtaatggaatattgccagtcactcatgttacagagttcccctaccttccagcatgctgtgtgtctcttcactcctagcctttcagaaacagttaatagagatggaccgcggcaagatacccaagctccagtggttccatactggcgcctgcctggtttaggcattatcatctacctgctgaaacagagtgctaatgatttcttcagctattatgacagtcatcgacagagtgtcagcaagctacaaaatgtagagcagcttcccccagatgagataaaagagttgtgtcagtctgtgatgcctgctggtgttgataaaatctccactgctcagaaatatgttctagcaagacggcgcttggtgaaggtgatcaacaatcgagctaaactgctttccctttgttcttttatcatagagacctgcctatttattctttggcgccatctggagtactacttgttacattgcatgcccacggattctcaagattccttatttgcctcgagaaccttgtttaaaagcagaagactgcaagattccttcgcctcagaaaccaatctagattttagaagtgggctggctatagtgagccaacatgatttagaccagcttcaggctgatgcaatcaacgcttttggagaatcactacaaaagaaacttctggacattgaaggattatattcaaaagttcgatctcgatatagtttcatacaggctcttgtcagacgtatccgtggcctctaaactagaggccacggacaaatacaaagattgcttagtgggattaagattccaccattcccagactgttaagacattttcacaaaacagaccagcagcagctaggacatttcaacagattcggtgctattctgcacctgttgctgctgagccctttctcagtgggactagttcgaactatgtggaggagatgtactgtgcttggctggaaaaccccaaaagtgtacataagaaggtaaggctcgcagggctgtgggtctgcctcatgttggtgtgttggcctgttcctgactggtcaccaggtaagtgtgtgcgtcctgaggagtcagcgggcagacaggcagctggagcgccataccaaccaccgtatctgtatcggacccagcatagccccagcagaagccatggtccctggattggcgtccagcagtagacactgtgcttaactctgcgaggatgtgaagaagcatgtgtgtgaccctccagcatctccgcaagggctgcttcaggatgaagccgctgaagaaagaagaaagaaagaaagtgtgtggaaaagagcaggacctcaggaagctcctccattctaactgtctggagaggatactttcatttgtaacatgccgtagtcacctcatgtaatttctgtatgaatggccttttagctcattatgttcgtatttttttcctgtttgtttctaacttctctgtattacatataagggcattttctaaacttttcaccacatg

SEQ ID NO: 453294 - DNA, 6154 bp, Homo sapiens
  misc_feature (1880)..(1880): n is a, c, g, or t
cagaagggctctgttagtgcgcctctaagatggcgacgcctttggcggtaaattcggctgctagtctatggggtccttacaaagacatttggcataaagtgggaaatgctctttggagaagacaacctgaagctgttcaccttcttgataagattttgaagaaacacaaacctgacttcatctcattgttcaaaaatccgccaaaaaatgttcaacagcatgagaaggttcagaaagccagtacagagggagtcgccattcagggtcaacagggaactcgacttcttcctgaacagctcattaaagaagcctttattctcagtgacctttttgatattggagaattggcagctgttgagcttcttcttgctggagagcatcaacagccacattttcctggccttaccagaggattagtagctgttcttctgtactgggatggaaagcgatgcattgcgaattccttgaaagccttgatacagtctagacggggaaagacatggaccctagaactcagtccagagctggcttccatgacaacacgctttacagatgagctgatggagcaaggattgacttataaagttcttacgctggtgtcacagattgatgtgaataatgagtttgagaaactacagcgagagagaggtttgggcagtgaaaaacatcgcaaagaggtttctgatctcattaaggagtgcaggcagtctcttgcagaaagcctttttgcctgggcttgccagtcacctttaggcaaagaagacactctcctcctcattggacatttggaaagagtgacagttgaggctaatggctcactggatgcagtgaatctggctcttcttatggcgcttctatactgttttgatatcagttttatagagcaaagcacagaggaacgagatgatatgattcatcaacttccactgttgacagaaaaacagtacattgcaacaattcactctcgtcttcaggactcacagctttggaaactgcctgggctccaagccactgttagacttgcctgggcgctggcattgaggggaatatcccagctacctgatgtgacagctctggcagaattcacagaggcagatgaagcaatggcagaactcgcaattgctgacaacgttttcctgttcctcatggaatctgtagtggtatcagaatacttttatcaggaagaattttatattcgcagagtccataatctcatcacagatttccttgcacttatgccaatgaaggtgaaacagctgaggaatcgggcagatgaagatgctcgaatgattcacatgagtatgcagatgggtaatgaaccccccatttcacttagaagggacctggaacacttaatgcttttgattggcgagctatataaaaagaacccttttcatctggagcttgctctagaatattggtgtcccacagagcctcttcagactccgactatcatgggctcttatctaggggtggctcatcagcggccccctcaacgccaggttgtcttgtcaaagtttgttaggcaaatgggtgacctgttgcctccaactatttatattccttatttgaagatgctccagggattggccaatgggcctcagtgtgcccactactgtttcagcctgctcaaagtcaatggtagtagtcatgttgaaaatattcagggagcaggtggcagtcctgtttcctgggaacatttctttcactccttgatgctttaccacgaacaccttcggaaggatcttccaagtgcagatagtgtccagtaccgtcaccttccttcccgtggcatcacccagaaggagcaagatggattgattgcttttttgcagctcacgtctaccatcattacttggagtgaaaatgctcgcttggcnctctgtgaacaccctcagtggacccctgttgtggtgattctgggactcctccaatgcagtattccccctgtcctaaaagctgagctactgaagacactcgcagcttttggaaaatctcctgaaattgctgcttccctctggcagtcattggaatacactcagatactgcagaccgtgaggattccaagccaaaggcaagctattggtattgaggttgaactaaatgaaatagaatcccggtgtgaagaatacccattgactcgggccttttgccagcttattagtactctggtggagagctcatttccttctaatttgggtgctggacttgcggccccctggctttgacccttatttgcagttccttagagactctgtgtttctacgattccgtacaagagcttaccggagagcagctgaaaagtgggaagttgctgaggtggttttggaggtgttttataaattgctcagagattatgagcctcagcttgaagattttgtagaccagtttgtggaactacaaggagaagaaatcatagcctataagccacctggatttagtctgatgtatcatctgctgaatgagtcaccaatgttggagcttgctctcagtttactggaagaaggagttaagcagcttgacacctatgccccctttcctgggaaaaaacacctggagaaagcagtacagcattgccttgcacttctcaatcttactctgcaaaaggaaaatctttttatggaccttctaagagagagtcaactggctctaatagtctgtcctttagaacagcttttgcagggaattaatcccagaactaagaaggcagataatgtggtaaacattgccagatacctatatcatggcaatactaatccagaattggcttttgaaagtgccaagatcctctgttgtatctcttgcaactctaatattcagataaagttggttggagatttcacacatgaccagagtataagtcagaaactaatggctggatttgtggagtgtttggattgtgaagatgcagaagaatttgtacgtctggaagagggatcagaacttgaaaagaaattagttgcaattcgtcatgaaacaagaatccacatcttgaatcttctcattacctctctggaatgcaatccacccaatcttgctctctacctgttgggctttgaattgaaaaaacctgtcagtactacaaacctacaagatccaggagtgttaggttgccctcggacatgccttcacgccattctaaacatcttggagaaaggaacggaagggagaacaggcccagtggcggtgcgagaatctcctcagctggctgagctatgttaccaggtcatatatcagttatgtgcatgctctgatacatctggtcctactatgaggtacttgagaaccagccaggatttcttattttcccagttgcagtatctaccattttctaacaaagaatatgaaatatctatgctgaaccagatgtcatggcttatgaaaactgcctcaatagagctaagggtaacctctctgaatcgtcagcggtcacatacccagaggctcctacacctcttactggatgacatgccagtgaaaccatactcagatggtgaaggaggaatagaagatgaaaacaggtctgtttctgggttccttcactttgacactgctacaaaagtacgtcgaaaaattctaaatattcttgactcgattgacttcagtcaggagatccctgagcctttgcagttggatttttttgatcgggcccagattgaacaagttattgctaactgtgaacacaagaatttacggggacagacagtctgcaatgtcaagcttcttcatagggttcttgtagctgaagtaaatgcccttcagggtatggcagccataggacagagacctctactaatggaggaaatcagcactgtacttcagtatgtggtaggaagaaataaattgctgcagtgtcttcatgcaaaacgtcatgctctggagtcgtggaggcaactagtagaaattatactgacagcttgtccccaggacctcattcaggcagaggatcgacaactgattattcgtgatattttacaagatgtgcatgataagatactggatgatgaagctgcgcaagagttaatgcctgtggtcgccggggcagtgttcacactgactgctcacctaagccaggccgtcctcactgaacagaagcaaacatcagtcttgggaccagcagaggcccattacgcttttatgcttgatagttgcttcacctcacctcctcctgaagagaacccattagtgggttttgcttctattggagattcttcactttacatcatattgaagaaactgttagacttcattttgaagacaggtggtggattccaacgagtgaggactcacttgtatggctctctgctttattacttacagattgcccagagacctgatgaaccagacaccttagaagcagccaagaaaaccatgtgggaaaggctgacagcccctgaagatgtatttagcaaattacagcgagaaaacatagccattattgaaagttatggcgccgccctcatggaagtggtctgtcgagatgcttgtgatggtcatgagattggaaggatgctggccctggctctacttgatagaattgtctccgtggataaacagcagcagtggcttttgtatctttctaacagtggctacttgaaggtcctcgtagacagcttggtagaagatgaccgtactttgcagagcttactcaccccacagcctccccttttaaaagcactttatacttatgaatctaaaatggcatttctcacaagagtggcaaagatacagcagggtgcattagagctgctaagatcaggggtgattgtgagactagctcaatgccaagtctatgacatgcgcccagaaacggacccgcagagcatgtttggcatgagagaccctccaatgttcatccctaccccagtggatcgctaccgccagattctcctcccagctctccagctgtgccaggtcatcctcacatctagtatggcccagcacttgcaggcagcagggcaggtattgcagtttcttatttcacattctgataccatacaagcaattctgcgctgtcaggatgttagtgctgggtctttgcaggaattggctctgctgacaggaattataagtaaagcagcacttcctggaatattaagtgaacttgacgttgatgtaaatgaagggtctctaatggagctacagggacatattggaagattccagcgccagtgcttaggactactaagtcgctttggtggctctgacagactgcgtcagtttaaatttcaagacgataatgtggagggagataaagtaagcaagaaagatgagattgaactggctatgcagcagatttgtgccaatgtaatggaatattgccagtcactcatgttacagagttcccctaccttccagcatgctgtgtgtctcttcactcctagcctttcagaaacagttaatagagatggaccgcggcaagatacccaagctccagtggttccatactggcgcctgcctggtttaggcattatcatctacctgctgaaacagagtgctaatgatttcttcagctattatgacagtcatcgacagagtgtcagcaagctacaaaatgtagagcagcttcccccagatgagataaaagagttgtgtcagtctgtgatgcctgctggtgttgataaaatctccactgctcagaaatatgttctagcaagacggcgcttggtgaaggtgatcaacaatcgagctaaactgctttccctttgttcttttatcatagagacctgcctatttattctttggcgccatctggagtactacttgttacattgcatgcccacggattctcaagattccttatttgcctcgagaaccttgtttaaaagcagaagactgcaagattccttcgcctcagaaaccaatctagattttagaagtgggctggctatagtgagccaacatgatttagaccagcttcaggctgatgcaatcaacgcttttggagaatcactacaaaagaaacttctggacattgaaggattatattcaaaagttcgatctcgatatagtttcatacaggctcttgtcagacgtatccgtggcctctagaataatcatagaggccacggaccttggagactgcacgaaaaagattgttggtggtgatgtccttccttgaagcatcatgttgtaattccgtgggcctctaatt

SEQ ID NO: 453295 - DNA, 5863 bp, Homo sapiens
  misc_feature (1880)..(1880): n is a, c, g, or t
cagaagggctctgttagtgcgcctctaagatggcgacgcctttggcggtaaattcggctgctagtctatggggtccttacaaagacatttggcataaagtgggaaatgctctttggagaagacaacctgaagctgttcaccttcttgataagattttgaagaaacacaaacctgacttcatctcattgttcaaaaatccgccaaaaaatgttcaacagcatgagaaggttcagaaagccagtacagagggagtcgccattcagggtcaacagggaactcgacttcttcctgaacagctcattaaagaagcctttattctcagtgacctttttgatattggagaattggcagctgttgagcttcttcttgctggagagcatcaacagccacattttcctggccttaccagaggattagtagctgttcttctgtactgggatggaaagcgatgcattgcgaattccttgaaagccttgatacagtctagacggggaaagacatggaccctagaactcagtccagagctggcttccatgacaacacgctttacagatgagctgatggagcaaggattgacttataaagttcttacgctggtgtcacagattgatgtgaataatgagtttgagaaactacagcgagagagaggtttgggcagtgaaaaacatcgcaaagaggtttctgatctcattaaggagtgcaggcagtctcttgcagaaagcctttttgcctgggcttgccagtcacctttaggcaaagaagacactctcctcctcattggacatttggaaagagtgacagttgaggctaatggctcactggatgcagtgaatctggctcttcttatggcgcttctatactgttttgatatcagttttatagagcaaagcacagaggaacgagatgatatgattcatcaacttccactgttgacagaaaaacagtacattgcaacaattcactctcgtcttcaggactcacagctttggaaactgcctgggctccaagccactgttagacttgcctgggcgctggcattgaggggaatatcccagctacctgatgtgacagctctggcagaattcacagaggcagatgaagcaatggcagaactcgcaattgctgacaacgttttcctgttcctcatggaatctgtagtggtatcagaatacttttatcaggaagaattttatattcgcagagtccataatctcatcacagatttccttgcacttatgccaatgaaggtgaaacagctgaggaatcgggcagatgaagatgctcgaatgattcacatgagtatgcagatgggtaatgaaccccccatttcacttagaagggacctggaacacttaatgcttttgattggcgagctatataaaaagaacccttttcatctggagcttgctctagaatattggtgtcccacagagcctcttcagactccgactatcatgggctcttatctaggggtggctcatcagcggccccctcaacgccaggttgtcttgtcaaagtttgttaggcaaatgggtgacctgttgcctccaactatttatattccttatttgaagatgctccagggattggccaatgggcctcagtgtgcccactactgtttcagcctgctcaaagtcaatggtagtagtcatgttgaaaatattcagggagcaggtggcagtcctgtttcctgggaacatttctttcactccttgatgctttaccacgaacaccttcggaaggatcttccaagtgcagatagtgtccagtaccgtcaccttccttcccgtggcatcacccagaaggagcaagatggattgattgcttttttgcagctcacgtctaccatcattacttggagtgaaaatgctcgcttggcnctctgtgaacaccctcagtggacccctgttgtggtgattctgggactcctccaatgcagtattccccctgtcctaaaagctgagctactgaagacactcgcagcttttggaaaatctcctgaaattgctgcttccctctggcagtcattggaatacactcagatactgcagaccgtgaggattccaagccaaaggcaagctattggtattgaggttgaactaaatgaaatagaatcccggtgtgaagaatacccattgactcgggccttttgccagcttattagtactctggtggagagctcatttccttctaatttgggtgctggacttgcggccccctggctttgacccttatttgcagttccttagagactctgtgtttctacgattccgtacaagagcttaccggagagcagctgaaaagtgggaagttgctgaggtggttttggaggtgttttataaattgctcagagattatgagcctcagcttgaagattttgtagaccagtttgtggaactacaaggagaagaaatcatagcctataagccacctggatttagtctgatgtatcatctgctgaatgagtcaccaatgttggagcttgctctcagtttactggaagaaggagttaagcagcttgacacctatgccccctttcctgggaaaaaacacctggagaaagcagtacagcattgccttgcacttctcaatcttactctgcaaaaggaaaatctttttatggaccttctaagagagagtcaactggctctaatagtctgtcctttagaacagcttttgcagggaattaatcccagaactaagaaggcagataatgtggtaaacattgccagatacctatatcatggcaatactaatccagaattggcttttgaaagtgccaagatcctctgttgtatctcttgcaactctaatattcagataaagttggttggagatttcacacatgaccagagtataagtcagaaactaatggctggatttgtggagtgtttggattgtgaagatgcagaagaatttgtacgtctggaagagggatcagaacttgaaaagaaattagttgcaattcgtcatgaaacaagaatccacatcttgaatcttctcattacctctctggaatgcaatccacccaatcttgctctctacctgttgggctttgaattgaaaaaacctgtcagtactacaaacctacaagatccaggagtgttaggttgccctcggacatgccttcacgccattctaaacatcttggagaaaggaacggaagggagaacaggcccagtggcggtgcgagaatctcctcagctggctgagctatgttaccaggtcatatatcagttatgtgcatgctctgatacatctggtcctactatgaggtacttgagaaccagccaggatttcttattttcccagttgcagtatctaccattttctaacaaagaatatgaaatatctatgctgaaccagatgtcatggcttatgaaaactgcctcaatagagctaagggtaacctctctgaatcgtcagcggtcacatacccagaggctcctacacctcttactggatgacatgccagtgaaaccatactcagatggtgaaggaggaatagaagatgaaaacaggtctgtttctgggttccttcactttgacactgctacaaaagtacgtcgaaaaattctaaatattcttgactcgattgacttcagtcaggagatccctgagcctttgcagttggatttttttgatcgggcccagattgaacaagttattgctaactgtgaacacaagaatttacggggacagacagtctgcaatgtcaagcttcttcatagggttcttgtagctgaagtaaatgcccttcagggtatggcagccataggacagagacctctactaatggaggaaatcagcactgtacttcagtatgtggtaggaagaaataaattgctgcagtgtcttcatgcaaaacgtcatgctctggagtcgtggaggcaactagtagaaattatactgacagcttgtccccaggacctcattcaggcagaggatcgacaactgattattcgtgatattttacaagatgtgcatgataagatactggatgatgaagctgcgcaagagttaatgcctgtggtcgccggggcagtgttcacactgactgctcacctaagccaggccgtcctcactgaacagaagcaaacatcagtcttgggaccagcagaggcccattacgcttttatgcttgatagttgcttcacctcacctcctcctgaagagaacccattagtgggttttgcttctattggagattcttcactttacatcatattgaagaaactgttagacttcattttgaagacaggtggtggattccaacgagtgaggactcacttgtatggctctctgctttattacttacagattgcccagagacctgatgaaccagacaccttagaagcagccaagaaaaccatgtgggaaaggctgacagcccctgaagatgtatttagcaaattacagcgagaaaacatagccattattgaaagttatggcgccgccctcatggaagtggtctgtcgagatgcttgtgatggtcatgagattggaaggatgctggccctggctctacttgatagaattgtctccgtggataaacagcagcagtggcttttgtatctttctaacagtggctacttgaaggtcctcgtagacagcttggtagaagatgaccgtactttgcagagcttactcaccccacagcctccccttttaaaagcactttatacttatgaatctaaaatggcatttctcacaagagtggcaaagatacagcagggtgcattagagctgctaagatcaggggtgattgtgagactagctcaatgccaagtctatgacatgcgcccagaaacggacccgcagagcatgtttggcatgagagaccctccaatgttcatccctaccccagtggatcgctaccgccagattctcctcccagctctccagctgtgccaggtcatcctcacatctagtatggcccagcacttgcaggcagcagggcaggtattgcagtttcttatttcacattctgataccatacaagcaattctgcgctgtcaggatgttagtgctgggtctttgcaggaattggctctgctgacaggaattataagtaaagcagcacttcctggaatattaagtgaacttgacgttgatgtaaatgaagggtctctaatggagctacagggacatattggaagattccagcgccagtgcttaggactactaagtcgctttggtggctctgacagactgcgtcagtttaaatttcaagacgataatgtggagggagataaagtaagcaagaaagatgagattgaactggctatgcagcagatttgtgccaatgtaatggaatattgccagtcactcatgttacagagttcccctaccttccagcatgctgtgtgtctcttcactcctagcctttcagaaacagttaatagagatggaccgcggcaagatacccaagctccagtggttccatactggcgcctgcctggtttaggcattatcatctacctgctgaaacagagtgctaatgatttcttcagctattatgacagtcatcgacagagtgtcagcaagctacaaaatgtagagcagcttcccccagatgagataaaagagttgtgtcagtctgtgatgcctgctggtgttgataaaatctccactgctcagaaatatgttctagcaagacggcgcttggtgaaggtgatcaacaatcgagctaaactgctttccctttgttcttgtatcctttatgaaatcatgcacttgaatgatgaccttgaaatataggaactgttcacttattctcatattatttgggcaccaaaaccaggtggaaggagataaacttaattttttcccagtaaatgcctaatgtatttccaaatcatag

SEQ ID NO: 453296 - DNA, 5655 bp, Homo sapiens
  misc_feature (1880)..(1880): n is a, c, g, or t
cagaagggctctgttagtgcgcctctaagatggcgacgcctttggcggtaaattcggctgctagtctatggggtccttacaaagacatttggcataaagtgggaaatgctctttggagaagacaacctgaagctgttcaccttcttgataagattttgaagaaacacaaacctgacttcatctcattgttcaaaaatccgccaaaaaatgttcaacagcatgagaaggttcagaaagccagtacagagggagtcgccattcagggtcaacagggaactcgacttcttcctgaacagctcattaaagaagcctttattctcagtgacctttttgatattggagaattggcagctgttgagcttcttcttgctggagagcatcaacagccacattttcctggccttaccagaggattagtagctgttcttctgtactgggatggaaagcgatgcattgcgaattccttgaaagccttgatacagtctagacggggaaagacatggaccctagaactcagtccagagctggcttccatgacaacacgctttacagatgagctgatggagcaaggattgacttataaagttcttacgctggtgtcacagattgatgtgaataatgagtttgagaaactacagcgagagagaggtttgggcagtgaaaaacatcgcaaagaggtttctgatctcattaaggagtgcaggcagtctcttgcagaaagcctttttgcctgggcttgccagtcacctttaggcaaagaagacactctcctcctcattggacatttggaaagagtgacagttgaggctaatggctcactggatgcagtgaatctggctcttcttatggcgcttctatactgttttgatatcagttttatagagcaaagcacagaggaacgagatgatatgattcatcaacttccactgttgacagaaaaacagtacattgcaacaattcactctcgtcttcaggactcacagctttggaaactgcctgggctccaagccactgttagacttgcctgggcgctggcattgaggggaatatcccagctacctgatgtgacagctctggcagaattcacagaggcagatgaagcaatggcagaactcgcaattgctgacaacgttttcctgttcctcatggaatctgtagtggtatcagaatacttttatcaggaagaattttatattcgcagagtccataatctcatcacagatttccttgcacttatgccaatgaaggtgaaacagctgaggaatcgggcagatgaagatgctcgaatgattcacatgagtatgcagatgggtaatgaaccccccatttcacttagaagggacctggaacacttaatgcttttgattggcgagctatataaaaagaacccttttcatctggagcttgctctagaatattggtgtcccacagagcctcttcagactccgactatcatgggctcttatctaggggtggctcatcagcggccccctcaacgccaggttgtcttgtcaaagtttgttaggcaaatgggtgacctgttgcctccaactatttatattccttatttgaagatgctccagggattggccaatgggcctcagtgtgcccactactgtttcagcctgctcaaagtcaatggtagtagtcatgttgaaaatattcagggagcaggtggcagtcctgtttcctgggaacatttctttcactccttgatgctttaccacgaacaccttcggaaggatcttccaagtgcagatagtgtccagtaccgtcaccttccttcccgtggcatcacccagaaggagcaagatggattgattgcttttttgcagctcacgtctaccatcattacttggagtgaaaatgctcgcttggcnctctgtgaacaccctcagtggacccctgttgtggtgattctgggactcctccaatgcagtattccccctgtcctaaaagctgagctactgaagacactcgcagcttttggaaaatctcctgaaattgctgcttccctctggcagtcattggaatacactcagatactgcagaccgtgaggattccaagccaaaggcaagctattggtattgaggttgaactaaatgaaatagaatcccggtgtgaagaatacccattgactcgggccttttgccagcttattagtactctggtggagagctcatttccttctaatttgggtgctggacttgcggccccctggctttgacccttatttgcagttccttagagactctgtgtttctacgattccgtacaagagcttaccggagagcagctgaaaagtgggaagttgctgaggtggttttggaggtgttttataaattgctcagagattatgagcctcagcttgaagattttgtagaccagtttgtggaactacaaggagaagaaatcatagcctataagccacctggatttagtctgatgtatcatctgctgaatgagtcaccaatgttggagcttgctctcagtttactggaagaaggagttaagcagcttgacacctatgccccctttcctgggaaaaaacacctggagaaagcagtacagcattgccttgcacttctcaatcttactctgcaaaaggaaaatctttttatggaccttctaagagagagtcaactggctctaatagtctgtcctttagaacagcttttgcagggaattaatcccagaactaagaaggcagataatgtggtaaacattgccagatacctatatcatggcaatactaatccagaattggcttttgaaagtgccaagatcctctgttgtatctcttgcaactctaatattcagataaagttggttggagatttcacacatgaccagagtataagtcagaaactaatggctggatttgtggagtgtttggattgtgaagatgcagaagaatttgtacgtctggaagagggatcagaacttgaaaagaaattagttgcaattcgtcatgaaacaagaatccacatcttgaatcttctcattacctctctggaatgcaatccacccaatcttgctctctacctgttgggctttgaattgaaaaaacctgtcagtactacaaacctacaagatccaggagtgttaggttgccctcggacatgccttcacgccattctaaacatcttggagaaaggaacggaagggagaacaggcccagtggcggtgcgagaatctcctcagctggctgagctatgttaccaggtcatatatcagttatgtgcatgctctgatacatctggtcctactatgaggtacttgagaaccagccaggatttcttattttcccagttgcagtatctaccattttctaacaaagaatatgaaatatctatgctgaaccagatgtcatggcttatgaaaactgcctcaatagagctaagggtaacctctctgaatcgtcagcggtcacatacccagaggctcctacacctcttactggatgacatgccagtgaaaccatactcagatggtgaaggaggaatagaagatgaaaacaggtctgtttctgggttccttcactttgacactgctacaaaagtacgtcgaaaaattctaaatattcttgactcgattgacttcagtcaggagatccctgagcctttgcagttggatttttttgatcgggcccagattgaacaagttattgctaactgtgaacacaagaatttacggggacagacagtctgcaatgtcaagcttcttcatagggttcttgtagctgaagtaaatgcccttcagggtatggcagccataggacagagacctctactaatggaggaaatcagcactgtacttcagtatgtggtaggaagaaataaattgctgcagtgtcttcatgcaaaacgtcatgctctggagtcgtggaggcaactagtagaaattatactgacagcttgtccccaggacctcattcaggcagaggatcgacaactgattattcgtgatattttacaagatgtgcatgataagatactggatgatgaagctgcgcaagagttaatgcctgtggtcgccggggcagtgttcacactgactgctcacctaagccaggccgtcctcactgaacagaagcaaacatcagtcttgggaccagcagaggcccattacgcttttatgcttgatagttgcttcacctcacctcctcctgaagagaacccattagtgggttttgcttctattggagattcttcactttacatcatattgaagaaactgttagacttcattttgaagacaggtggtggattccaacgagtgaggactcacttgtatggctctctgctttattacttacagattgcccagagacctgatgaaccagacaccttagaagcagccaagaaaaccatgtgggaaaggctgacagcccctgaagatgtatttagcaaattacagcgagaaaacatagccattattgaaagttatggcgccgccctcatggaagtggtctgtcgagatgcttgtgatggtcatgagattggaaggatgctggccctggctctacttgatagaattgtctccgtggataaacagcagcagtggcttttgtatctttctaacagtggctacttgaaggtcctcgtagacagcttggtagaagatgaccgtactttgcagagcttactcaccccacagcctccccttttaaaagcactttatacttatgaatctaaaatggcatttctcacaagagtggcaaagatacagcagggtgcattagagctgctaagatcaggggtgattgtgagactagctcaatgccaagtctatgacatgcgcccagaaacggacccgcagagcatgtttggcatgagagaccctccaatgttcatccctaccccagtggatcgctaccgccagattctcctcccagctctccagctgtgccaggtcatcctcacatctagtatggcccagcacttgcaggcagcagggcaggtattgcagtttcttatttcacattctgataccatacaagcaattctgcgctgtcaggatgttagtgctgggtctttgcaggaattggctctgctgacaggaattataagtaaagcagcacttcctggaatattaagtgaacttgacgttgatgtaaatgaagggtctctaatggagctacagggacatattggaagattccagcgccagtgcttaggactactaagtcgctttggtggctctgacagactgcgtcagtttaaatttcaagacgataatgtggagggagataaagtaagcaagaaagatgagattgaactggctatgcagcaggtaagaaccatgtgacttctctaaggtttttatgtttttggaaaatgttgataaaaataacagatgtggacctggtgcggtggctcacgcctataatcccagcactttgggaggccaaggcggatggatcacctgaggtcaagagttgaagaccatcctagccaacatggtgaaaccttgtgtgtactaaaaatacaaaaaaaatttagctgggcatggtggcacgtgcctgtgtgcccagctacttggggtggctgaggcaggagaattgcttgaacccaagaggcagaggttgtagtgagccaagatcacgccactgcattccagcctgggcaacagagggagactccatctgaaaaa

SEQ ID NO: 453297 - DNA, 3075 bp, Homo sapiens
  misc_feature (1880)..(1880): n is a, c, g, or t
cagaagggctctgttagtgcgcctctaagatggcgacgcctttggcggtaaattcggctgctagtctatggggtccttacaaagacatttggcataaagtgggaaatgctctttggagaagacaacctgaagctgttcaccttcttgataagattttgaagaaacacaaacctgacttcatctcattgttcaaaaatccgccaaaaaatgttcaacagcatgagaaggttcagaaagccagtacagagggagtcgccattcagggtcaacagggaactcgacttcttcctgaacagctcattaaagaagcctttattctcagtgacctttttgatattggagaattggcagctgttgagcttcttcttgctggagagcatcaacagccacattttcctggccttaccagaggattagtagctgttcttctgtactgggatggaaagcgatgcattgcgaattccttgaaagccttgatacagtctagacggggaaagacatggaccctagaactcagtccagagctggcttccatgacaacacgctttacagatgagctgatggagcaaggattgacttataaagttcttacgctggtgtcacagattgatgtgaataatgagtttgagaaactacagcgagagagaggtttgggcagtgaaaaacatcgcaaagaggtttctgatctcattaaggagtgcaggcagtctcttgcagaaagcctttttgcctgggcttgccagtcacctttaggcaaagaagacactctcctcctcattggacatttggaaagagtgacagttgaggctaatggctcactggatgcagtgaatctggctcttcttatggcgcttctatactgttttgatatcagttttatagagcaaagcacagaggaacgagatgatatgattcatcaacttccactgttgacagaaaaacagtacattgcaacaattcactctcgtcttcaggactcacagctttggaaactgcctgggctccaagccactgttagacttgcctgggcgctggcattgaggggaatatcccagctacctgatgtgacagctctggcagaattcacagaggcagatgaagcaatggcagaactcgcaattgctgacaacgttttcctgttcctcatggaatctgtagtggtatcagaatacttttatcaggaagaattttatattcgcagagtccataatctcatcacagatttccttgcacttatgccaatgaaggtgaaacagctgaggaatcgggcagatgaagatgctcgaatgattcacatgagtatgcagatgggtaatgaaccccccatttcacttagaagggacctggaacacttaatgcttttgattggcgagctatataaaaagaacccttttcatctggagcttgctctagaatattggtgtcccacagagcctcttcagactccgactatcatgggctcttatctaggggtggctcatcagcggccccctcaacgccaggttgtcttgtcaaagtttgttaggcaaatgggtgacctgttgcctccaactatttatattccttatttgaagatgctccagggattggccaatgggcctcagtgtgcccactactgtttcagcctgctcaaagtcaatggtagtagtcatgttgaaaatattcagggagcaggtggcagtcctgtttcctgggaacatttctttcactccttgatgctttaccacgaacaccttcggaaggatcttccaagtgcagatagtgtccagtaccgtcaccttccttcccgtggcatcacccagaaggagcaagatggattgattgcttttttgcagctcacgtctaccatcattacttggagtgaaaatgctcgcttggcnctctgtgaacaccctcagtggacccctgttgtggtgattctgggactcctccaatgcagtattccccctgtcctaaaagctgagctactgaagacactcgcagcttttggaaaatctcctgaaattgctgcttccctctggcagtcattggaatacactcagatactgcagaccgtgaggattccaagccaaaggcaagctattggtattgaggttgaactaaatgaaatagaatcccggtgtgaagaatacccattgactcgggccttttgccagcttattagtactctggtggagagctcatttccttctaatttgggtgctggacttgcggccccctggctttgacccttatttgcagttccttagagactctgtgtttctacgattccgtacaagagcttaccggagagcagctgaaaagtgggaagttgctgaggtggttttggaggtgttttataaattgctcagagattatgagcctcagcttgaagattttgtagaccagtttgtggaactacaaggagaagaaatcatagcctataagccacctggatttagtctgatgtatcatctgctgaatgagtcaccaatgttggagcttgctctcagtttactggaagaaggagttaagcagcttgacacctatgccccctttcctggtatatgcttaaaagccttcatgtcttgcaaacagctttgatgttttcatcttttgtaaactgagaatttgaaatagatgatctctgaagtcatttttcactgtaagattctctctctgtatctgaagtggtgttttcagtgaatcatttaaatgagagtattgtaagtaaaaacagactaaagtacagagagaatctcactgtcactgtgtttcactgcagggtcttttgtaggtaaagtgatctttctatcattttaacatctttaacatccctaactttaaagtacttttttgtccatcccccacctcataatatttttaaaaggacttactatagtgcttgatacatagtggtcaataaattttacttgttattattaccactaattattatttattgaatgcttactatgtatttggctcttttaaaagcacattgcatatattaatgcattcaatctattcaaaaatgtgttagatcttcttatttccatttaacaaataaagaagctgaaatacaacgaagttata

SEQ ID NO: 453298 - DNA, 530 bp, Homo sapiens
tcccaccttgaggccgctgaccccgtggtgatgggcaagaccaaagccgaacagttttactgtggcgacactgaagggaaaaaggtaaggcccagagagaggcgtgcaaggcagatcgtcaaggccccatgttccagcatggagttccgctcaccaacataacccagagccctgggtgcatctagactttaaaaaaatatttaaagtcggccgggcgcagtgtctcacgcctgtaatcccagcactttgggaggccgaggtgggcagatcacctgagttcgggagttggagaccagcctgaccaacatggagaaactccatctctactaaaaatacaaaattagctgggcgtggtggcgcgcgcctgtaatcccagctactcaggaggctgaggcaggagaatcgcttgaacccgggaggtggaggttgcagtgagccgagattacgccattgcactccagcctgggccaacaagagcgaaactctgtctcaaagaaaaaaataaataaataaaaaatatatgtatatgt

SEQ ID NO: 453299 - DNA, 487 bp, Homo sapiens
aatgtcataaatgggcgtcattttaataactactctcagaatatctttttctattccactttactttttcctctccacttaaccaactcatcattagaaactacaagtcccaggatgcactacacgatgaacgtcggatcgaggacctcgtgtctctgaagtggttgccctcgccttatttgaatgggaataatcccaatgaaaattgatgtttgtgacccagagcagattctggagccttttgtacgcctgggacggcccagcgtggaggggacagtgtggtgcctttttgttcaggcttcgctcaggtcagcctcaccctttcccggggcctccatgcggcagaagggctctgttagtgcgcctctaagatggcgacgcctttggcggtaaattcgggtaagtgtggccagacagaaagacgattgagctgagcgataaccaggtcttcatggagagacgagaccgtgaggtttctcggagtcta

SEQ ID NO: 453300 - DNA, 401 bp, Homo sapiens
aattagatttttcttgaaaactaaaaatgccttttaagatcatttcactctgcattttagattggctttgaatgcgcatgtaccggtgctgttattaatatataacaggtacttacagtctttgtaaaatcatagttctcaaaacttttttatggcaagaatatctgttcatgcacataaacaatataaaatattagaacctctcttcctagtttttaatgtttttgtttattataataatatgttttaaagcattctacattttataggaatattaagtgaacttgacgttgatgtaaatgaagggtctctaatggagctacagggacatattggaagattccaggtaactgattcttatttctttaaatagcagttataagacatgttacaaaatatac

SEQ ID NO: 453301 - DNA, 360 bp, Homo sapiens
ctgagtattatggtaaagttgaaggttacttccttcaacattatttataaaatgaattatgcatttatatataattttctacttctacctgttttttctattcctcttccttttcaatggcttaggtattgcagtttcttatttcacattctgataccatacaagcaattctgcgctgtcaggatgttagtgctgggtctttgcaggaattggctctgctgacaggaattataagtaaagcagcacttcctggtgagttgattatgttgaaaggatttttaataattctttaaagactgacataaattaatagaatgagtttttttgttactttgcagctatatatgacttatttgaaat

SEQ ID NO: 453302 - DNA, 438 bp, Homo sapiens
ggctaggaggttctctgtgtacaagtgacccaggtccctgaaggaagcacttcatgaccctatgaagagggcttctgcctggcacccactccatcccatcctcagtcacacttgattggagtacatttcagaacaagcctcctgcttatcccctccttctggctgaatgggcagtcggcagtcttcattcagccaggcctggttagaaatccccttgactgtgtgtttctgtatggaatagatggcctactgccagcatattggggtggagttcatgttcatcaatgacctggagcagtgccagtggatccggcagaagtttgagacccctgggatcatgcagttcacaaatgaggagaaacggaccctgctggccaggcttgtgcggtccaccaggtatgggtctggccctgggccatggggcagacattcccaggg

SEQ ID NO: 453303 - DNA, 6271 bp, Homo sapiens
  misc_feature (1880)..(1880): n is a, c, g, or t
cagaagggctctgttagtgcgcctctaagatggcgacgcctttggcggtaaattcggctgctagtctatggggtccttacaaagacatttggcataaagtgggaaatgctctttggagaagacaacctgaagctgttcaccttcttgataagattttgaagaaacacaaacctgacttcatctcattgttcaaaaatccgccaaaaaatgttcaacagcatgagaaggttcagaaagccagtacagagggagtcgccattcagggtcaacagggaactcgacttcttcctgaacagctcattaaagaagcctttattctcagtgacctttttgatattggagaattggcagctgttgagcttcttcttgctggagagcatcaacagccacattttcctggccttaccagaggattagtagctgttcttctgtactgggatggaaagcgatgcattgcgaattccttgaaagccttgatacagtctagacggggaaagacatggaccctagaactcagtccagagctggcttccatgacaacacgctttacagatgagctgatggagcaaggattgacttataaagttcttacgctggtgtcacagattgatgtgaataatgagtttgagaaactacagcgagagagaggtttgggcagtgaaaaacatcgcaaagaggtttctgatctcattaaggagtgcaggcagtctcttgcagaaagcctttttgcctgggcttgccagtcacctttaggcaaagaagacactctcctcctcattggacatttggaaagagtgacagttgaggctaatggctcactggatgcagtgaatctggctcttcttatggcgcttctatactgttttgatatcagttttatagagcaaagcacagaggaacgagatgatatgattcatcaacttccactgttgacagaaaaacagtacattgcaacaattcactctcgtcttcaggactcacagctttggaaactgcctgggctccaagccactgttagacttgcctgggcgctggcattgaggggaatatcccagctacctgatgtgacagctctggcagaattcacagaggcagatgaagcaatggcagaactcgcaattgctgacaacgttttcctgttcctcatggaatctgtagtggtatcagaatacttttatcaggaagaattttatattcgcagagtccataatctcatcacagatttccttgcacttatgccaatgaaggtgaaacagctgaggaatcgggcagatgaagatgctcgaatgattcacatgagtatgcagatgggtaatgaaccccccatttcacttagaagggacctggaacacttaatgcttttgattggcgagctatataaaaagaacccttttcatctggagcttgctctagaatattggtgtcccacagagcctcttcagactccgactatcatgggctcttatctaggggtggctcatcagcggccccctcaacgccaggttgtcttgtcaaagtttgttaggcaaatgggtgacctgttgcctccaactatttatattccttatttgaagatgctccagggattggccaatgggcctcagtgtgcccactactgtttcagcctgctcaaagtcaatggtagtagtcatgttgaaaatattcagggagcaggtggcagtcctgtttcctgggaacatttctttcactccttgatgctttaccacgaacaccttcggaaggatcttccaagtgcagatagtgtccagtaccgtcaccttccttcccgtggcatcacccagaaggagcaagatggattgattgcttttttgcagctcacgtctaccatcattacttggagtgaaaatgctcgcttggcnctctgtgaacaccctcagtggacccctgttgtggtgattctgggactcctccaatgcagtattccccctgtcctaaaagctgagctactgaagacactcgcagcttttggaaaatctcctgaaattgctgcttccctctggcagtcattggaatacactcagatactgcagaccgtgaggattccaagccaaaggcaagctattggtattgaggttgaactaaatgaaatagaatcccggtgtgaagaatacccattgactcgggccttttgccagcttattagtactctggtggagagctcatttccttctaatttgggtgctggacttgcggccccctggctttgacccttatttgcagttccttagagactctgtgtttctacgattccgtacaagagcttaccggagagcagctgaaaagtgggaagttgctgaggtggttttggaggtgttttataaattgctcagagattatgagcctcagcttgaagattttgtagaccagtttgtggaactacaaggagaagaaatcatagcctataagccacctggatttagtctgatgtatcatctgctgaatgagtcaccaatgttggagcttgctctcagtttactggaagaaggagttaagcagcttgacacctatgccccctttcctgggaaaaaacacctggagaaagcagtacagcattgccttgcacttctcaatcttactctgcaaaaggaaaatctttttatggaccttctaagagagagtcaactggctctaatagtctgtcctttagaacagcttttgcagggaattaatcccagaactaagaaggcagataatgtggtaaacattgccagatacctatatcatggcaatactaatccagaattggcttttgaaagtgccaagatcctctgttgtatctcttgcaactctaatattcagataaagttggttggagatttcacacatgaccagagtataagtcagaaactaatggctggatttgtggagtgtttggattgtgaagatgcagaagaatttgtacgtctggaagagggatcagaacttgaaaagaaattagttgcaattcgtcatgaaacaagaatccacatcttgaatcttctcattacctctctggaatgcaatccacccaatcttgctctctacctgttgggctttgaattgaaaaaacctgtcagtactacaaacctacaagatccaggagtgttaggttgccctcggacatgccttcacgccattctaaacatcttggagaaaggaacggaagggagaacaggcccagtggcggtgcgagaatctcctcagctggctgagctatgttaccaggtcatatatcagttatgtgcatgctctgatacatctggtcctactatgaggtacttgagaaccagccaggatttcttattttcccagttgcagtatctaccattttctaacaaagaatatgaaatatctatgctgaaccagatgtcatggcttatgaaaactgcctcaatagagctaagggtaacctctctgaatcgtcagcggtcacatacccagaggctcctacacctcttactggatgacatgccagtgaaaccatactcagatggtgaaggaggaatagaagatgaaaacaggtctgtttctgggttccttcactttgacactgctacaaaagtacgtcgaaaaattctaaatattcttgactcgattgacttcagtcaggagatccctgagcctttgcagttggatttttttgatcgggcccagattgaacaagttattgctaactgtgaacacaagaatttacggggacagacagtctgcaatgtcaagcttcttcatagggttcttgtagctgaagtaaatgcccttcagggtatggcagccataggacagagacctctactaatggaggaaatcagcactgtacttcagtatgtggtaggaagaaataaattgctgcagtgtcttcatgcaaaacgtcatgctctggagtcgtggaggcaactagtagaaattatactgacagcttgtccccaggacctcattcaggcagaggatcgacaactgattattcgtgatattttacaagatgtgcatgataagatactggatgatgaagctgcgcaagagttaatgcctgtggtcgccggggcagtgttcacactgactgctcacctaagccaggccgtcctcactgaacagaagcaaacatcagtcttgggaccagcagaggcccattacgcttttatgcttgatagttgcttcacctcacctcctcctgaagagaacccattagtgggttttgcttctattggagattcttcactttacatcatattgaagaaactgttagacttcattttgaagacaggtggtggattccaacgagtgaggactcacttgtatggctctctgctttattacttacagattgcccagagacctgatgaaccagacaccttagaagcagccaagaaaaccatgtgggaaaggctgacagcccctgaagatgtatttagcaaattacagcgagaaaacatagccattattgaaagttatggcgccgccctcatggaagtggtctgtcgagatgcttgtgatggtcatgagattggaaggatgctggccctggctctacttgatagaattgtctccgtggataaacagcagcagtggcttttgtatctttctaacagtggctacttgaaggtcctcgtagacagcttggtagaagatgaccgtactttgcagagcttactcaccccacagcctccccttttaaaagcactttatacttatgaatctaaaatggcatttctcacaagagtggcaaagatacagcagggtgcattagagctgctaagatcaggggtgattgtgagactagctcaatgccaagtctatgacatgcgcccagaaacggacccgcagagcatgtttggcatgagagaccctccaatgttcatccctaccccagtggatcgctaccgccagattctcctcccagctctccagctgtgccaggtcatcctcacatctagtatggcccagcacttgcaggcagcagggcaggtattgcagtttcttatttcacattctgataccatacaagcaattctgcgctgtcaggatgttagtgctgggtctttgcaggaattggctctgctgacaggaattataagtaaagcagcacttcctggaatattaagtgaacttgacgttgatgtaaatgaagggtctctaatggagctacagggacatattggaagattccagcgccagtgcttaggactactaagtcgctttggtggctctgacagactgcgtcagtttaaatttcaagacgataatgtggagggagataaagtaagcaagaaagatgagattgaactggctatgcagcagatttgtgccaatgtaatggaatattgccagtcactcatgttacagagttcccctaccttccagcatgctgtgtgtctcttcactcctagcctttcagaaacagttaatagagatggaccgcggcaagatacccaagctccagtggttccatactggcgcctgcctggtttaggcattatcatctacctgctgaaacagagtgctaatgatttcttcagctattatgacagtcatcgacagagtgtcagcaagctacaaaatgtagagcagcttcccccagatgagataaaagagttgtgtcagtctgtgatgcctgctggtgttgataaaatctccactgctcagaaatatgttctagcaagacggcgcttggtgaaggtgatcaacaatcgagctaaactgctttccctttgttcttttatcatagagacctgcctatttattctttggcgccatctggagtactacttgttacattgcatgcccacggattctcaagattccttatttgcctcgagaaccttgtttaaaagcagaagactgcaagattccttcgcctcagaaaccaatctagattttagaagtgggctggctatagtgagccaacatgatttagaccagcttcaggctgatgcaatcaacgcttttggagaatcactacaaaagaaacttctggacattgaaggattatattcaaaagttcgatctcgatatagtttcatacaggctcttgtcagacgtatccgtggcctcttgaggatatcaaggaactgagagcccgtgcttatgctcttctatgagagagatgaattggggagaattgtctccattttatagattagtttctttctaaattatgaccaaaaatattttgctatttctttctttgtatatggacatcttttctgtaaacttcttcccctagttccatcctcactagtaaaaaataaatactttttaaaaaaacaaaaaaaat

SEQ ID NO: 453304 - DNA, 1016 bp, Homo sapiens
  misc_feature (1016)..(1016): n is a, c, g, or t
acgccatacgccggggcggggccgagagtttggagccccggagtggggtgtcggcgcctcattcgggtggagctgagccggagacaggcagttgtgaaaaacttcaggacaaaaatgtttcatttaaggacttgtgctgctaagttgaggccattgacggcttcccagactgttaagacattttcacaaaacagaccagcagcagctaggacatttcaacagattcggtgctattctgcacctgttgctgctgagccctttctcagtgggactagttcgaactatgtggaggagatgtactgtgcttggctggaaaaccccaaaagtgtacataagtcatgggacattttttttcgcaacacgaatgccggagccccaccgggcactgcctaccagagtccccttcccctgagccgaggctccctggctgctgtggcccatgcacagtccctggtagaagcacagcccaacgtggacaagctcgtggaggaccacctggcagtgcagtcgctcatcagggcatatcagatacgagggcaccatgtagcacagctggaccccctggggattttggatgctgatctggactcctccgtgcccgctgacattatctcatccacagacaaacttgatcttgcagtttttcaagggaaccgactttcgaatgctaacagtaggaggggttctatgggctggattgagtctgaccctcgacaggttcttccaattggcccacaagcaaattttcaatccggggggacaggggaaaatccagggacgttacccatcttggacagggacaaattcatccggtcgaactggaaaaattgggcctatactggcgccagcaaaatagggggaggagagatccagtgtccaccacaagagaccttggagcatgcgccacggtagaaccccgggcagaagacagtggagaacccccgtggacaatagtgacggtcacaaaactcgcggagagcaacaggacccgtgaggccaaagtgaggcggcaccan

SEQ ID NO: 453305 - DNA, 809 bp, Homo sapiens
acgccatacgccggggcggggccgagagtttggagccccggagtggggtgtcggcgcctcattcgggtggagctgagccggagacaggcagttgtgaaaaacttcaggacaaaaatgtttcatttaaggacttgtgctgctaagttgaggccattgacggcttcccagactgttaagacattttcacaaaacagaccagcagcagctaggacatttcaacagattcggtgctattctgcacctgttgctgctgagccctttctcagtgggactagttcgaactatgtggaggagatgtactgtgcttggctggaaaaccccaaaagtgtacataagtgttggcctgttcctgactggtcaccaggtaagtgtgtgcgtcctgaggagtcagcgggcagacaggcagctggagcgccataccaaccaccgtatctgtatcggacccagcatagccccagcagaagccatggtccctggattggcgtccagcagtagacactgtgcttaactctgcgaggatgtgaagaagcatgtgtgtgaccctccagcatctccgcaagggctgcttcaggatgaagccgctgaagaaagaagaaagaaagaaagtgtgtggaaaagagcaggacctcaggaagctcctccattctaactgtctggagaggatactttcatttgtaacatgccgtagtcacctcatgtaatttctgtatgaatggccttttagctcattatgttcgtatttttttcctgtttgtttctaacttctctgtattacatataagggcattttctaaacttttcaccacatg

SEQ ID NO: 453306 - DNA, 4251 bp, Homo sapiens
acgccatacgccggggcggggccgagagtttggagccccggagtggggtgtcggcgcctcattcgggtggagctgagccggagacaggcagttgtgaaaaacttcaggacaaaaatgtttcatttaaggacttgtgctgctaagttgaggccattgacggcttcccagactgttaagacattttcacaaaacagaccagcagcagctaggacatttcaacagattcggtgctattctgcacctgttgctgctgagccctttctcagtgggactagttcgaactatgtggaggagatgtactgtgcttggctggaaaaccccaaaagtgtacataagtcatgggacattttttttcgcaacacgaatgccggagccccaccgggcactgcctaccagagtccccttcccctgagccgaggctccctggctgctgtggcccatgcacagtccctggtagaagcacagcccaacgtggacaagctcgtggaggaccacctggcagtgcagtcgctcatcagggcatatcagatacgagggcaccatgtagcacagctggaccccctggggattttggatgctgatctggactcctccgtgcccgctgacattatctcatccacagacaaacttgggttctatggcctggatgagtctgacctcgacaaggtcttccacttgcccaccaccactttcatcgggggacaggaatcagcacttcctctgcgggagatcatccgtcggctggagatggcctactgccagcatattggggtggagttcatgttcatcaatgacctggagcagtgccagtggatccggcagaagtttgagacccctgggatcatgcagttcacaaatgaggagaaacggaccctgctggccaggcttgtgcggtccaccaggtttgaggagttcctacagcggaagtggtcctctgagaagcgctttggtctagaaggctgcgaggtactgatccctgccctcaagaccatcattgacaagtctagtgagaatggcgtggactacgtgatcatgggcatgccacacagagggcggctgaacgtgcttgcaaatgtcatcaggaaggagctggaacagatcttctgtcaattcgattcaaagctggaggcagctgatgagggctccggagatgtgaagtaccacctgggcatgtatcaccgcaggatcaatcgtgtcaccgacaggaacattaccttgtccttggtggccaacccttcccaccttgaggccgctgaccccgtggtgatgggcaagaccaaagccgaacagttttactgtggcgacactgaagggaaaaaggtcatgtccatcctgttgcatggggatgctgcatttgctggccagggcattgtgtacgagaccttccacctcagcgacctgccatcctacacaactcatggcaccgtgcacgtggtcgtcaacaaccagatcggcttcaccaccgaccctcggatggcccgctcctccccctaccccactgacgtggcccgagtggtgaatgcccccattttccacgtgaactcagatgaccccgaggctgtcatgtacgtgtgcaaagtggcggccgagtggaggagcaccttccacaaggacgtggttgtcgatttggtgtgttaccggcgcaacggccacaacgagatggatgagcccatgttcacgcagccgctcatgtacaagcagatccgcaagcagaagcctgtgttacagaagtacgctgagctgctggtgtcgcagggtgtggtcaaccagcctgagtatgaggaggaaatttccaagtatgataagatctgtgaggaagcttttgccagatctaaagatgagaagatcttgcacattaagcactggctggactctccctggcctggcttcttcaccctggacgggcagcccaggagcatgtcctgcccctccacgggtctgacggaggatattctgacacacatcgggaatgtggctagttctgtgcctgtggaaaactttactattcatggagggctgagccggatcttgaagactcgtggggaaatggtgaagaaccggactgtggactgggctctagcggagtacatggcgtttggctcgctcctgaaggagggcatccacattcggctgagcggccaggacgtggagcggggcacattcagccaccgccaccatgtgctccatgaccagaatgtggacaagagaacctgcatccccatgaaccatctctggcccaatcaggccccctatactgtgtgcaacagctcactgtctgagtacggcgtgctgggctttgagctgggcttcgccatggccagtcctaatgccctggtcctctgggaagcccaatttggtgacttccacaacacggcccagtgtatcatcgaccagttcatctgcccgggacaagccaagtgggtgcggcagaatggcatcgtgttgctgctgccccatggcatggagggcatgggtccagaacattcctccgcccgcccagagcggttcttgcagatgtgcaacgatgacccagatgtcctgccagaccttaaagaagccaacttcgacatcaatcagctatatgactgcaattgggttgttgtcaactgctccactcctggcaacttcttccacgtgctacgacgccagatcctgctgccattccggaagccgttaattatcttcacccccaaatccctgttgcgccaccccgaggccagatccagctttgatgagatgcttccaggaacccacttccagcgggtgatcccagaagatggccctgcagctcagaacccagaaaatgtcaaaaggcttctcttctgcaccggcaaagtgtattatgacctcacccgggagcgcaaagcacgcgacatggtggggcaggtggccatcacaaggattgagcagctgtcgccattcccctttgacctcctgctgaaggaggtgcagaagtaccccaatgctgagctggcctggtgccaggaggagcacaagaaccaaggctactatgactacgtgaagccaagacttcggaccaccatcagccgcgccaagcccgtctggtatgccggccgggacccagcggctgctccagccaccggcaacaagaagacccacctgacggagctgcagcgcctcctggacacggccttcgacctggacgtcttcaagaacttctcgtagatgctgcctagggttgcttgggccactgccctctccacacccatgactgccccttgcttctcaactaaagaatagtgcctcagcgctgcccacaccaccgccctcctcgctgtgccaccacccctccctctgctctcataggagttaggctgtcgtccccctccagtgcttggctgccccacaggccacacgctgcccaggctctgctgacttctgagcagttttccaggaggccggggggagcaggaggaggaaaggtagcccccgagggatgtccttggggaggggtcagctctggccacaatcctccccaccagtctcacccactaggataggaactgggccttgtgtgctggcttccgctgtcacccagcaaggcacaggctcctgtatttgagactaggatagcttcatcttgagcctgagccttagaatctgtagaggagcctggagtcggatctagccatggctggcagaggtttctagggtgggccccagccgtggcgtgaactgaggatgacccggggcagctggcaggagagagccttggcctgacctggcacagaaagggcagcttcagtctctgcagtgtccattatctgctgttccttcgagggttccaggctgtgtgtggggcccaagcatgccccacccacccctcctgggcccaggcagcacctggagcccacagagtctgtgtgtagccaggaagccccgctcaggtagccaccgccggggcactggctgctctgtcttggtcctgttaaccctccacctcctctcttggactccctccccaccccaaccactctttctttctcctttaacccaatggagactttctgatgcatcgttttctttgctgtgccaaagcaggtcagaagagggagaggaggggctgggggtgaggggccaggccatggccaaggggccagctgcccctcatttatcactctgaccttcacagggacagatctgatttatttattttggttaaaaaaaaaaaaggaacagaaacaactttgcattgcattggcttgacccataaactaagttatatccgtg

SEQ ID NO: 453307 - DNA, 10195 bp, Homo sapiens
  misc_feature (1880)..(1880): n is a, c, g, or t
cagaagggctctgttagtgcgcctctaagatggcgacgcctttggcggtaaattcggctgctagtctatggggtccttacaaagacatttggcataaagtgggaaatgctctttggagaagacaacctgaagctgttcaccttcttgataagattttgaagaaacacaaacctgacttcatctcattgttcaaaaatccgccaaaaaatgttcaacagcatgagaaggttcagaaagccagtacagagggagtcgccattcagggtcaacagggaactcgacttcttcctgaacagctcattaaagaagcctttattctcagtgacctttttgatattggagaattggcagctgttgagcttcttcttgctggagagcatcaacagccacattttcctggccttaccagaggattagtagctgttcttctgtactgggatggaaagcgatgcattgcgaattccttgaaagccttgatacagtctagacggggaaagacatggaccctagaactcagtccagagctggcttccatgacaacacgctttacagatgagctgatggagcaaggattgacttataaagttcttacgctggtgtcacagattgatgtgaataatgagtttgagaaactacagcgagagagaggtttgggcagtgaaaaacatcgcaaagaggtttctgatctcattaaggagtgcaggcagtctcttgcagaaagcctttttgcctgggcttgccagtcacctttaggcaaagaagacactctcctcctcattggacatttggaaagagtgacagttgaggctaatggctcactggatgcagtgaatctggctcttcttatggcgcttctatactgttttgatatcagttttatagagcaaagcacagaggaacgagatgatatgattcatcaacttccactgttgacagaaaaacagtacattgcaacaattcactctcgtcttcaggactcacagctttggaaactgcctgggctccaagccactgttagacttgcctgggcgctggcattgaggggaatatcccagctacctgatgtgacagctctggcagaattcacagaggcagatgaagcaatggcagaactcgcaattgctgacaacgttttcctgttcctcatggaatctgtagtggtatcagaatacttttatcaggaagaattttatattcgcagagtccataatctcatcacagatttccttgcacttatgccaatgaaggtgaaacagctgaggaatcgggcagatgaagatgctcgaatgattcacatgagtatgcagatgggtaatgaaccccccatttcacttagaagggacctggaacacttaatgcttttgattggcgagctatataaaaagaacccttttcatctggagcttgctctagaatattggtgtcccacagagcctcttcagactccgactatcatgggctcttatctaggggtggctcatcagcggccccctcaacgccaggttgtcttgtcaaagtttgttaggcaaatgggtgacctgttgcctccaactatttatattccttatttgaagatgctccagggattggccaatgggcctcagtgtgcccactactgtttcagcctgctcaaagtcaatggtagtagtcatgttgaaaatattcagggagcaggtggcagtcctgtttcctgggaacatttctttcactccttgatgctttaccacgaacaccttcggaaggatcttccaagtgcagatagtgtccagtaccgtcaccttccttcccgtggcatcacccagaaggagcaagatggattgattgcttttttgcagctcacgtctaccatcattacttggagtgaaaatgctcgcttggcnctctgtgaacaccctcagtggacccctgttgtggtgattctgggactcctccaatgcagtattccccctgtcctaaaagctgagctactgaagacactcgcagcttttggaaaatctcctgaaattgctgcttccctctggcagtcattggaatacactcagatactgcagaccgtgaggattccaagccaaaggcaagctattggtattgaggttgaactaaatgaaatagaatcccggtgtgaagaatacccattgactcgggccttttgccagcttattagtactctggtggagagctcatttccttctaatttgggtgctggacttgcggccccctggctttgacccttatttgcagttccttagagactctgtgtttctacgattccgtacaagagcttaccggagagcagctgaaaagtgggaagttgctgaggtggttttggaggtgttttataaattgctcagagattatgagcctcagcttgaagattttgtagaccagtttgtggaactacaaggagaagaaatcatagcctataagccacctggatttagtctgatgtatcatctgctgaatgagtcaccaatgttggagcttgctctcagtttactggaagaaggagttaagcagcttgacacctatgccccctttcctgggaaaaaacacctggagaaagcagtacagcattgccttgcacttctcaatcttactctgcaaaaggaaaatctttttatggaccttctaagagagagtcaactggctctaatagtctgtcctttagaacagcttttgcagggaattaatcccagaactaagaaggcagataatgtggtaaacattgccagatacctatatcatggcaatactaatccagaattggcttttgaaagtgccaagatcctctgttgtatctcttgcaactctaatattcagataaagttggttggagatttcacacatgaccagagtataagtcagaaactaatggctggatttgtggagtgtttggattgtgaagatgcagaagaatttgtacgtctggaagagggatcagaacttgaaaagaaattagttgcaattcgtcatgaaacaagaatccacatcttgaatcttctcattacctctctggaatgcaatccacccaatcttgctctctacctgttgggctttgaattgaaaaaacctgtcagtactacaaacctacaagatccaggagtgttaggttgccctcggacatgccttcacgccattctaaacatcttggagaaaggaacggaagggagaacaggcccagtggcggtgcgagaatctcctcagctggctgagctatgttaccaggtcatatatcagttatgtgcatgctctgatacatctggtcctactatgaggtacttgagaaccagccaggatttcttattttcccagttgcagtatctaccattttctaacaaagaatatgaaatatctatgctgaaccagatgtcatggcttatgaaaactgcctcaatagagctaagggtaacctctctgaatcgtcagcggtcacatacccagaggctcctacacctcttactggatgacatgccagtgaaaccatactcagatggtgaaggaggaatagaagatgaaaacaggtctgtttctgggttccttcactttgacactgctacaaaagtacgtcgaaaaattctaaatattcttgactcgattgacttcagtcaggagatccctgagcctttgcagttggatttttttgatcgggcccagattgaacaagttattgctaactgtgaacacaagaatttacggggacagacagtctgcaatgtcaagcttcttcatagggttcttgtagctgaagtaaatgcccttcagggtatggcagccataggacagagacctctactaatggaggaaatcagcactgtacttcagtatgtggtaggaagaaataaattgctgcagtgtcttcatgcaaaacgtcatgctctggagtcgtggaggcaactagtagaaattatactgacagcttgtccccaggacctcattcaggcagaggatcgacaactgattattcgtgatattttacaagatgtgcatgataagatactggatgatgaagctgcgcaagagttaatgcctgtggtcgccggggcagtgttcacactgactgctcacctaagccaggccgtcctcactgaacagaagcaaacatcagtcttgggaccagcagaggcccattacgcttttatgcttgatagttgcttcacctcacctcctcctgaagagaacccattagtgggttttgcttctattggagattcttcactttacatcatattgaagaaactgttagacttcattttgaagacaggtggtggattccaacgagtgaggactcacttgtatggctctctgctttattacttacagattgcccagagacctgatgaaccagacaccttagaagcagccaagaaaaccatgtgggaaaggctgacagcccctgaagatgtatttagcaaattacagcgagaaaacatagccattattgaaagttatggcgccgccctcatggaagtggtctgtcgagatgcttgtgatggtcatgagattggaaggatgctggccctggctctacttgatagaattgtctccgtggataaacagcagcagtggcttttgtatctttctaacagtggctacttgaaggtcctcgtagacagcttggtagaagatgaccgtactttgcagagcttactcaccccacagcctccccttttaaaagcactttatacttatgaatctaaaatggcatttctcacaagagtggcaaagatacagcagggtgcattagagctgctaagatcaggggtgattgtgagactagctcaatgccaagtctatgacatgcgcccagaaacggacccgcagagcatgtttggcatgagagaccctccaatgttcatccctaccccagtggatcgctaccgccagattctcctcccagctctccagctgtgccaggtcatcctcacatctagtatggcccagcacttgcaggcagcagggcaggtattgcagtttcttatttcacattctgataccatacaagcaattctgcgctgtcaggatgttagtgctgggtctttgcaggaattggctctgctgacaggaattataagtaaagcagcacttcctggaatattaagtgaacttgacgttgatgtaaatgaagggtctctaatggagctacagggacatattggaagattccagcgccagtgcttaggactactaagtcgctttggtggctctgacagactgcgtcagtttaaatttcaagacgataatgtggagggagataaagtaagcaagaaagatgagattgaactggctatgcagcagatttgtgccaatgtaatggaatattgccagtcactcatgttacagagttcccctaccttccagcatgctgtgtgtctcttcactcctagcctttcagaaacagttaatagagatggaccgcggcaagatacccaagctccagtggttccatactggcgcctgcctggtttaggcattatcatctacctgctgaaacagagtgctaatgatttcttcagctattatgacagtcatcgacagagtgtcagcaagctacaaaatgtagagcagcttcccccagatgagataaaagagttgtgtcagtctgtgatgcctgctggtgttgataaaatctccactgctcagaaatatgttctagcaagacggcgcttggtgaaggtgatcaacaatcgagctaaactgctttccctttgttcttttatcatagagacctgcctatttattctttggcgccatctggagtactacttgttacattgcatgcccacggattctcaagattccttatttgcctcgagaaccttgtttaaaagcagaagactgcaagattccttcgcctcagaaaccaatctagattttagaagtgggctggctatagtgagccaacatgatttagaccagcttcaggctgatgcaatcaacgcttttggagaatcactacaaaagaaacttctggacattgaaggattatattcaaaagttcgatctcgatatagtttcatacaggctcttgtcagacgtatccgtggcctctaaactagaggccacggacaaatacaaagattgcttagtgggattaagattccaccattcccagactgttaagacattttcacaaaacagaccagcagcagctaggacatttcaacagattcggtgctattctgcacctgttgctgctgagccctttctcagtgggactagttcgaactatgtggaggagatgtactgtgcttggctggaaaaccccaaaagtgtacataagtcatgggacattttttttcgcaacacgaatgccggagccccaccgggcactgcctaccagagtccccttcccctgagccgaggctccctggctgctgtggcccatgcacagtccctggtagaagcacagcccaacgtggacaagctcgtggaggaccacctggcagtgcagtcgctcatcagggcatatcagatacgagggcaccatgtagcacagctggaccccctggggattttggatgctgatctggactcctccgtgcccgctgacattatctcatccacagacaaacttgggttctatggcctggatgagtctgacctcgacaaggtcttccacttgcccaccaccactttcatcgggggacaggaatcagcacttcctctgcgggagatcatccgtcggctggagatggcctactgccagcatattggggtggagttcatgttcatcaatgacctggagcagtgccagtggatccggcagaagtttgagacccctgggatcatgcagttcacaaatgaggagaaacggaccctgctggccaggcttgtgcggtccaccaggtttgaggagttcctacagcggaagtggtcctctgagaagcgctttggtctagaaggctgcgaggtactgatccctgccctcaagaccatcattgacaagtctagtgagaatggcgtggactacgtgatcatgggcatgccacacagagggcggctgaacgtgcttgcaaatgtcatcaggaaggagctggaacagatcttctgtcaattcgattcaaagctggaggcagctgatgagggctccggagatgtgaagtaccacctgggcatgtatcaccgcaggatcaatcgtgtcaccgacaggaacattaccttgtccttggtggccaacccttcccaccttgaggccgctgaccccgtggtgatgggcaagaccaaagccgaacagttttactgtggcgacactgaagggaaaaaggtcatgtccatcctgttgcatggggatgctgcatttgctggccagggcattgtgtacgagaccttccacctcagcgacctgccatcctacacaactcatggcaccgtgcacgtggtcgtcaacaaccagatcggcttcaccaccgaccctcggatggcccgctcctccccctaccccactgacgtggcccgagtggtgaatgcccccattttccacgtgaactcagatgaccccgaggctgtcatgtacgtgtgcaaagtggcggccgagtggaggagcaccttccacaaggacgtggttgtcgatttggtgtgttaccggcgcaacggccacaacgagatggatgagcccatgttcacgcagccgctcatgtacaagcagatccgcaagcagaagcctgtgttacagaagtacgctgagctgctggtgtcgcagggtgtggtcaaccagcctgagtatgaggaggaaatttccaagtatgataagatctgtgaggaagcttttgccagatctaaagatgagaagatcttgcacattaagcactggctggactctccctggcctggcttcttcaccctggacgggcagcccaggagcatgtcctgcccctccacgggtctgacggaggatattctgacacacatcgggaatgtggctagttctgtgcctgtggaaaactttactattcatggagggctgagccggatcttgaagactcgtggggaaatggtgaagaaccggactgtggactgggctctagcggagtacatggcgtttggctcgctcctgaaggagggcatccacattcggctgagcggccaggacgtggagcggggcacattcagccaccgccaccatgtgctccatgaccagaatgtggacaagagaacctgcatccccatgaaccatctctggcccaatcaggccccctatactgtgtgcaacagctcactgtctgagtacggcgtgctgggctttgagctgggcttcgccatggccagtcctaatgccctggtcctctgggaagcccaatttggtgacttccacaacacggcccagtgtatcatcgaccagttcatctgcccgggacaagccaagtgggtgcggcagaatggcatcgtgttgctgctgccccatggcatggagggcatgggtccagaacattcctccgcccgcccagagcggttcttgcagatgtgcaacgatgacccagatgtcctgccagaccttaaagaagccaacttcgacatcaatcagctatatgactgcaattgggttgttgtcaactgctccactcctggcaacttcttccacgtgctacgacgccagatcctgctgccattccggaagccgttaattatcttcacccccaaatccctgttgcgccaccccgaggccagatccagctttgatgagatgcttccaggaacccacttccagcgggtgatcccagaagatggccctgcagctcagaacccagaaaatgtcaaaaggcttctcttctgcaccggcaaagtgtattatgacctcacccgggagcgcaaagcacgcgacatggtggggcaggtggccatcacaaggattgagcagctgtcgccattcccctttgacctcctgctgaaggaggtgcagaagtaccccaatgctgagctggcctggtgccaggaggagcacaagaaccaaggctactatgactacgtgaagccaagacttcggaccaccatcagccgcgccaagcccgtctggtatgccggccgggacccagcggctgctccagccaccggcaacaagaagacccacctgacggagctgcagcgcctcctggacacggccttcgacctggacgtcttcaagaacttctcgtagatgctgcctagggttgcttgggccactgccctctccacacccatgactgccccttgcttctcaactaaagaatagtgcctcagcgctgcccacaccaccgccctcctcgctgtgccaccacccctccctctgctctcataggagttaggctgtcgtccccctccagtgcttggctgccccacaggccacacgctgcccaggctctgctgacttctgagcagttttccaggaggccggggggagcaggaggaggaaaggtagcccccgagggatgtccttggggaggggtcagctctggccacaatcctccccaccagtctcacccactaggataggaactgggccttgtgtgctggcttccgctgtcacccagcaaggcacaggctcctgtatttgagactaggatagcttcatcttgagcctgagccttagaatctgtagaggagcctggagtcggatctagccatggctggcagaggtttctagggtgggccccagccgtggcgtgaactgaggatgacccggggcagctggcaggagagagccttggcctgacctggcacagaaagggcagcttcagtctctgcagtgtccattatctgctgttccttcgagggttccaggctgtgtgtggggcccaagcatgccccacccacccctcctgggcccaggcagcacctggagcccacagagtctgtgtgtagccaggaagccccgctcaggtagccaccgccggggcactggctgctctgtcttggtcctgttaaccctccacctcctctcttggactccctccccaccccaaccactctttctttctcctttaacccaatggagactttctgatgcatcgttttctttgctgtgccaaagcaggtcagaagagggagaggaggggctgggggtgaggggccaggccatggccaaggggccagctgcccctcatttatcactctgaccttcacagggacagatctgatttatttattttggttaaaaaaaaaaaaggaacagaaacaactttgcattgcattggcttgacccataaactaagttatatccgtg

SEQ ID NO: 453308 - DNA, 10756 bp, Homo sapiens
  misc_feature (1880)..(1880): n is a, c, g, or t
cagaagggctctgttagtgcgcctctaagatggcgacgcctttggcggtaaattcggctgctagtctatggggtccttacaaagacatttggcataaagtgggaaatgctctttggagaagacaacctgaagctgttcaccttcttgataagattttgaagaaacacaaacctgacttcatctcattgttcaaaaatccgccaaaaaatgttcaacagcatgagaaggttcagaaagccagtacagagggagtcgccattcagggtcaacagggaactcgacttcttcctgaacagctcattaaagaagcctttattctcagtgacctttttgatattggagaattggcagctgttgagcttcttcttgctggagagcatcaacagccacattttcctggccttaccagaggattagtagctgttcttctgtactgggatggaaagcgatgcattgcgaattccttgaaagccttgatacagtctagacggggaaagacatggaccctagaactcagtccagagctggcttccatgacaacacgctttacagatgagctgatggagcaaggattgacttataaagttcttacgctggtgtcacagattgatgtgaataatgagtttgagaaactacagcgagagagaggtttgggcagtgaaaaacatcgcaaagaggtttctgatctcattaaggagtgcaggcagtctcttgcagaaagcctttttgcctgggcttgccagtcacctttaggcaaagaagacactctcctcctcattggacatttggaaagagtgacagttgaggctaatggctcactggatgcagtgaatctggctcttcttatggcgcttctatactgttttgatatcagttttatagagcaaagcacagaggaacgagatgatatgattcatcaacttccactgttgacagaaaaacagtacattgcaacaattcactctcgtcttcaggactcacagctttggaaactgcctgggctccaagccactgttagacttgcctgggcgctggcattgaggggaatatcccagctacctgatgtgacagctctggcagaattcacagaggcagatgaagcaatggcagaactcgcaattgctgacaacgttttcctgttcctcatggaatctgtagtggtatcagaatacttttatcaggaagaattttatattcgcagagtccataatctcatcacagatttccttgcacttatgccaatgaaggtgaaacagctgaggaatcgggcagatgaagatgctcgaatgattcacatgagtatgcagatgggtaatgaaccccccatttcacttagaagggacctggaacacttaatgcttttgattggcgagctatataaaaagaacccttttcatctggagcttgctctagaatattggtgtcccacagagcctcttcagactccgactatcatgggctcttatctaggggtggctcatcagcggccccctcaacgccaggttgtcttgtcaaagtttgttaggcaaatgggtgacctgttgcctccaactatttatattccttatttgaagatgctccagggattggccaatgggcctcagtgtgcccactactgtttcagcctgctcaaagtcaatggtagtagtcatgttgaaaatattcagggagcaggtggcagtcctgtttcctgggaacatttctttcactccttgatgctttaccacgaacaccttcggaaggatcttccaagtgcagatagtgtccagtaccgtcaccttccttcccgtggcatcacccagaaggagcaagatggattgattgcttttttgcagctcacgtctaccatcattacttggagtgaaaatgctcgcttggcnctctgtgaacaccctcagtggacccctgttgtggtgattctgggactcctccaatgcagtattccccctgtcctaaaagctgagctactgaagacactcgcagcttttggaaaatctcctgaaattgctgcttccctctggcagtcattggaatacactcagatactgcagaccgtgaggattccaagccaaaggcaagctattggtattgaggttgaactaaatgaaatagaatcccggtgtgaagaatacccattgactcgggccttttgccagcttattagtactctggtggagagctcatttccttctaatttgggtgctggacttgcggccccctggctttgacccttatttgcagttccttagagactctgtgtttctacgattccgtacaagagcttaccggagagcagctgaaaagtgggaagttgctgaggtggttttggaggtgttttataaattgctcagagattatgagcctcagcttgaagattttgtagaccagtttgtggaactacaaggagaagaaatcatagcctataagccacctggatttagtctgatgtatcatctgctgaatgagtcaccaatgttggagcttgctctcagtttactggaagaaggagttaagcagcttgacacctatgccccctttcctgggaaaaaacacctggagaaagcagtacagcattgccttgcacttctcaatcttactctgcaaaaggaaaatctttttatggaccttctaagagagagtcaactggctctaatagtctgtcctttagaacagcttttgcagggaattaatcccagaactaagaaggcagataatgtggtaaacattgccagatacctatatcatggcaatactaatccagaattggcttttgaaagtgccaagatcctctgttgtatctcttgcaactctaatattcagataaagttggttggagatttcacacatgaccagagtataagtcagaaactaatggctggatttgtggagtgtttggattgtgaagatgcagaagaatttgtacgtctggaagagggatcagaacttgaaaagaaattagttgcaattcgtcatgaaacaagaatccacatcttgaatcttctcattacctctctggaatgcaatccacccaatcttgctctctacctgttgggctttgaattgaaaaaacctgtcagtactacaaacctacaagatccaggagtgttaggttgccctcggacatgccttcacgccattctaaacatcttggagaaaggaacggaagggagaacaggcccagtggcggtgcgagaatctcctcagctggctgagctatgttaccaggtcatatatcagttatgtgcatgctctgatacatctggtcctactatgaggtacttgagaaccagccaggatttcttattttcccagttgcagtatctaccattttctaacaaagaatatgaaatatctatgctgaaccagatgtcatggcttatgaaaactgcctcaatagagctaagggtaacctctctgaatcgtcagcggtcacatacccagaggctcctacacctcttactggatgacatgccagtgaaaccatactcagatggtgaaggaggaatagaagatgaaaacaggtctgtttctgggttccttcactttgacactgctacaaaagtacgtcgaaaaattctaaatattcttgactcgattgacttcagtcaggagatccctgagcctttgcagttggatttttttgatcgggcccagattgaacaagttattgctaactgtgaacacaagaatttacggggacagacagtctgcaatgtcaagcttcttcatagggttcttgtagctgaagtaaatgcccttcagggtatggcagccataggacagagacctctactaatggaggaaatcagcactgtacttcagtatgtggtaggaagaaataaattgctgcagtgtcttcatgcaaaacgtcatgctctggagtcgtggaggcaactagtagaaattatactgacagcttgtccccaggacctcattcaggcagaggatcgacaactgattattcgtgatattttacaagatgtgcatgataagatactggatgatgaagctgcgcaagagttaatgcctgtggtcgccggggcagtgttcacactgactgctcacctaagccaggccgtcctcactgaacagaagcaaacatcagtcttgggaccagcagaggcccattacgcttttatgcttgatagttgcttcacctcacctcctcctgaagagaacccattagtgggttttgcttctattggagattcttcactttacatcatattgaagaaactgttagacttcattttgaagacaggtggtggattccaacgagtgaggactcacttgtatggctctctgctttattacttacagattgcccagagacctgatgaaccagacaccttagaagcagccaagaaaaccatgtgggaaaggctgacagcccctgaagatgtatttagcaaattacagcgagaaaacatagccattattgaaagttatggcgccgccctcatggaagtggtctgtcgagatgcttgtgatggtcatgagattggaaggatgctggccctggctctacttgatagaattgtctccgtggataaacagcagcagtggcttttgtatctttctaacagtggctacttgaaggtcctcgtagacagcttggtagaagatgaccgtactttgcagagcttactcaccccacagcctccccttttaaaagcactttatacttatgaatctaaaatggcatttctcacaagagtggcaaagatacagcagggtgcattagagctgctaagatcaggggtgattgtgagactagctcaatgccaagtctatgacatgcgcccagaaacggacccgcagagcatgtttggcatgagagaccctccaatgttcatccctaccccagtggatcgctaccgccagattctcctcccagctctccagctgtgccaggtcatcctcacatctagtatggcccagcacttgcaggcagcagggcaggtattgcagtttcttatttcacattctgataccatacaagcaattctgcgctgtcaggatgttagtgctgggtctttgcaggaattggctctgctgacaggaattataagtaaagcagcacttcctggaatattaagtgaacttgacgttgatgtaaatgaagggtctctaatggagctacagggacatattggaagattccagcgccagtgcttaggactactaagtcgctttggtggctctgacagactgcgtcagtttaaatttcaagacgataatgtggagggagataaagtaagcaagaaagatgagattgaactggctatgcagcagatttgtgccaatgtaatggaatattgccagtcactcatgttacagagttcccctaccttccagcatgctgtgtgtctcttcactcctagcctttcagaaacagttaatagagatggaccgcggcaagatacccaagctccagtggttccatactggcgcctgcctggtttaggcattatcatctacctgctgaaacagagtgctaatgatttcttcagctattatgacagtcatcgacagagtgtcagcaagctacaaaatgtagagcagcttcccccagatgagataaaagagttgtgtcagtctgtgatgcctgctggtgttgataaaatctccactgctcagaaatatgttctagcaagacggcgcttggtgaaggtgatcaacaatcgagctaaactgctttccctttgttcttttatcatagagacctgcctatttattctttggcgccatctggagtactacttgttacattgcatgcccacggattctcaagattccttatttgcctcgagaaccttgtttaaaagcagaagactgcaaggtaaactttctgctaaaaattaatgaaccataaatacctatttgtgccttgaaaagctagtaccagtttttttttatttttgtttccagattacttagagtgaattgggtgaatcaagagctgtttagtcactagacgtagctatttcttgcattttactttctgttcacgggacattgtgctgagcataagaatattctagagcctgctcatcagctgttccttagcttcttgctgcagttagggggctgatccagctctagaagaatggaggaggtctgctattatgctgattcttattgctggagtgggcctctgtgactgatggccatatattggatcccttaggtggaaggaaatagagaaaagctgagaaccctggtctggaccagtgaaatgctttctaggggcttccatttgctaaaagttgaaaattgagttcccaatcttgagccgtgtttttcatggtgctattgttattattcattgtcatcaggttcctccactgtgtggtagataggtacttgcacagccggtatgactctgtttttttatctctagattccttcgcctcagaaaccaatctagattttagaagtgggctggctatagtgagccaacatgatttagaccagcttcaggctgatgcaatcaacgcttttggagaatcactacaaaagaaacttctggacattgaaggattatattcaaaagttcgatctcgatatagtttcatacaggctcttgtcagacgtatccgtggcctctaaactagaggccacggacaaatacaaagattgcttagtgggattaagattccaccattcccagactgttaagacattttcacaaaacagaccagcagcagctaggacatttcaacagattcggtgctattctgcacctgttgctgctgagccctttctcagtgggactagttcgaactatgtggaggagatgtactgtgcttggctggaaaaccccaaaagtgtacataagtcatgggacattttttttcgcaacacgaatgccggagccccaccgggcactgcctaccagagtccccttcccctgagccgaggctccctggctgctgtggcccatgcacagtccctggtagaagcacagcccaacgtggacaagctcgtggaggaccacctggcagtgcagtcgctcatcagggcatatcagatacgagggcaccatgtagcacagctggaccccctggggattttggatgctgatctggactcctccgtgcccgctgacattatctcatccacagacaaacttgggttctatggcctggatgagtctgacctcgacaaggtcttccacttgcccaccaccactttcatcgggggacaggaatcagcacttcctctgcgggagatcatccgtcggctggagatggcctactgccagcatattggggtggagttcatgttcatcaatgacctggagcagtgccagtggatccggcagaagtttgagacccctgggatcatgcagttcacaaatgaggagaaacggaccctgctggccaggcttgtgcggtccaccaggtttgaggagttcctacagcggaagtggtcctctgagaagcgctttggtctagaaggctgcgaggtactgatccctgccctcaagaccatcattgacaagtctagtgagaatggcgtggactacgtgatcatgggcatgccacacagagggcggctgaacgtgcttgcaaatgtcatcaggaaggagctggaacagatcttctgtcaattcgattcaaagctggaggcagctgatgagggctccggagatgtgaagtaccacctgggcatgtatcaccgcaggatcaatcgtgtcaccgacaggaacattaccttgtccttggtggccaacccttcccaccttgaggccgctgaccccgtggtgatgggcaagaccaaagccgaacagttttactgtggcgacactgaagggaaaaaggtcatgtccatcctgttgcatggggatgctgcatttgctggccagggcattgtgtacgagaccttccacctcagcgacctgccatcctacacaactcatggcaccgtgcacgtggtcgtcaacaaccagatcggcttcaccaccgaccctcggatggcccgctcctccccctaccccactgacgtggcccgagtggtgaatgcccccattttccacgtgaactcagatgaccccgaggctgtcatgtacgtgtgcaaagtggcggccgagtggaggagcaccttccacaaggacgtggttgtcgatttggtgtgttaccggcgcaacggccacaacgagatggatgagcccatgttcacgcagccgctcatgtacaagcagatccgcaagcagaagcctgtgttacagaagtacgctgagctgctggtgtcgcagggtgtggtcaaccagcctgagtatgaggaggaaatttccaagtatgataagatctgtgaggaagcttttgccagatctaaagatgagaagatcttgcacattaagcactggctggactctccctggcctggcttcttcaccctggacgggcagcccaggagcatgtcctgcccctccacgggtctgacggaggatattctgacacacatcgggaatgtggctagttctgtgcctgtggaaaactttactattcatggagggctgagccggatcttgaagactcgtggggaaatggtgaagaaccggactgtggactgggctctagcggagtacatggcgtttggctcgctcctgaaggagggcatccacattcggctgagcggccaggacgtggagcggggcacattcagccaccgccaccatgtgctccatgaccagaatgtggacaagagaacctgcatccccatgaaccatctctggcccaatcaggccccctatactgtgtgcaacagctcactgtctgagtacggcgtgctgggctttgagctgggcttcgccatggccagtcctaatgccctggtcctctgggaagcccaatttggtgacttccacaacacggcccagtgtatcatcgaccagttcatctgcccgggacaagccaagtgggtgcggcagaatggcatcgtgttgctgctgccccatggcatggagggcatgggtccagaacattcctccgcccgcccagagcggttcttgcagatgtgcaacgatgacccagatgtcctgccagaccttaaagaagccaacttcgacatcaatcagctatatgactgcaattgggttgttgtcaactgctccactcctggcaacttcttccacgtgctacgacgccagatcctgctgccattccggaagccgttaattatcttcacccccaaatccctgttgcgccaccccgaggccagatccagctttgatgagatgcttccaggaacccacttccagcgggtgatcccagaagatggccctgcagctcagaacccagaaaatgtcaaaaggcttctcttctgcaccggcaaagtgtattatgacctcacccgggagcgcaaagcacgcgacatggtggggcaggtggccatcacaaggattgagcagctgtcgccattcccctttgacctcctgctgaaggaggtgcagaagtaccccaatgctgagctggcctggtgccaggaggagcacaagaaccaaggctactatgactacgtgaagccaagacttcggaccaccatcagccgcgccaagcccgtctggtatgccggccgggacccagcggctgctccagccaccggcaacaagaagacccacctgacggagctgcagcgcctcctggacacggccttcgacctggacgtcttcaagaacttctcgtagatgctgcctagggttgcttgggccactgccctctccacacccatgactgccccttgcttctcaactaaagaatagtgcctcagcgctgcccacaccaccgccctcctcgctgtgccaccacccctccctctgctctcataggagttaggctgtcgtccccctccagtgcttggctgccccacaggccacacgctgcccaggctctgctgacttctgagcagttttccaggaggccggggggagcaggaggaggaaaggtagcccccgagggatgtccttggggaggggtcagctctggccacaatcctccccaccagtctcacccactaggataggaactgggccttgtgtgctggcttccgctgtcacccagcaaggcacaggctcctgtatttgagactaggatagcttcatcttgagcctgagccttagaatctgtagaggagcctggagtcggatctagccatggctggcagaggtttctagggtgggccccagccgtggcgtgaactgaggatgacccggggcagctggcaggagagagccttggcctgacctggcacagaaagggcagcttcagtctctgcagtgtccattatctgctgttccttcgagggttccaggctgtgtgtggggcccaagcatgccccacccacccctcctgggcccaggcagcacctggagcccacagagtctgtgtgtagccaggaagccccgctcaggtagccaccgccggggcactggctgctctgtcttggtcctgttaaccctccacctcctctcttggactccctccccaccccaaccactctttctttctcctttaacccaatggagactttctgatgcatcgttttctttgctgtgccaaagcaggtcagaagagggagaggaggggctgggggtgaggggccaggccatggccaaggggccagctgcccctcatttatcactctgaccttcacagggacagatctgatttatttattttggttaaaaaaaaaaaaggaacagaaacaactttgcattgcattggcttgacccataaactaagttatatccgtg

SEQ ID NO: 453309 - DNA, 5537 bp, Homo sapiens
ggacgcgtgggtcgacccacgcgtcgcttatgaatctaaaatggcatttctcacaagagtggcaaagatacagcagggtgcattagagctgctaagatcaggggtgattgtgagactagctcaatgccaagtctatgacatgcgcccagaaacggacccgcagagcatgtttggcatgagagaccctccaatgttcatccctaccccagtggatcgctaccgccagattctcctcccagctctccagctgtgccaggtcatcctcacatctagtatggcccagcacttgcaggcagcagggcaggtattgcagtttcttatttcacattctgataccatacaagcaattctgcgctgtcaggatgttagtgctgggtctttgcaggaattggctctgctgacaggaattataagtaaagcagcacttcctggaatattaagtgaacttgacgttgatgtaaatgaagggtctctaatggagctacagggacatattggaagattccagcgccagtgcttaggactactaagtcgctttggtggctctgacagactgcgtcagtttaaatttcaagacgataatgtggagggagataaagtaagcaagaaagatgagattgaactggctatgcagcagatttgtgccaatgtaatggaatattgccagtcactcatgttacagagttcccctaccttccagcatgctgtgtgtctcttcactcctagcctttcagaaacagttaatagagatggaccgcggcaagatacccaagctccagtggttccatactggcgcctgcctggtttaggcattatcatctacctgctgaaacagagtgctaatgatttcttcagctattatgacagtcatcgacagagtgtcagcaagctacaaaatgtagagcagcttcccccagatgagataaaagagttgtgtcagtctgtgatgcctgctggtgttgataaaatctccactgctcagaaatatgttctagcaagacggcgcttggtgaaggtgatcaacaatcgagctaaactgctttccctttgttcttttatcatagagacctgcctatttattctttggcgccatctggagtactacttgttacattgcatgcccacggattctcaagattccttatttgcctcgagaaccttgtttaaaagcagaagactgcaagattccttcgcctcagaaaccaatctagattttagaagtgggctggctatagtgagccaacatgatttagaccagcttcaggctgatgcaatcaacgcttttggagaatcactacaaaagaaacttctggacattgaaggattatattcaaaagttcgatctcgatatagtttcatacaggctcttgtcagacgtatccgtggcctctaaactagaggccacggacaaatacaaagattgcttagtgggattaagattccaccattcccagactgttaagacattttcacaaaacagaccagcagcagctaggacatttcaacagattcggtgctattctgcacctgttgctgctgagccctttctcagtgggactagttcgaactatgtggaggagatgtactgtgcttggctggaaaaccccaaaagtgtacataagtcatgggacattttttttcgcaacacgaatgccggagccccaccgggcactgcctaccagagtccccttcccctgagccgaggctccctggctgctgtggcccatgcacagtccctggtagaagcacagcccaacgtggacaagctcgtggaggaccacctggcagtgcagtcgctcatcagggcatatcagatacgagggcaccatgtagcacagctggaccccctggggattttggatgctgatctggactcctccgtgcccgctgacattatctcatccacagacaaacttgggttctatggcctggatgagtctgacctcgacaaggtcttccacttgcccaccaccactttcatcgggggacaggaatcagcacttcctctgcgggagatcatccgtcggctggagatggcctactgccagcatattggggtggagttcatgttcatcaatgacctggagcagtgccagtggatccggcagaagtttgagacccctgggatcatgcagttcacaaatgaggagaaacggaccctgctggccaggcttgtgcggtccaccaggtttgaggagttcctacagcggaagtggtcctctgagaagcgctttggtctagaaggctgcgaggtactgatccctgccctcaagaccatcattgacaagtctagtgagaatggcgtggactacgtgatcatgggcatgccacacagagggcggctgaacgtgcttgcaaatgtcatcaggaaggagctggaacagatcttctgtcaattcgattcaaagctggaggcagctgatgagggctccggagatgtgaagtaccacctgggcatgtatcaccgcaggatcaatcgtgtcaccgacaggaacattaccttgtccttggtggccaacccttcccaccttgaggccgctgaccccgtggtgatgggcaagaccaaagccgaacagttttactgtggcgacactgaagggaaaaaggtcatgtccatcctgttgcatggggatgctgcatttgctggccagggcattgtgtacgagaccttccacctcagcgacctgccatcctacacaactcatggcaccgtgcacgtggtcgtcaacaaccagatcggcttcaccaccgaccctcggatggcccgctcctccccctaccccactgacgtggcccgagtggtgaatgcccccattttccacgtgaactcagatgaccccgaggctgtcatgtacgtgtgcaaagtggcggccgagtggaggagcaccttccacaaggacgtggttgtcgatttggtgtgttaccggcgcaacggccacaacgagatggatgagcccatgttcacgcagccgctcatgtacaagcagatccgcaagcagaagcctgtgttacagaagtacgctgagctgctggtgtcgcagggtgtggtcaaccagcctgagtatgaggaggaaatttccaagtatgataagatctgtgaggaagcttttgccagatctaaagatgagaagatcttgcacattaagcactggctggactctccctggcctggcttcttcaccctggacgggcagcccaggagcatgtcctgcccctccacgggtctgacggaggatattctgacacacatcgggaatgtggctagttctgtgcctgtggaaaactttactattcatggagggctgagccggatcttgaagactcgtggggaaatggtgaagaaccggactgtggactgggctctagcggagtacatggcgtttggctcgctcctgaaggagggcatccacattcggctgagcggccaggacgtggagcggggcacattcagccaccgccaccatgtgctccatgaccagaatgtggacaagagaacctgcatccccatgaaccatctctggcccaatcaggccccctatactgtgtgcaacagctcactgtctgagtacggcgtgctgggctttgagctgggcttcgccatggccagtcctaatgccctggtcctctgggaagcccaatttggtgacttccacaacacggcccagtgtatcatcgaccagttcatctgcccgggacaagccaagtgggtgcggcagaatggcatcgtgttgctgctgccccatggcatggagggcatgggtccagaacattcctccgcccgcccagagcggttcttgcagatgtgcaacgatgacccagatgtcctgccagaccttaaagaagccaacttcgacatcaatcagctatatgactgcaattgggttgttgtcaactgctccactcctggcaacttcttccacgtgctacgacgccagatcctgctgccattccggaagccgttaattatcttcacccccaaatccctgttgcgccaccccgaggccagatccagctttgatgagatgcttccaggaacccacttccagcgggtgatcccagaagatggccctgcagctcagaacccagaaaatgtcaaaaggcttctcttctgcaccggcaaagtgtattatgacctcacccgggagcgcaaagcacgcgacatggtggggcaggtggccatcacaaggattgagcagctgtcgccattcccctttgacctcctgctgaaggaggtgcagaagtaccccaatgctgagctggcctggtgccaggaggagcacaagaaccaaggctactatgactacgtgaagccaagacttcggaccaccatcagccgcgccaagcccgtctggtatgccggccgggacccagcggctgctccagccaccggcaacaagaagacccacctgacggagctgcagcgcctcctggacacggccttcgacctggacgtcttcaagaacttctcgtagatgctgcctagggttgcttgggccactgccctctccacacccatgactgccccttgcttctcaactaaagaatagtgcctcagcgctgcccacaccaccgccctcctcgctgtgccaccacccctccctctgctctcataggagttaggctgtcgtccccctccagtgcttggctgccccacaggccacacgctgcccaggctctgctgacttctgagcagttttccaggaggccggggggagcaggaggaggaaaggtagcccccgagggatgtccttggggaggggtcagctctggccacaatcctccccaccagtctcacccactaggataggaactgggccttgtgtgctggcttccgctgtcacccagcaaggcacaggctcctgtatttgagactaggatagcttcatcttgagcctgagccttagaatctgtagaggagcctggagtcggatctagccatggctggcagaggtttctagggtgggccccagccgtggcgtgaactgaggatgacccggggcagctggcaggagagagccttggcctgacctggcacagaaagggcagcttcagtctctgcagtgtccattatctgctgttccttcgagggttccaggctgtgtgtggggcccaagcatgccccacccacccctcctgggcccaggcagcacctggagcccacagagtctgtgtgtagccaggaagccccgctcaggtagccaccgccggggcactggctgctctgtcttggtcctgttaaccctccacctcctctcttggactccctccccaccccaaccactctttctttctcctttaacccaatggagactttctgatgcatcgttttctttgctgtgccaaagcaggtcagaagagggagaggaggggctgggggtgaggggccaggccatggccaaggggccagctgcccctcatttatcactctgaccttcacagggacagatctgatttatttattttggttaaaaaaaaaaaaggaacagaaacaactttgcattgcattggcttgacccataaactaagttatatccgtg

SEQ ID NO: 453310 - DNA, 4211 bp, Homo sapiens
  misc_feature (26)..(26): n is a, c, g, or t
  misc_feature (44)..(44): n is a, c, g, or t
taggctaggtacgaggcccggtgttnatcggcgagggagccggngacgcagttgtgaaaaacttcaggacaaaaatgtttcatttaaggacttgtgctgctaagttgaggccattgacggcttcccagactgttaagacattttcacaaaacagaccagcagcagctaggacatttcaacagattcggtgctattctgcacctgttgctgctgagccctttctcagtgggactagttcgaactatgtggaggagatgtactgtgcttggctggaaaaccccaaaagtgtacataagtcatgggacattttttttcgcaacacgaatgccggagccccaccgggcactgcctaccagagtccccttcccctgagccgaggctccctggctgctgtggcccatgcacagtccctggtagaagcacagcccaacgtggacaagctcgtggaggaccacctggcagtgcagtcgctcatcagggcatatcagatacgagggcaccatgtagcacagctggaccccctggggattttggatgctgatctggactcctccgtgcccgctgacattatctcatccacagacaaacttgggttctatggcctggatgagtctgacctcgacaaggtcttccacttgcccaccaccactttcatcgggggacaggaatcagcacttcctctgcgggagatcatccgtcggctggagatggcctactgccagcatattggggtggagttcatgttcatcaatgacctggagcagtgccagtggatccggcagaagtttgagacccctgggatcatgcagttcacaaatgaggagaaacggaccctgctggccaggcttgtgcggtccaccaggtttgaggagttcctacagcggaagtggtcctctgagaagcgctttggtctagaaggctgcgaggtactgatccctgccctcaagaccatcattgacaagtctagtgagaatggcgtggactacgtgatcatgggcatgccacacagagggcggctgaacgtgcttgcaaatgtcatcaggaaggagctggaacagatcttctgtcaattcgattcaaagctggaggcagctgatgagggctccggagatgtgaagtaccacctgggcatgtatcaccgcaggatcaatcgtgtcaccgacaggaacattaccttgtccttggtggccaacccttcccaccttgaggccgctgaccccgtggtgatgggcaagaccaaagccgaacagttttactgtggcgacactgaagggaaaaaggtcatgtccatcctgttgcatggggatgctgcatttgctggccagggcattgtgtacgagaccttccacctcagcgacctgccatcctacacaactcatggcaccgtgcacgtggtcgtcaacaaccagatcggcttcaccaccgaccctcggatggcccgctcctccccctaccccactgacgtggcccgagtggtgaatgcccccattttccacgtgaactcagatgaccccgaggctgtcatgtacgtgtgcaaagtggcggccgagtggaggagcaccttccacaaggacgtggttgtcgatttggtgtgttaccggcgcaacggccacaacgagatggatgagcccatgttcacgcagccgctcatgtacaagcagatccgcaagcagaagcctgtgttacagaagtacgctgagctgctggtgtcgcagggtgtggtcaaccagcctgagtatgaggaggaaatttccaagtatgataagatctgtgaggaagcttttgccagatctaaagatgagaagatcttgcacattaagcactggctggactctccctggcctggcttcttcaccctggacgggcagcccaggagcatgtcctgcccctccacgggtctgacggaggatattctgacacacatcgggaatgtggctagttctgtgcctgtggaaaactttactattcatggagggctgagccggatcttgaagactcgtggggaaatggtgaagaaccggactgtggactgggctctagcggagtacatggcgtttggctcgctcctgaaggagggcatccacattcggctgagcggccaggacgtggagcggggcacattcagccaccgccaccatgtgctccatgaccagaatgtggacaagagaacctgcatccccatgaaccatctctggcccaatcaggccccctatactgtgtgcaacagctcactgtctgagtacggcgtgctgggctttgagctgggcttcgccatggccagtcctaatgccctggtcctctgggaagcccaatttggtgacttccacaacacggcccagtgtatcatcgaccagttcatctgcccgggacaagccaagtgggtgcggcagaatggcatcgtgttgctgctgccccatggcatggagggcatgggtccagaacattcctccgcccgcccagagcggttcttgcagatgtgcaacgatgacccagatgtcctgccagaccttaaagaagccaacttcgacatcaatcagctatatgactgcaattgggttgttgtcaactgctccactcctggcaacttcttccacgtgctacgacgccagatcctgctgccattccggaagccgttaattatcttcacccccaaatccctgttgcgccaccccgaggccagatccagctttgatgagatgcttccaggaacccacttccagcgggtgatcccagaagatggccctgcagctcagaacccagaaaatgtcaaaaggcttctcttctgcaccggcaaagtgtattatgacctcacccgggagcgcaaagcacgcgacatggtggggcaggtggccatcacaaggattgagcagctgtcgccattcccctttgacctcctgctgaaggaggtgcagaagtaccccaatgctgagctggcctggtgccaggaggagcacaagaaccaaggctactatgactacgtgaagccaagacttcggaccaccatcagccgcgccaagcccgtctggtatgccggccgggacccagcggctgctccagccaccggcaacaagaagacccacctgacggagctgcagcgcctcctggacacggccttcgacctggacgtcttcaagaacttctcgtagatgctgcctagggttgcttgggccactgccctctccacacccatgactgccccttgcttctcaactaaagaatagtgcctcagcgctgcccacaccaccgccctcctcgctgtgccaccacccctccctctgctctcataggagttaggctgtcgtccccctccagtgcttggctgccccacaggccacacgctgcccaggctctgctgacttctgagcagttttccaggaggccggggggagcaggaggaggaaaggtagcccccgagggatgtccttggggaggggtcagctctggccacaatcctccccaccagtctcacccactaggataggaactgggccttgtgtgctggcttccgctgtcacccagcaaggcacaggctcctgtatttgagactaggatagcttcatcttgagcctgagccttagaatctgtagaggagcctggagtcggatctagccatggctggcagaggtttctagggtgggccccagccgtggcgtgaactgaggatgacccggggcagctggcaggagagagccttggcctgacctggcacagaaagggcagcttcagtctctgcagtgtccattatctgctgttccttcgagggttccaggctgtgtgtggggcccaagcatgccccacccacccctcctgggcccaggcagcacctggagcccacagagtctgtgtgtagccaggaagccccgctcaggtagccaccgccggggcactggctgctctgtcttggtcctgttaaccctccacctcctctcttggactccctccccaccccaaccactctttctttctcctttaacccaatggagactttctgatgcatcgttttctttgctgtgccaaagcaggtcagaagagggagaggaggggctgggggtgaggggccaggccatggccaaggggccagctgcccctcatttatcactctgaccttcacagggacagatctgatttatttattttggttaaaaaaaaaaaaggaacagaaacaactttgcattgcattggcttgacccataaactaagttatatccgtg

SEQ ID NO: 453311 - DNA, 8503 bp, Homo sapiens
  misc_feature (1880)..(1880): n is a, c, g, or t
cagaagggctctgttagtgcgcctctaagatggcgacgcctttggcggtaaattcggctgctagtctatggggtccttacaaagacatttggcataaagtgggaaatgctctttggagaagacaacctgaagctgttcaccttcttgataagattttgaagaaacacaaacctgacttcatctcattgttcaaaaatccgccaaaaaatgttcaacagcatgagaaggttcagaaagccagtacagagggagtcgccattcagggtcaacagggaactcgacttcttcctgaacagctcattaaagaagcctttattctcagtgacctttttgatattggagaattggcagctgttgagcttcttcttgctggagagcatcaacagccacattttcctggccttaccagaggattagtagctgttcttctgtactgggatggaaagcgatgcattgcgaattccttgaaagccttgatacagtctagacggggaaagacatggaccctagaactcagtccagagctggcttccatgacaacacgctttacagatgagctgatggagcaaggattgacttataaagttcttacgctggtgtcacagattgatgtgaataatgagtttgagaaactacagcgagagagaggtttgggcagtgaaaaacatcgcaaagaggtttctgatctcattaaggagtgcaggcagtctcttgcagaaagcctttttgcctgggcttgccagtcacctttaggcaaagaagacactctcctcctcattggacatttggaaagagtgacagttgaggctaatggctcactggatgcagtgaatctggctcttcttatggcgcttctatactgttttgatatcagttttatagagcaaagcacagaggaacgagatgatatgattcatcaacttccactgttgacagaaaaacagtacattgcaacaattcactctcgtcttcaggactcacagctttggaaactgcctgggctccaagccactgttagacttgcctgggcgctggcattgaggggaatatcccagctacctgatgtgacagctctggcagaattcacagaggcagatgaagcaatggcagaactcgcaattgctgacaacgttttcctgttcctcatggaatctgtagtggtatcagaatacttttatcaggaagaattttatattcgcagagtccataatctcatcacagatttccttgcacttatgccaatgaaggtgaaacagctgaggaatcgggcagatgaagatgctcgaatgattcacatgagtatgcagatgggtaatgaaccccccatttcacttagaagggacctggaacacttaatgcttttgattggcgagctatataaaaagaacccttttcatctggagcttgctctagaatattggtgtcccacagagcctcttcagactccgactatcatgggctcttatctaggggtggctcatcagcggccccctcaacgccaggttgtcttgtcaaagtttgttaggcaaatgggtgacctgttgcctccaactatttatattccttatttgaagatgctccagggattggccaatgggcctcagtgtgcccactactgtttcagcctgctcaaagtcaatggtagtagtcatgttgaaaatattcagggagcaggtggcagtcctgtttcctgggaacatttctttcactccttgatgctttaccacgaacaccttcggaaggatcttccaagtgcagatagtgtccagtaccgtcaccttccttcccgtggcatcacccagaaggagcaagatggattgattgcttttttgcagctcacgtctaccatcattacttggagtgaaaatgctcgcttggcnctctgtgaacaccctcagtggacccctgttgtggtgattctgggactcctccaatgcagtattccccctgtcctaaaagctgagctactgaagacactcgcagcttttggaaaatctcctgaaattgctgcttccctctggcagtcattggaatacactcagatactgcagaccgtgaggattccaagccaaaggcaagctattggtattgaggttgaactaaatgaaatagaatcccggtgtgaagaatacccattgactcgggccttttgccagcttattagtactctggtggagagctcatttccttctaatttgggtgctggacttgcggccccctggctttgacccttatttgcagttccttagagactctgtgtttctacgattccgtacaagagcttaccggagagcagctgaaaagtgggaagttgctgaggtggttttggaggtgttttataaattgctcagagattatgagcctcagcttgaagattttgtagaccagtttgtggaactacaaggagaagaaatcatagcctataagccacctggatttagtctgatgtatcatctgctgaatgagtcaccaatgttggagcttgctctcagtttactggaagaaggagttaagcagcttgacacctatgccccctttcctgggaaaaaacacctggagaaagcagtacagcattgccttgcacttctcaatcttactctgcaaaaggaaaatctttttatggaccttctaagagagagtcaactggctctaatagtctgtcctttagaacagcttttgcagggaattaatcccagaactaagaaggcagataatgtggtaaacattgccagatacctatatcatggcaatactaatccagaattggcttttgaaagtgccaagatcctctgttgtatctcttgcaactctaatattcagataaagttggttggagatttcacacatgaccagagtataagtcagaaactaatggctggatttgtggagtgtttggattgtgaagatgcagaagaatttgtacgtctggaagagggatcagaacttgaaaagaaattagttgcaattcgtcatgaaacaagaatccacatcttgaatcttctcattacctctctggaatgcaatccacccaatcttgctctctacctgttgggctttgaattgaaaaaacctgtcagtactacaaacctacaagatccaggagtgttaggttgccctcggacatgccttcacgccattctaaacatcttggagaaaggaacggaagggagaacaggcccagtggcggtgcgagaatctcctcagctggctgagctatgttaccaggtcatatatcagttatgtgcatgctctgatacatctggtcctactatgaggtacttgagaaccagccaggatttcttattttcccagttgcagtatctaccattttctaacaaagaatatgaaatatctatgctgaaccagatgtcatggcttatgaaaactgcctcaatagagctaagggtaacctctctgaatcgtcagcggtcacatacccagaggctcctacacctcttactggatgacatgccagtgaaaccatactcagatggtgaaggaggaatagaagatgaaaacaggtctgtttctgggttccttcactttgacactgctacaaaagtacgtcgaaaaattctaaatattcttgactcgattgacttcagtcaggagatccctgagcctttgcagttggatttttttgatcgggcccagattgaacaagttattgctaactgtgaacacaagaatttacggggacagacagtctgcaatgtcaagcttcttcatagggttcttgtagctgaagtaaatgcccttcagggtatggcagccataggacagagacctctactaatggaggaaatcagcactgtacttcagtatgtggtaggaagaaataaattgctgcagtgtcttcatgcaaaacgtcatgctctggagtcgtggaggcaactagtagaaattatactgacagcttgtccccaggacctcattcaggcagaggatcgacaactgattattcgtgatattttacaagatgtgcatgataagatactggatgatgaagctgcgcaagagttaatgcctgtggtcgccggggcagtgttcacactgactgctcacctaagccaggccgtcctcactgaacagaagcaaacatcagtcttgggaccagcagaggcccattacgcttttatgcttgatagttgcttcacctcacctcctcctgaagagaacccattagtgggttttgcttctattggagattcttcactttacatcatattgaagaaactgttagacttcattttgaagacaggtggtggattccaacgagtgaggactcacttgtatggctctctgctttattacttacagattgcccagagacctgatgaaccagacaccttagaagcagccaagaaaaccatgtgggaaaggctgacagcccctgaagatgtatttagcaaattacagcgagaaaacatagccattattgaaagttatggcgccgccctcatggaagtggtctgtcgagatgcttgtgatggtcatgagattggaaggatgctggccctggctctacttgatagaattgtctccgtggataaacagcagcagtggcttttgtatctttctaacagtggctacttgaaggtcctcgtagacagcttggtagaagatgaccgtactttgcagagcttactcaccccacagcctccccttttaaaagcactttatacttatgaatctaaaatggcatttctcacaagagtggcaaagatacagcagggtgcattagagctgctaagatcaggggtgattgtgagactagctcaatgccaagtctatgacatgcgcccagaaacggacccgcagagcatgtttggcatgagagaccctccaatgttcatccctaccccagtggatcgctaccgccagattctcctcccagctctccagctgtgccaggtcatcctcacatctagtatggcccagcacttgcaggcagcagggcaggtattgcagtttcttatttcacattctgataccatacaagcaattctgcgctgtcaggatgttagtgctgggtctttgcaggaattggctctgctgacaggaattataagtaaagcagcacttcctggaatattaagtgaacttgacgttgatgtaaatgaagggtctctaatggagctacagggacatattggaagattccagcgccagtgcttaggactactaagtcgctttggtggctctgacagactgcgtcagtttaaatttcaagacgataatgtggagggagataaagtaagcaagaaagatgagattgaactggctatgcagcagatttgtgccaatgtaatggaatattgccagtcactcatgttacagagttcccctaccttccagcatgctgtgtgtctcttcactcctagcctttcagaaacagttaatagagatggaccgcggcaagatacccaagctccagtggttccatactggcgcctgcctggtttaggcattatcatctacctgctgaaacagagtgctaatgatttcttcagctattatgacagtcatcgacagagtgtcagcaagctacaaaatgtagagcagcttcccccagatgagataaaagagttgtgtcagtctgtgatgcctgctggtgttgataaaatctccactgctcagaaatatgttctagcaagacggcgcttggtgaaggtgatcaacaatcgagctaaactgctttccctttgttcttttatcatagagacctgcctatttattctttggcgccatctggagtactacttgttacattgcatgcccacggattctcaagattccttatttgcctcgagaaccttgtttaaaagcagaagactgcaagattccttcgcctcagaaaccaatctagattttagaagtgggctggctatagtgagccaacatgatttagaccagcttcaggctgatgcaatcaacgcttttggagaatcactacaaaagaaacttctggacattgaaggattatattcaaaagttcgatctcgatatagtttcatacaggctcttgtcagacgtatccgtggcctctaaactagaggccacggacaaatacaaagattgcttagtgggattaagattccaccattcccagactgttaagacattttcacaaaacagaccagcagcagctaggacatttcaacagattcggtgctattctgcacctgttgctgctgagccctttctcagtgggactagttcgaactatgtggaggagatgtactgtgcttggctggaaaaccccaaaagtgtacataagtcatgggacattttttttcgcaacacgaatgccggagccccaccgggcactgcctaccagagtccccttcccctgagccgaggctccctggctgctgtggcccatgcacagtccctggtagaagcacagcccaacgtggacaagctcgtggaggaccacctggcagtgcagtcgctcatcagggcatatcagatacgagggcaccatgtagcacagctggaccccctggggattttggatgctgatctggactcctccgtgcccgctgacattatctcatccacagacaaacttgggttctatggcctggatgagtctgacctcgacaaggtcttccacttgcccaccaccactttcatcgggggacaggaatcagcacttcctctgcgggagatcatccgtcggctggagatggcctactgccagcatattggggtggagttcatgttcatcaatgacctggagcagtgccagtggatccggcagaagtttgagacccctgggatcatgcagttcacaaatgaggagaaacggaccctgctggccaggcttgtgcggtccaccaggtttgaggagttcctacagcggaagtggtcctctgagaagcgctttggtctagaaggctgcgaggtactgatccctgccctcaagaccatcattgacaaatccctgttgcgccaccccgaggccagatccagctttgatgagatgcttccaggaacccacttccagcgggtgatcccagaagatggccctgcagctcagaacccagaaaatgtcaaaaggcttctcttctgcaccggcaaagtgtattatgacctcacccgggagcgcaaagcacgcgacatggtggggcaggtggccatcacaaggattgagcagctgtcgccattcccctttgacctcctgctgaaggaggtgcagaagtaccccaatgctgagctggcctggtgccaggaggagcacaagaaccaaggctactatgactacgtgaagccaagacttcggaccaccatcagccgcgccaagcccgtctggtatgccggccgggacccagcggctgctccagccaccggcaacaagaagacccacctgacggagctgcagcgcctcctggacacggccttcgacctggacgtcttcaagaacttctcgtagatgctgcctagggttgcttgggccactgccctctccacacccatgactgccccttgcttctcaactaaagaatagtgcctcagcgctgcccacaccaccgccctcctcgctgtgccaccacccctccctctgctctcataggagttaggctgtcgtccccctccagtgcttggctgccccacaggccacacgctgcccaggctctgctgacttctgagcagttttccaggaggccggggggagcaggaggaggaaaggtagcccccgagggatgtccttggggaggggtcagctctggccacaatcctccccaccagtctcacccactaggataggaactgggccttgtgtgctggcttccgctgtcacccagcaaggcacaggctcctgtatttgagactaggatagcttcatcttgagcctgagccttagaatctgtagaggagcctggagtcggatctagccatggctggcagaggtttctagggtgggccccagccgtggcgtgaactgaggatgacccggggcagctggcaggagagagccttggcctgacctggcacagaaagggcagcttcagtctctgcagtgtccattatctgctgttccttcgagggttccaggctgtgtgtggggcccaagcatgccccacccacccctcctgggcccaggcagcacctggagcccacagagtctgtgtgtagccaggaagccccgctcaggtagccaccgccggggcactggctgctctgtcttggtcctgttaaccctccacctcctctcttggactccctccccaccccaaccactctttctttctcctttaacccaatggagactttctgatgcatcgttttctttgctgtgccaaagcaggtcagaagagggagaggaggggctgggggtgaggggccaggccatggccaaggggccagctgcccctcatttatcactctgaccttcacagggacagatctgatttatttattttggttaaaaaaaaaaaaggaacagaaacaactttgcattgcattggcttgacccataaactaagttatatccgtg

SEQ ID NO: 453312 - DNA, 4183 bp, Homo sapiens
tatgtgtgttgatggaaggcggccacagggcatctgtgttatagctgtgggggtcagaaagtgcatcccgaagacaaaagttgtggaaagcagggagcctgaatgctgagagaaacccaccgtttgggaacagacagagaccccactgtccaggaggaagcaggctcagccagcctatggtagacttgccttgcctgcagagagcagttctctgtggccacagatgcatcctggacttaggggagcagtgaggtaaccctgtaccttctttgtctttagtcatgggacattttttttcgcaacacgaatgccggagccccaccgggcactgcctaccagagtccccttcccctgagccgaggctccctggctgctgtggcccatgcacagtccctggtagaagcacagcccaacgtggacaagctcgtggaggaccacctggcagtgcagtcgctcatcagggcatatcaggtcaggggtcaccacattgcaaaaccttgatcctctcggaattagttgtgtaaattttgatgatgctccagtaactgtttcttcaaacgtggggttctatggcctggatgagtctgacctcgacaaggtcttccacttgcccaccaccactttcatcgggggacaggaatcagcacttcctctgcgggagatcatccgtcggctggagatggcctactgccagcatattggggtggagttcatgttcatcaatgacctggagcagtgccagtggatccggcagaagtttgagacccctgggatcatgcagttcacaaatgaggagaaacggaccctgctggccaggcttgtgcggtccaccaggtttgaggagttcctacagcggaagtggtcctctgagaagcgctttggtctagaaggctgcgaggtactgatccctgccctcaagaccatcattgacaagtctagtgagaatggcgtggactacgtgatcatgggcatgccacacagagggcggctgaacgtgcttgcaaatgtcatcaggaaggagctggaacagatcttctgtcaattcgattcaaagctggaggcagctgatgagggctccggagatgtgaagtaccacctgggcatgtatcaccgcaggatcaatcgtgtcaccgacaggaacattaccttgtccttggtggccaacccttcccaccttgaggccgctgaccccgtggtgatgggcaagaccaaagccgaacagttttactgtggcgacactgaagggaaaaaggtcatgtccatcctgttgcatggggatgctgcatttgctggccagggcattgtgtacgagaccttccacctcagcgacctgccatcctacacaactcatggcaccgtgcacgtggtcgtcaacaaccagatcggcttcaccaccgaccctcggatggcccgctcctccccctaccccactgacgtggcccgagtggtgaatgcccccattttccacgtgaactcagatgaccccgaggctgtcatgtacgtgtgcaaagtggcggccgagtggaggagcaccttccacaaggacgtggttgtcgatttggtgtgttaccggcgcaacggccacaacgagatggatgagcccatgttcacgcagccgctcatgtacaagcagatccgcaagcagaagcctgtgttacagaagtacgctgagctgctggtgtcgcagggtgtggtcaaccagcctgagtatgaggaggaaatttccaagtatgataagatctgtgaggaagcttttgccagatctaaagatgagaagatcttgcacattaagcactggctggactctccctggcctggcttcttcaccctggacgggcagcccaggagcatgtcctgcccctccacgggtctgacggaggatattctgacacacatcgggaatgtggctagttctgtgcctgtggaaaactttactattcatggagggctgagccggatcttgaagactcgtggggaaatggtgaagaaccggactgtggactgggctctagcggagtacatggcgtttggctcgctcctgaaggagggcatccacattcggctgagcggccaggacgtggagcggggcacattcagccaccgccaccatgtgctccatgaccagaatgtggacaagagaacctgcatccccatgaaccatctctggcccaatcaggccccctatactgtgtgcaacagctcactgtctgagtacggcgtgctgggctttgagctgggcttcgccatggccagtcctaatgccctggtcctctgggaagcccaatttggtgacttccacaacacggcccagtgtatcatcgaccagttcatctgcccgggacaagccaagtgggtgcggcagaatggcatcgtgttgctgctgccccatggcatggagggcatgggtccagaacattcctccgcccgcccagagcggttcttgcagatgtgcaacgatgacccagatgtcctgccagaccttaaagaagccaacttcgacatcaatcagctatatgactgcaattgggttgttgtcaactgctccactcctggcaacttcttccacgtgctacgacgccagatcctgctgccattccggaagccgttaattatcttcacccccaaatccctgttgcgccaccccgaggccagatccagctttgatgagatgcttccaggaacccacttccagcgggtgatcccagaagatggccctgcagctcagaacccagaaaatgtcaaaaggcttctcttctgcaccggcaaagtgtattatgacctcacccgggagcgcaaagcacgcgacatggtggggcaggtggccatcacaaggattgagcagctgtcgccattcccctttgacctcctgctgaaggaggtgcagaagtaccccaatgctgagctggcctggtgccaggaggagcacaagaaccaaggctactatgactacgtgaagccaagacttcggaccaccatcagccgcgccaagcccgtctggtatgccggccgggacccagcggctgctccagccaccggcaacaagaagacccacctgacggagctgcagcgcctcctggacacggccttcgacctggacgtcttcaagaacttctcgtagatgctgcctagggttgcttgggccactgccctctccacacccatgactgccccttgcttctcaactaaagaatagtgcctcagcgctgcccacaccaccgccctcctcgctgtgccaccacccctccctctgctctcataggagttaggctgtcgtccccctccagtgcttggctgccccacaggccacacgctgcccaggctctgctgacttctgagcagttttccaggaggccggggggagcaggaggaggaaaggtagcccccgagggatgtccttggggaggggtcagctctggccacaatcctccccaccagtctcacccactaggataggaactgggccttgtgtgctggcttccgctgtcacccagcaaggcacaggctcctgtatttgagactaggatagcttcatcttgagcctgagccttagaatctgtagaggagcctggagtcggatctagccatggctggcagaggtttctagggtgggccccagccgtggcgtgaactgaggatgacccggggcagctggcaggagagagccttggcctgacctggcacagaaagggcagcttcagtctctgcagtgtccattatctgctgttccttcgagggttccaggctgtgtgtggggcccaagcatgccccacccacccctcctgggcccaggcagcacctggagcccacagagtctgtgtgtagccaggaagccccgctcaggtagccaccgccggggcactggctgctctgtcttggtcctgttaaccctccacctcctctcttggactccctccccaccccaaccactctttctttctcctttaacccaatggagactttctgatgcatcgttttctttgctgtgccaaagcaggtcagaagagggagaggaggggctgggggtgaggggccaggccatggccaaggggccagctgcccctcatttatcactctgaccttcacagggacagatctgatttatttattttggttaaaaaaaaaaaaggaacagaaacaactttgcattgcattggcttgacccataaactaagttatatccgtg

SEQ ID NO: 453313 - DNA, 2635 bp, Homo sapiens
  misc_feature (4)..(4): n is a, c, g, or t
  misc_feature (9)..(9): n is a, c, g, or t
tgangatgntctagaggatccctcacgcccatgtcacaacgagatggatgagcccatgttcacgcagccgctcatgtacaagcagatccgcaagcagaagcctgtgttacagaagtacgctgagctgctggtgtcgcagggtgtggtcaaccagcctgagtatgaggaggaaatttccaagtatgataagatctgtgaggaagcttttgccagatctaaagatgagaagatcttgcacattaagcactggctggactctccctggcctggcttcttcaccctggacgggcagcccaggagcatgtcctgcccctccacgggtctgacggaggatattctgacacacatcgggaatgtggctagttctgtgcctgtggaaaactttactattcatggagggctgagccggatcttgaagactcgtggggaaatggtgaagaaccggactgtggactgggctctagcggagtacatggcgtttggctcgctcctgaaggagggcatccacattcggctgagcggccaggacgtggagcggggcacattcagccaccgccaccatgtgctccatgaccagaatgtggacaagagaacctgcatccccatgaaccatctctggcccaatcaggccccctatactgtgtgcaacagctcactgtctgagtacggcgtgctgggctttgagctgggcttcgccatggccagtcctaatgccctggtcctctgggaagcccaatttggtgacttccacaacacggcccagtgtatcatcgaccagttcatctgcccgggacaagccaagtgggtgcggcagaatggcatcgtgttgctgctgccccatggcatggagggcatgggtccagaacattcctccgcccgcccagagcggttcttgcagatgtgcaacgatgacccagatgtcctgccagaccttaaagaagccaacttcgacatcaatcagctatatgactgcaattgggttgttgtcaactgctccactcctggcaacttcttccacgtgctacgacgccagatcctgctgccattccggaagccgttaattatcttcacccccaaatccctgttgcgccaccccgaggccagatccagctttgatgagatgcttccaggaacccacttccagcgggtgatcccagaagatggccctgcagctcagaacccagaaaatgtcaaaaggcttctcttctgcaccggcaaagtgtattatgacctcacccgggagcgcaaagcacgcgacatggtggggcaggtggccatcacaaggattgagcagctgtcgccattcccctttgacctcctgctgaaggaggtgcagaagtaccccaatgctgagctggcctggtgccaggaggagcacaagaaccaaggctactatgactacgtgaagccaagacttcggaccaccatcagccgcgccaagcccgtctggtatgccggccgggacccagcggctgctccagccaccggcaacaagaagacccacctgacggagctgcagcgcctcctggacacggccttcgacctggacgtcttcaagaacttctcgtagatgctgcctagggttgcttgggccactgccctctccacacccatgactgccccttgcttctcaactaaagaatagtgcctcagcgctgcccacaccaccgccctcctcgctgtgccaccacccctccctctgctctcataggagttaggctgtcgtccccctccagtgcttggctgccccacaggccacacgctgcccaggctctgctgacttctgagcagttttccaggaggccggggggagcaggaggaggaaaggtagcccccgagggatgtccttggggaggggtcagctctggccacaatcctccccaccagtctcacccactaggataggaactgggccttgtgtgctggcttccgctgtcacccagcaaggcacaggctcctgtatttgagactaggatagcttcatcttgagcctgagccttagaatctgtagaggagcctggagtcggatctagccatggctggcagaggtttctagggtgggccccagccgtggcgtgaactgaggatgacccggggcagctggcaggagagagccttggcctgacctggcacagaaagggcagcttcagtctctgcagtgtccattatctgctgttccttcgagggttccaggctgtgtgtggggcccaagcatgccccacccacccctcctgggcccaggcagcacctggagcccacagagtctgtgtgtagccaggaagccccgctcaggtagccaccgccggggcactggctgctctgtcttggtcctgttaaccctccacctcctctcttggactccctccccaccccaaccactctttctttctcctttaacccaatggagactttctgatgcatcgttttctttgctgtgccaaagcaggtcagaagagggagaggaggggctgggggtgaggggccaggccatggccaaggggccagctgcccctcatttatcactctgaccttcacagggacagatctgatttatttattttggttaaaaaaaaaaaaggaacagaaacaactttgcattgcattggcttgacccataaactaagttatatccgtg

SEQ ID NO: 453314 - DNA, 9305 bp, Homo sapiens
  misc_feature (1880)..(1880): n is a, c, g, or t
cagaagggctctgttagtgcgcctctaagatggcgacgcctttggcggtaaattcggctgctagtctatggggtccttacaaagacatttggcataaagtgggaaatgctctttggagaagacaacctgaagctgttcaccttcttgataagattttgaagaaacacaaacctgacttcatctcattgttcaaaaatccgccaaaaaatgttcaacagcatgagaaggttcagaaagccagtacagagggagtcgccattcagggtcaacagggaactcgacttcttcctgaacagctcattaaagaagcctttattctcagtgacctttttgatattggagaattggcagctgttgagcttcttcttgctggagagcatcaacagccacattttcctggccttaccagaggattagtagctgttcttctgtactgggatggaaagcgatgcattgcgaattccttgaaagccttgatacagtctagacggggaaagacatggaccctagaactcagtccagagctggcttccatgacaacacgctttacagatgagctgatggagcaaggattgacttataaagttcttacgctggtgtcacagattgatgtgaataatgagtttgagaaactacagcgagagagaggtttgggcagtgaaaaacatcgcaaagaggtttctgatctcattaaggagtgcaggcagtctcttgcagaaagcctttttgcctgggcttgccagtcacctttaggcaaagaagacactctcctcctcattggacatttggaaagagtgacagttgaggctaatggctcactggatgcagtgaatctggctcttcttatggcgcttctatactgttttgatatcagttttatagagcaaagcacagaggaacgagatgatatgattcatcaacttccactgttgacagaaaaacagtacattgcaacaattcactctcgtcttcaggactcacagctttggaaactgcctgggctccaagccactgttagacttgcctgggcgctggcattgaggggaatatcccagctacctgatgtgacagctctggcagaattcacagaggcagatgaagcaatggcagaactcgcaattgctgacaacgttttcctgttcctcatggaatctgtagtggtatcagaatacttttatcaggaagaattttatattcgcagagtccataatctcatcacagatttccttgcacttatgccaatgaaggtgaaacagctgaggaatcgggcagatgaagatgctcgaatgattcacatgagtatgcagatgggtaatgaaccccccatttcacttagaagggacctggaacacttaatgcttttgattggcgagctatataaaaagaacccttttcatctggagcttgctctagaatattggtgtcccacagagcctcttcagactccgactatcatgggctcttatctaggggtggctcatcagcggccccctcaacgccaggttgtcttgtcaaagtttgttaggcaaatgggtgacctgttgcctccaactatttatattccttatttgaagatgctccagggattggccaatgggcctcagtgtgcccactactgtttcagcctgctcaaagtcaatggtagtagtcatgttgaaaatattcagggagcaggtggcagtcctgtttcctgggaacatttctttcactccttgatgctttaccacgaacaccttcggaaggatcttccaagtgcagatagtgtccagtaccgtcaccttccttcccgtggcatcacccagaaggagcaagatggattgattgcttttttgcagctcacgtctaccatcattacttggagtgaaaatgctcgcttggcnctctgtgaacaccctcagtggacccctgttgtggtgattctgggactcctccaatgcagtattccccctgtcctaaaagctgagctactgaagacactcgcagcttttggaaaatctcctgaaattgctgcttccctctggcagtcattggaatacactcagatactgcagaccgtgaggattccaagccaaaggcaagctattggtattgaggttgaactaaatgaaatagaatcccggtgtgaagaatacccattgactcgggccttttgccagcttattagtactctggtggagagctcatttccttctaatttgggtgctggacttgcggccccctggctttgacccttatttgcagttccttagagactctgtgtttctacgattccgtacaagagcttaccggagagcagctgaaaagtgggaagttgctgaggtggttttggaggtgttttataaattgctcagagattatgagcctcagcttgaagattttgtagaccagtttgtggaactacaaggagaagaaatcatagcctataagccacctggatttagtctgatgtatcatctgctgaatgagtcaccaatgttggagcttgctctcagtttactggaagaaggagttaagcagcttgacacctatgccccctttcctgggaaaaaacacctggagaaagcagtacagcattgccttgcacttctcaatcttactctgcaaaaggaaaatctttttatggaccttctaagagagagtcaactggctctaatagtctgtcctttagaacagcttttgcagggaattaatcccagaactaagaaggcagataatgtggtaaacattgccagatacctatatcatggcaatactaatccagaattggcttttgaaagtgccaagatcctctgttgtatctcttgcaactctaatattcagataaagttggttggagatttcacacatgaccagagtataagtcagaaactaatggctggatttgtggagtgtttggattgtgaagatgcagaagaatttgtacgtctggaagagggatcagaacttgaaaagaaattagttgcaattcgtcatgaaacaagaatccacatcttgaatcttctcattacctctctggaatgcaatccacccaatcttgctctctacctgttgggctttgaattgaaaaaacctgtcagtactacaaacctacaagatccaggagtgttaggttgccctcggacatgccttcacgccattctaaacatcttggagaaaggaacggaagggagaacaggcccagtggcggtgcgagaatctcctcagctggctgagctatgttaccaggtcatatatcagttatgtgcatgctctgatacatctggtcctactatgaggtacttgagaaccagccaggatttcttattttcccagttgcagtatctaccattttctaacaaagaatatgaaatatctatgctgaaccagatgtcatggcttatgaaaactgcctcaatagagctaagggtaacctctctgaatcgtcagcggtcacatacccagaggctcctacacctcttactggatgacatgccagtgaaaccatactcagatggtgaaggaggaatagaagatgaaaacaggtctgtttctgggttccttcactttgacactgctacaaaagtacgtcgaaaaattctaaatattcttgactcgattgacttcagtcaggagatccctgagcctttgcagttggatttttttgatcgggcccagattgaacaagttattgctaactgtgaacacaagaatttacggggacagacagtctgcaatgtcaagcttcttcatagggttcttgtagctgaagtaaatgcccttcagggtatggcagccataggacagagacctctactaatggaggaaatcagcactgtacttcagtatgtggtaggaagaaataaattgctgcagtgtcttcatgcaaaacgtcatgctctggagtcgtggaggcaactagtagaaattatactgacagcttgtccccaggacctcattcaggcagaggatcgacaactgattattcgtgatattttacaagatgtgcatgataagatactggatgatgaagctgcgcaagagttaatgcctgtggtcgccggggcagtgttcacactgactgctcacctaagccaggccgtcctcactgaacagaagcaaacatcagtcttgggaccagcagaggcccattacgcttttatgcttgatagttgcttcacctcacctcctcctgaagagaacccattagtgggttttgcttctattggagattcttcactttacatcatattgaagaaactgttagacttcattttgaagacaggtggtggattccaacgagtgaggactcacttgtatggctctctgctttattacttacagattgcccagagacctgatgaaccagacaccttagaagcagccaagaaaaccatgtgggaaaggctgacagcccctgaagatgtatttagcaaattacagcgagaaaacatagccattattgaaagttatggcgccgccctcatggaagtggtctgtcgagatgcttgtgatggtcatgagattggaaggatgctggccctggctctacttgatagaattgtctccgtggataaacagcagcagtggcttttgtatctttctaacagtggctacttgaaggtcctcgtagacagcttggtagaagatgaccgtactttgcagagcttactcaccccacagcctccccttttaaaagcactttatacttatgaatctaaaatggcatttctcacaagagtggcaaagatacagcagggtgcattagagctgctaagatcaggggtgattgtgagactagctcaatgccaagtctatgacatgcgcccagaaacggacccgcagagcatgtttggcatgagagaccctccaatgttcatccctaccccagtggatcgctaccgccagattctcctcccagctctccagctgtgccaggtcatcctcacatctagtatggcccagcacttgcaggcagcagggcaggtattgcagtttcttatttcacattctgataccatacaagcaattctgcgctgtcaggatgttagtgctgggtctttgcaggaattggctctgctgacaggaattataagtaaagcagcacttcctggaatattaagtgaacttgacgttgatgtaaatgaagggtctctaatggagctacagggacatattggaagattccagcgccagtgcttaggactactaagtcgctttggtggctctgacagactgcgtcagtttaaatttcaagacgataatgtggagggagataaagtaagcaagaaagatgagattgaactggctatgcagcagatttgtgccaatgtaatggaatattgccagtcactcatgttacagagttcccctaccttccagcatgctgtgtgtctcttcactcctagcctttcagaaacagttaatagagatggaccgcggcaagatacccaagctccagtggttccatactggcgcctgcctggtttaggcattatcatctacctgctgaaacagagtgctaatgatttcttcagctattatgacagtcatcgacagagtgtcagcaagctacaaaatgtagagcagcttcccccagatgagataaaagagttgtgtcagtctgtgatgcctgctggtgttgataaaatctccactgctcagaaatatgttctagcaagacggcgcttggtgaaggtgatcaacaatcgagctaaactgctttccctttgttcttttatcatagagacctgcctatttattctttggcgccatctggagtactacttgttacattgcatgcccacggattctcaagattccttatttgcctcgagaaccttgtttaaaagcagaagactgcaagattccttcgcctcagaaaccaatctagattttagaagtgggctggctatagtgagccaacatgatttagaccagcttcaggctgatgcaatcaacgcttttggagaatcactacaaaagaaacttctggacattgaaggattatattcaaaagttcgatctcgatatagtttcatacaggctcttgtcagacgtatccgtggcctctaaactagaggccacggacaaatacaaagattgcttagtgggattaagattccaccattcccagactgttaagacattttcacaaaacagaccagcagcagctaggacatttcaacagattcggtgctattctgcacctgttgctgctgagccctttctcagtgggactagttcgaactatgtggaggagatgtactgtgcttggctggaaaaccccaaaagtgtacataagtcatgggacattttttttcgcaacacgaatgccggagccccaccgggcactgcctaccagagtccccttcccctgagccgaggctccctggctgctgtggcccatgcacagtccctggtagaagcacagcccaacgtggacaagctcgtggaggaccacctggcagtgcagtcgctcatcagggcatatcagatacgagggcaccatgtagcacagctggaccccctggggattttggatgctgatctggactcctccgtgcccgctgacattatctcatccacagacaaacttgggttctatggcctggatgagtctgacctcgacaaggtcttccacttgcccaccaccactttcatcgggggacaggaatcagcacttcctctgcgggagatcatccgtcggctggagatggcctactgccagcatattggggtggagttcatgttcatcaatgacctggagcagtgccagtggatccggcagaagtttgagacccctgggatcatgcagttcacaaatgaggagaaacggaccctgctggccaggcttgtgcggtccaccaggtttgaggagttcctacagcggaagtggtcctctgagaagcgctttggtctagaaggctgcgaggtactgatccctgccctcaagaccatcattgacaagtctagtgagaatggcgtggactacgtgatcatgggcatgccacacagagggcggctgaacgtgcttgcaaatgtcatcaggaaggagctggaacagatcttctgtcaattcgattcaaagctggaggcagctgatgagggctccggagatgtgaagtaccacctgggcatgtatcaccgcaggatcaatcgtgtcaccgacaggaacattaccttgtccttggtggccaacccttcccaccttgaggccgctgaccccgtggtgatgggcaagaccaaagccgaacagttttactgtggcgacactgaagggaaaaaggtcatgtccatcctgttgcatggggatgctgcatttgctggccagggcattgtgtacgagaccttccacctcagcgacctgccatcctacacaactcatggcaccgtgcacgtggtcgtcaacaaccagatcggcttcaccaccgaccctcggatggcccgctcctccccctaccccactgacgtggcccgagtggtgaatgcccccattttccacgtgaactcagatgaccccgaggctgtcatgtacgtgtgcaaagtggcggccgagtggaggagcaccttccacaaggacgtggttgtcgatttggtgtgttaccggcgcaacggccacaacgagatggatgagcccatgttcacgcagccgctcatgtacaagcagatccgcaagcagaagcctgtgttacagaagtacgctgagctgctggtgtcgcagggtgtggtcaaccagcctgagtatgaggaggaaatttccaagtatgataagatctgtgaggaagcttttgccagatctaaagatgagaagatcttgcacattaagcactggctggactctccctggcctggcttcttcaccctggacgggcagcccaggagcatgtcctgcccctccacgggtctgacggaggatattctgacacacatcgggaatgtggctagttctgtgcctgtggaaaactttactattcatggagggctgagccggatcttgaagactcgtggggaaatggtgaagaaccggactgtggactgggctctagcggagtacatggcgtttggctcgctcctgaaggagggcatccacattcggctgagcggccaggacgtggagcggggcacattcagccaccgccaccatgtgctccatgaccagaatgtggacaagagaacctgcatccccatgaaccatctctggcccaatcaggccccctatactgtgtgcaacagctcactgtctgagtacggcgtgctgggctttgagctgggcttcgccatggccagtcctaatgccctggtcctctgggaagcccaatttggtgacttccacaacacggcccagtgtatcatcgaccagttcatctgcccgggacaagccaagtgggtgcggcagaatggcatcgtgttgctgctgccccatggcatggagggcatgggtccagaacattcctccgcccgcccagagcggttcttgcagatgtgcaacgatgacccagatgtcctgccagaccttaaagaagccaacttcgacatcaatcagctatatgactgcaattgggttgttgtcaactgctccactcctggcaacttcttccacgtgctacgacgccagatcctgctgccattccggaagccgttaattatcttcacccccaaatccctgttgcgccaccccgaggccagatccagctttgatgagatgcttccaggaacccacttccagcgggtgatcccagaagatggccctgcagctcagaacccagaaaatgtcaaaaggcttctcttctgcaccggcaaagtgtattatgacctcacccgggagcgcaaagcacgcgacatggtggggcaggtggccatcacaaggattgagcagctgtcgccattcccctttgacctcctgctgaaggaggtgcagaagtaccccaatgctgagctggcctggtgccaggaggagcacaagaaccaaggctactatgactacgtgaagccaagacttcggaccaccatcagccgcgccaagcccgtctggtatgccggccgggacccagcggctgctccagccaccggcaacaagaagacccacctgacggagctgcagcgcctcctggacacggccttcgacctggacgtcttcaagaacttctcgtagatgctgcctagggttgcttgggccactgccctctccacacccatgatgcccctcatttatcactctgaccttcacagggacagatctgatttatttattttggttaaaaaaaaaaaaggaacagaaacaactttgcattgcattggcttgacccataaactaagttatatccgtg

SEQ ID NO: 453315 - DNA, 1640 bp, Homo sapiens
aaaataggctaagtagaggcgcgtggtaatcggccgaggcagatctgctgcattccggaaccttaattatcttcacccccaaatccctgttgcgccaccccgaggccagatccagctttgatgagatgcttccaggaacccacttccagcgggtgatcccagaagatggccctgcagctcagaacccagaaaatgtcaaaaggcttctcttctgcaccggcaaagtgtattatgacctcacccgggagcgcaaagcacgcgacatggtggggcaggtggccatcacaaggattgagcagctgtcgccattcccctttgacctcctgctgaaggaggtgcagaagtaccccaatgctgagctggcctggtgccaggaggagcacaagaaccaaggctactatgactacgtgaagccaagacttcggaccaccatcagccgcgccaagcccgtctggtatgccggccgggacccagcggctgctccagccaccggcaacaagaagacccacctgacggagctgcagcgcctcctggacacggccttcgacctggacgtcttcaagaacttctcgtagatgctgcctagggttgcttgggccactgccctctccacacccatgactgccccttgcttctcaactaaagaatagtgcctcagcgctgcccacaccaccgccctcctcgctgtgccaccacccctccctctgctctcataggagttaggctgtcgtccccctccagtgcttggctgccccacaggccacacgctgcccaggctctgctgacttctgagcagttttccaggaggccggggggagcaggaggaggaaaggtagcccccgagggatgtccttggggaggggtcagctctggccacaatcctccccaccagtctcacccactaggataggaactgggccttgtgtgctggcttccgctgtcacccagcaaggcacaggctcctgtatttgagactaggatagcttcatcttgagcctgagccttagaatctgtagaggagcctggagtcggatctagccatggctggcagaggtttctagggtgggccccagccgtggcgtgaactgaggatgacccggggcagctggcaggagagagccttggcctgacctggcacagaaagggcagcttcagtctctgcagtgtccattatctgctgttccttcgagggttccaggctgtgtgtggggcccaagcatgccccacccacccctcctgggcccaggcagcacctggagcccacagagtctgtgtgtagccaggaagccccgctcaggtagccaccgccggggcactggctgctctgtcttggtcctgttaaccctccacctcctctcttggactccctccccaccccaaccactctttctttctcctttaacccaatggagactttctgatgcatcgttttctttgctgtgccaaagcaggtcagaagagggagaggaggggctgggggtgaggggccaggccatggccaaggggccagctgcccctcatttatcactctgaccttcacagggacagatctgatttatttattttggttaaaaaaaaaaaaggaacagaaacaactttgcattgcattggcttgacccataaactaagttatatccgtg

SEQ ID NO: 453316 - DNA, 1141 bp, Homo sapiens
gtggagaagggttccatgtgaacagcagtggcccaagcaacccttcgacctggacgtcttcaagaacttctcgtagatgctgcctagggttgcttgggccactgccctctccacacccatgactgccccttgcttctcaactaaagaatagtgcctcagcgctgcccacaccaccgccctcctcgctgtgccaccacccctccctctgctctcataggagttaggctgtcgtccccctccagtgcttggctgccccacaggccacacgctgcccaggctctgctgacttctgagcagttttccaggaggccggggggagcaggaggaggaaaggtagcccccgagggatgtccttggggaggggtcagctctggccacaatcctccccaccagtctcacccactaggataggaactgggccttgtgtgctggcttccgctgtcacccagcaaggcacaggctcctgtatttgagactaggatagcttcatcttgagcctgagccttagaatctgtagaggagcctggagtcggatctagccatggctggcagaggtttctagggtgggccccagccgtggcgtgaactgaggatgacccggggcagctggcaggagagagccttggcctgacctggcacagaaagggcagcttcagtctctgcagtgtccattatctgctgttccttcgagggttccaggctgtgtgtggggcccaagcatgccccacccacccctcctgggcccaggcagcacctggagcccacagagtctgtgtgtagccaggaagccccgctcaggtagccaccgccggggcactggctgctctgtcttggtcctgttaaccctccacctcctctcttggactccctccccaccccaaccactctttctttctcctttaacccaatggagactttctgatgcatcgttttctttgctgtgccaaagcaggtcagaagagggagaggaggggctgggggtgaggggccaggccatggccaaggggccagctgcccctcatttatcactctgaccttcacagggacagatctgatttatttattttggttaaaaaaaaaaaaggaacagaaacaactttgcattgcattggcttgacccataaactaagttatatccgtg

SEQ ID NO: 453317 - DNA, 7120 bp, Homo sapiens
  misc_feature (1880)..(1880): n is a, c, g, or t
cagaagggctctgttagtgcgcctctaagatggcgacgcctttggcggtaaattcggctgctagtctatggggtccttacaaagacatttggcataaagtgggaaatgctctttggagaagacaacctgaagctgttcaccttcttgataagattttgaagaaacacaaacctgacttcatctcattgttcaaaaatccgccaaaaaatgttcaacagcatgagaaggttcagaaagccagtacagagggagtcgccattcagggtcaacagggaactcgacttcttcctgaacagctcattaaagaagcctttattctcagtgacctttttgatattggagaattggcagctgttgagcttcttcttgctggagagcatcaacagccacattttcctggccttaccagaggattagtagctgttcttctgtactgggatggaaagcgatgcattgcgaattccttgaaagccttgatacagtctagacggggaaagacatggaccctagaactcagtccagagctggcttccatgacaacacgctttacagatgagctgatggagcaaggattgacttataaagttcttacgctggtgtcacagattgatgtgaataatgagtttgagaaactacagcgagagagaggtttgggcagtgaaaaacatcgcaaagaggtttctgatctcattaaggagtgcaggcagtctcttgcagaaagcctttttgcctgggcttgccagtcacctttaggcaaagaagacactctcctcctcattggacatttggaaagagtgacagttgaggctaatggctcactggatgcagtgaatctggctcttcttatggcgcttctatactgttttgatatcagttttatagagcaaagcacagaggaacgagatgatatgattcatcaacttccactgttgacagaaaaacagtacattgcaacaattcactctcgtcttcaggactcacagctttggaaactgcctgggctccaagccactgttagacttgcctgggcgctggcattgaggggaatatcccagctacctgatgtgacagctctggcagaattcacagaggcagatgaagcaatggcagaactcgcaattgctgacaacgttttcctgttcctcatggaatctgtagtggtatcagaatacttttatcaggaagaattttatattcgcagagtccataatctcatcacagatttccttgcacttatgccaatgaaggtgaaacagctgaggaatcgggcagatgaagatgctcgaatgattcacatgagtatgcagatgggtaatgaaccccccatttcacttagaagggacctggaacacttaatgcttttgattggcgagctatataaaaagaacccttttcatctggagcttgctctagaatattggtgtcccacagagcctcttcagactccgactatcatgggctcttatctaggggtggctcatcagcggccccctcaacgccaggttgtcttgtcaaagtttgttaggcaaatgggtgacctgttgcctccaactatttatattccttatttgaagatgctccagggattggccaatgggcctcagtgtgcccactactgtttcagcctgctcaaagtcaatggtagtagtcatgttgaaaatattcagggagcaggtggcagtcctgtttcctgggaacatttctttcactccttgatgctttaccacgaacaccttcggaaggatcttccaagtgcagatagtgtccagtaccgtcaccttccttcccgtggcatcacccagaaggagcaagatggattgattgcttttttgcagctcacgtctaccatcattacttggagtgaaaatgctcgcttggcnctctgtgaacaccctcagtggacccctgttgtggtgattctgggactcctccaatgcagtattccccctgtcctaaaagctgagctactgaagacactcgcagcttttggaaaatctcctgaaattgctgcttccctctggcagtcattggaatacactcagatactgcagaccgtgaggattccaagccaaaggcaagctattggtattgaggttgaactaaatgaaatagaatcccggtgtgaagaatacccattgactcgggccttttgccagcttattagtactctggtggagagctcatttccttctaatttgggtgctggacttgcggccccctggctttgacccttatttgcagttccttagagactctgtgtttctacgattccgtacaagagcttaccggagagcagctgaaaagtgggaagttgctgaggtggttttggaggtgttttataaattgctcagagattatgagcctcagcttgaagattttgtagaccagtttgtggaactacaaggagaagaaatcatagcctataagccacctggatttagtctgatgtatcatctgctgaatgagtcaccaatgttggagcttgctctcagtttactggaagaaggagttaagcagcttgacacctatgccccctttcctgggaaaaaacacctggagaaagcagtacagcattgccttgcacttctcaatcttactctgcaaaaggaaaatctttttatggaccttctaagagagagtcaactggctctaatagtctgtcctttagaacagcttttgcagggaattaatcccagaactaagaaggcagataatgtggtaaacattgccagatacctatatcatggcaatactaatccagaattggcttttgaaagtgccaagatcctctgttgtatctcttgcaactctaatattcagataaagttggttggagatttcacacatgaccagagtataagtcagaaactaatggctggatttgtggagtgtttggattgtgaagatgcagaagaatttgtacgtctggaagagggatcagaacttgaaaagaaattagttgcaattcgtcatgaaacaagaatccacatcttgaatcttctcattacctctctggaatgcaatccacccaatcttgctctctacctgttgggctttgaattgaaaaaacctgtcagtactacaaacctacaagatccaggagtgttaggttgccctcggacatgccttcacgccattctaaacatcttggagaaaggaacggaagggagaacaggcccagtggcggtgcgagaatctcctcagctggctgagctatgttaccaggtcatatatcagttatgtgcatgctctgatacatctggtcctactatgaggtacttgagaaccagccaggatttcttattttcccagttgcagtatctaccattttctaacaaagaatatgaaatatctatgctgaaccagatgtcatggcttatgaaaactgcctcaatagagctaagggtaacctctctgaatcgtcagcggtcacatacccagaggctcctacacctcttactggatgacatgccagtgaaaccatactcagatggtgaaggaggaatagaagatgaaaacaggtctgtttctgggttccttcactttgacactgctacaaaagtacgtcgaaaaattctaaatattcttgactcgattgacttcagtcaggagatccctgagcctttgcagttggatttttttgatcgggcccagattgaacaagttattgctaactgtgaacacaagaatttacggggacagacagtctgcaatgtcaagcttcttcatagggttcttgtagctgaagtaaatgcccttcagggtatggcagccataggacagagacctctactaatggaggaaatcagcactgtacttcagtatgtggtaggaagaaataaattgctgcagtgtcttcatgcaaaacgtcatgctctggagtcgtggaggcaactagtagaaattatactgacagcttgtccccaggacctcattcaggcagaggatcgacaactgattattcgtgatattttacaagatgtgcatgataagatactggatgatgaagctgcgcaagagttaatgcctgtggtcgccggggcagtgttcacactgactgctcacctaagccaggccgtcctcactgaacagaagcaaacatcagtcttgggaccagcagaggcccattacgcttttatgcttgatagttgcttcacctcacctcctcctgaagagaacccattagtgggttttgcttctattggagattcttcactttacatcatattgaagaaactgttagacttcattttgaagacaggtggtggattccaacgagtgaggactcacttgtatggctctctgctttattacttacagattgcccagagacctgatgaaccagacaccttagaagcagccaagaaaaccatgtgggaaaggctgacagcccctgaagatgtatttagcaaattacagcgagaaaacatagccattattgaaagttatggcgccgccctcatggaagtggtctgtcgagatgcttgtgatggtcatgagattggaaggatgctggccctggctctacttgatagaattgtctccgtggataaacagcagcagtggcttttgtatctttctaacagtggctacttgaaggtcctcgtagacagcttggtagaagatgaccgtactttgcagagcttactcaccccacagcctccccttttaaaagcactttatacttatgaatctaaaatggcatttctcacaagagtggcaaagatacagcagggtgcattagagctgctaagatcaggggtgattgtgagactagctcaatgccaagtctatgacatgcgcccagaaacggacccgcagagcatgtttggcatgagagaccctccaatgttcatccctaccccagtggatcgctaccgccagattctcctcccagctctccagctgtgccaggtcatcctcacatctagtatggcccagcacttgcaggcagcagggcaggtattgcagtttcttatttcacattctgataccatacaagcaattctgcgctgtcaggatgttagtgctgggtctttgcaggaattggctctgctgacaggaattataagtaaagcagcacttcctggaatattaagtgaacttgacgttgatgtaaatgaagggtctctaatggagctacagggacatattggaagattccagcgccagtgcttaggactactaagtcgctttggtggctctgacagactgcgtcagtttaaatttcaagacgataatgtggagggagataaagtaagcaagaaagatgagattgaactggctatgcagcagatttgtgccaatgtaatggaatattgccagtcactcatgttacagagttcccctaccttccagcatgctgtgtgtctcttcactcctagcctttcagaaacagttaatagagatggaccgcggcaagatacccaagctccagtggttccatactggcgcctgcctggtttaggcattatcatctacctgctgaaacagagtgctaatgatttcttcagctattatgacagtcatcgacagagtgtcagcaagctacaaaatgtagagcagcttcccccagatgagataaaagagttgtgtcagtctgtgatgcctgctggtgttgataaaatctccactgctcagaaatatgttctagcaagacggcgcttggtgaaggtgatcaacaatcgagctaaactgctttccctttgttcttttatcatagagacctgcctatttattctttggcgccatctggagtactacttgttacattgcatgcccacggattctcaagattccttatttgcctcgagaaccttgtttaaaagcagaagactgcaagattccttcgcctcagaaaccaatctagattttagaagtgggctggctatagtgagccaacatgatttagaccagcttcaggctgatgcaatcaacgcttttggagaatcactacaaaagaaacttctggacattgaaggattatattcaaaagttcgatctcgatatagtttcatacaggctcttgtcagacgtatccgtggcctctaaactagaggccacggacaaatacaaagattgcttagtgggattaagattccaccattcccagactgttaagacattttcacaaaacagaccagcagcagctaggacatttcaacagattcggtgctattctgcacctgttgctgctgagccctttctcagtgggactagttcgaactatgtggaggagatgtactgtgcttggctggaaaaccccaaaagtgtacataagtcatgggacattttttttcgcaacacgaatgccggagccccaccgggcactgcctaccagagtccccttcccctgagccgaggctccctggctgctgtggcccatgcacagtccctggtagaagcacagcccaacgtggacaagctcgtggaggaccacctggcagtgcagtcgctcatcagggcatatcagatacgagggcaccatgtagcacagctggaccccctggggattttggatgctgatctggactcctccgtgcccgctgacattatctcatccacagacaaacttgggttctatggcctggatgagtctgacctcgacaaggtcttccacttgcccaccaccactttcatcgggggacaggaatcagcacttcctctgcgggagatcatccgtcggctggagatggcctactgccagcatattggggtggagttcatgttcatcaatgacctggagcagtgccagtggatccggcagaagtttgagacccctgggatcatgcagttcacaaatgaggagaaacggaccctgctggccaggcttgtgcggtccaccaggtatgggtctggccctgggccatggggcagacattcccagggaagcagtgaccctgtctgtgttgatcgggcctgtgtgcagcctgttggccgaggtgagagggggtttggggtggtacaggcaaagctccatctgcacatgtgtgaagagacaccagacaagtagagtcagccttcagagcaacctccgcctcctgaattcaagtgattctcttgcctcagcctcctgagtagcagggattacagaggcacaccaccacggctggctaatttt

SEQ ID NO: 453318 - DNA, 6262 bp, Homo sapiens
  misc_feature (1880)..(1880): n is a, c, g, or t
cagaagggctctgttagtgcgcctctaagatggcgacgcctttggcggtaaattcggctgctagtctatggggtccttacaaagacatttggcataaagtgggaaatgctctttggagaagacaacctgaagctgttcaccttcttgataagattttgaagaaacacaaacctgacttcatctcattgttcaaaaatccgccaaaaaatgttcaacagcatgagaaggttcagaaagccagtacagagggagtcgccattcagggtcaacagggaactcgacttcttcctgaacagctcattaaagaagcctttattctcagtgacctttttgatattggagaattggcagctgttgagcttcttcttgctggagagcatcaacagccacattttcctggccttaccagaggattagtagctgttcttctgtactgggatggaaagcgatgcattgcgaattccttgaaagccttgatacagtctagacggggaaagacatggaccctagaactcagtccagagctggcttccatgacaacacgctttacagatgagctgatggagcaaggattgacttataaagttcttacgctggtgtcacagattgatgtgaataatgagtttgagaaactacagcgagagagaggtttgggcagtgaaaaacatcgcaaagaggtttctgatctcattaaggagtgcaggcagtctcttgcagaaagcctttttgcctgggcttgccagtcacctttaggcaaagaagacactctcctcctcattggacatttggaaagagtgacagttgaggctaatggctcactggatgcagtgaatctggctcttcttatggcgcttctatactgttttgatatcagttttatagagcaaagcacagaggaacgagatgatatgattcatcaacttccactgttgacagaaaaacagtacattgcaacaattcactctcgtcttcaggactcacagctttggaaactgcctgggctccaagccactgttagacttgcctgggcgctggcattgaggggaatatcccagctacctgatgtgacagctctggcagaattcacagaggcagatgaagcaatggcagaactcgcaattgctgacaacgttttcctgttcctcatggaatctgtagtggtatcagaatacttttatcaggaagaattttatattcgcagagtccataatctcatcacagatttccttgcacttatgccaatgaaggtgaaacagctgaggaatcgggcagatgaagatgctcgaatgattcacatgagtatgcagatgggtaatgaaccccccatttcacttagaagggacctggaacacttaatgcttttgattggcgagctatataaaaagaacccttttcatctggagcttgctctagaatattggtgtcccacagagcctcttcagactccgactatcatgggctcttatctaggggtggctcatcagcggccccctcaacgccaggttgtcttgtcaaagtttgttaggcaaatgggtgacctgttgcctccaactatttatattccttatttgaagatgctccagggattggccaatgggcctcagtgtgcccactactgtttcagcctgctcaaagtcaatggtagtagtcatgttgaaaatattcagggagcaggtggcagtcctgtttcctgggaacatttctttcactccttgatgctttaccacgaacaccttcggaaggatcttccaagtgcagatagtgtccagtaccgtcaccttccttcccgtggcatcacccagaaggagcaagatggattgattgcttttttgcagctcacgtctaccatcattacttggagtgaaaatgctcgcttggcnctctgtgaacaccctcagtggacccctgttgtggtgattctgggactcctccaatgcagtattccccctgtcctaaaagctgagctactgaagacactcgcagcttttggaaaatctcctgaaattgctgcttccctctggcagtcattggaatacactcagatactgcagaccgtgaggattccaagccaaaggcaagctattggtattgaggttgaactaaatgaaatagaatcccggtgtgaagaatacccattgactcgggccttttgccagcttattagtactctggtggagagctcatttccttctaatttgggtgctggacttgcggccccctggctttgacccttatttgcagttccttagagactctgtgtttctacgattccgtacaagagcttaccggagagcagctgaaaagtgggaagttgctgaggtggttttggaggtgttttataaattgctcagagattatgagcctcagcttgaagattttgtagaccagtttgtggaactacaaggagaagaaatcatagcctataagccacctggatttagtctgatgtatcatctgctgaatgagtcaccaatgttggagcttgctctcagtttactggaagaaggagttaagcagcttgacacctatgccccctttcctgggaaaaaacacctggagaaagcagtacagcattgccttgcacttctcaatcttactctgcaaaaggaaaatctttttatggaccttctaagagagagtcaactggctctaatagtctgtcctttagaacagcttttgcagggaattaatcccagaactaagaaggcagataatgtggtaaacattgccagatacctatatcatggcaatactaatccagaattggcttttgaaagtgccaagatcctctgttgtatctcttgcaactctaatattcagataaagttggttggagatttcacacatgaccagagtataagtcagaaactaatggctggatttgtggagtgtttggattgtgaagatgcagaagaatttgtacgtctggaagagggatcagaacttgaaaagaaattagttgcaattcgtcatgaaacaagaatccacatcttgaatcttctcattacctctctggaatgcaatccacccaatcttgctctctacctgttgggctttgaattgaaaaaacctgtcagtactacaaacctacaagatccaggagtgttaggttgccctcggacatgccttcacgccattctaaacatcttggagaaaggaacggaagggagaacaggcccagtggcggtgcgagaatctcctcagctggctgagctatgttaccaggtcatatatcagttatgtgcatgctctgatacatctggtcctactatgaggtacttgagaaccagccaggatttcttattttcccagttgcagtatctaccattttctaacaaagaatatgaaatatctatgctgaaccagatgtcatggcttatgaaaactgcctcaatagagctaagggtaacctctctgaatcgtcagcggtcacatacccagaggctcctacacctcttactggatgacatgccagtgaaaccatactcagatggtgaaggaggaatagaagatgaaaacaggtctgtttctgggttccttcactttgacactgctacaaaagtacgtcgaaaaattctaaatattcttgactcgattgacttcagtcaggagatccctgagcctttgcagttggatttttttgatcgggcccagattgaacaagttattgctaactgtgaacacaagaatttacggggacagacagtctgcaatgtcaagcttcttcatagggttcttgtagctgaagtaaatgcccttcagggtatggcagccataggacagagacctctactaatggaggaaatcagcactgtacttcagtatgtggtaggaagaaataaattgctgcagtgtcttcatgcaaaacgtcatgctctggagtcgtggaggcaactagtagaaattatactgacagcttgtccccaggacctcattcaggcagaggatcgacaactgattattcgtgatattttacaagatgtgcatgataagatactggatgatgaagctgcgcaagagttaatgcctgtggtcgccggggcagtgttcacactgactgctcacctaagccaggccgtcctcactgaacagaagcaaacatcagtcttgggaccagcagaggcccattacgcttttatgcttgatagttgcttcacctcacctcctcctgaagagaacccattagtgggttttgcttctattggagattcttcactttacatcatattgaagaaactgttagacttcattttgaagacaggtggtggattccaacgagtgaggactcacttgtatggctctctgctttattacttacagattgcccagagacctgatgaaccagacaccttagaagcagccaagaaaaccatgtgggaaaggctgacagcccctgaagatgtatttagcaaattacagcgagaaaacatagccattattgaaagttatggcgccgccctcatggaagtggtctgtcgagatgcttgtgatggtcatgagattggaaggatgctggccctggctctacttgatagaattgtctccgtggataaacagcagcagtggcttttgtatctttctaacagtggctacttgaaggtcctcgtagacagcttggtagaagatgaccgtactttgcagagcttactcaccccacagcctccccttttaaaagcactttatacttatgaatctaaaatggcatttctcacaagagtggcaaagatacagcagggtgcattagagctgctaagatcaggggtgattgtgagactagctcaatgccaagtctatgacatgcgcccagaaacggacccgcagagcatgtttggcatgagagaccctccaatgttcatccctaccccagtggatcgctaccgccagattctcctcccagctctccagctgtgccaggtcatcctcacatctagtatggcccagcacttgcaggcagcagggcaggtattgcagtttcttatttcacattctgataccatacaagcaattctgcgctgtcaggatgttagtgctgggtctttgcaggaattggctctgctgacaggaattataagtaaagcagcacttcctggaatattaagtgaacttgacgttgatgtaaatgaagggtctctaatggagctacagggacatattggaagattccagcgccagtgcttaggactactaagtcgctttggtggctctgacagactgcgtcagtttaaatttcaagacgataatgtggagggagataaagtaagcaagaaagatgagattgaactggctatgcagcagatttgtgccaatgtaatggaatattgccagtcactcatgttacagagttcccctaccttccagcatgctgtgtgtctcttcactcctagcctttcagaaacagttaatagagatggaccgcggcaagatacccaagctccagtggttccatactggcgcctgcctggtttaggcattatcatctacctgctgaaacagagtgctaatgatttcttcagctattatgacagtcatcgacagagtgtcagcaagctacaaaatgtagagcagcttcccccagatgagataaaagagttgtgtcagtctgtgatgcctgctggtgttgataaaatctccactgctcagaaatatgttctagcaagacggcgcttggtgaaggtgatcaacaatcgagctaaactgctttccctttgttcttttatcatagagacctgcctatttattctttggcgccatctggagtactacttgttacattgcatgcccacggattctcaagattccttatttgcctcgagaaccttgtttaaaagcagaagactgcaagattccttcgcctcagaaaccaatctagattttagaagtgggctggctatagtgagccaacatgatttagaccagcttcaggctgatgcaatcaacgcttttggagaatcactacaaaagaaacttctggacattgaaggattatattcaaaagttcgatctcgatatagtttcatacaggctcttgtcagacgtatccgtggcctctatgatttagaggccacggaggatcactttgtgaggcttgccaatgcattgcctttgtttttctgaccagatgcagataaggctactcgtattccaggaactgtttgtgatagaacagcaagtacccttcgctgtccaggacgtacttgatgctggccttggtgatgatggaatcgtcacacttgaaccactggtctatgtgctgccggataaa

SEQ ID NO: 453319 - DNA, 6279 bp, Homo sapiens
  misc_feature (1880)..(1880): n is a, c, g, or t
cagaagggctctgttagtgcgcctctaagatggcgacgcctttggcggtaaattcggctgctagtctatggggtccttacaaagacatttggcataaagtgggaaatgctctttggagaagacaacctgaagctgttcaccttcttgataagattttgaagaaacacaaacctgacttcatctcattgttcaaaaatccgccaaaaaatgttcaacagcatgagaaggttcagaaagccagtacagagggagtcgccattcagggtcaacagggaactcgacttcttcctgaacagctcattaaagaagcctttattctcagtgacctttttgatattggagaattggcagctgttgagcttcttcttgctggagagcatcaacagccacattttcctggccttaccagaggattagtagctgttcttctgtactgggatggaaagcgatgcattgcgaattccttgaaagccttgatacagtctagacggggaaagacatggaccctagaactcagtccagagctggcttccatgacaacacgctttacagatgagctgatggagcaaggattgacttataaagttcttacgctggtgtcacagattgatgtgaataatgagtttgagaaactacagcgagagagaggtttgggcagtgaaaaacatcgcaaagaggtttctgatctcattaaggagtgcaggcagtctcttgcagaaagcctttttgcctgggcttgccagtcacctttaggcaaagaagacactctcctcctcattggacatttggaaagagtgacagttgaggctaatggctcactggatgcagtgaatctggctcttcttatggcgcttctatactgttttgatatcagttttatagagcaaagcacagaggaacgagatgatatgattcatcaacttccactgttgacagaaaaacagtacattgcaacaattcactctcgtcttcaggactcacagctttggaaactgcctgggctccaagccactgttagacttgcctgggcgctggcattgaggggaatatcccagctacctgatgtgacagctctggcagaattcacagaggcagatgaagcaatggcagaactcgcaattgctgacaacgttttcctgttcctcatggaatctgtagtggtatcagaatacttttatcaggaagaattttatattcgcagagtccataatctcatcacagatttccttgcacttatgccaatgaaggtgaaacagctgaggaatcgggcagatgaagatgctcgaatgattcacatgagtatgcagatgggtaatgaaccccccatttcacttagaagggacctggaacacttaatgcttttgattggcgagctatataaaaagaacccttttcatctggagcttgctctagaatattggtgtcccacagagcctcttcagactccgactatcatgggctcttatctaggggtggctcatcagcggccccctcaacgccaggttgtcttgtcaaagtttgttaggcaaatgggtgacctgttgcctccaactatttatattccttatttgaagatgctccagggattggccaatgggcctcagtgtgcccactactgtttcagcctgctcaaagtcaatggtagtagtcatgttgaaaatattcagggagcaggtggcagtcctgtttcctgggaacatttctttcactccttgatgctttaccacgaacaccttcggaaggatcttccaagtgcagatagtgtccagtaccgtcaccttccttcccgtggcatcacccagaaggagcaagatggattgattgcttttttgcagctcacgtctaccatcattacttggagtgaaaatgctcgcttggcnctctgtgaacaccctcagtggacccctgttgtggtgattctgggactcctccaatgcagtattccccctgtcctaaaagctgagctactgaagacactcgcagcttttggaaaatctcctgaaattgctgcttccctctggcagtcattggaatacactcagatactgcagaccgtgaggattccaagccaaaggcaagctattggtattgaggttgaactaaatgaaatagaatcccggtgtgaagaatacccattgactcgggccttttgccagcttattagtactctggtggagagctcatttccttctaatttgggtgctggacttgcggccccctggctttgacccttatttgcagttccttagagactctgtgtttctacgattccgtacaagagcttaccggagagcagctgaaaagtgggaagttgctgaggtggttttggaggtgttttataaattgctcagagattatgagcctcagcttgaagattttgtagaccagtttgtggaactacaaggagaagaaatcatagcctataagccacctggatttagtctgatgtatcatctgctgaatgagtcaccaatgttggagcttgctctcagtttactggaagaaggagttaagcagcttgacacctatgccccctttcctgggaaaaaacacctggagaaagcagtacagcattgccttgcacttctcaatcttactctgcaaaaggaaaatctttttatggaccttctaagagagagtcaactggctctaatagtctgtcctttagaacagcttttgcagggaattaatcccagaactaagaaggcagataatgtggtaaacattgccagatacctatatcatggcaatactaatccagaattggcttttgaaagtgccaagatcctctgttgtatctcttgcaactctaatattcagataaagttggttggagatttcacacatgaccagagtataagtcagaaactaatggctggatttgtggagtgtttggattgtgaagatgcagaagaatttgtacgtctggaagagggatcagaacttgaaaagaaattagttgcaattcgtcatgaaacaagaatccacatcttgaatcttctcattacctctctggaatgcaatccacccaatcttgctctctacctgttgggctttgaattgaaaaaacctgtcagtactacaaacctacaagatccaggagtgttaggttgccctcggacatgccttcacgccattctaaacatcttggagaaaggaacggaagggagaacaggcccagtggcggtgcgagaatctcctcagctggctgagctatgttaccaggtcatatatcagttatgtgcatgctctgatacatctggtcctactatgaggtacttgagaaccagccaggatttcttattttcccagttgcagtatctaccattttctaacaaagaatatgaaatatctatgctgaaccagatgtcatggcttatgaaaactgcctcaatagagctaagggtaacctctctgaatcgtcagcggtcacatacccagaggctcctacacctcttactggatgacatgccagtgaaaccatactcagatggtgaaggaggaatagaagatgaaaacaggtctgtttctgggttccttcactttgacactgctacaaaagtacgtcgaaaaattctaaatattcttgactcgattgacttcagtcaggagatccctgagcctttgcagttggatttttttgatcgggcccagattgaacaagttattgctaactgtgaacacaagaatttacggggacagacagtctgcaatgtcaagcttcttcatagggttcttgtagctgaagtaaatgcccttcagggtatggcagccataggacagagacctctactaatggaggaaatcagcactgtacttcagtatgtggtaggaagaaataaattgctgcagtgtcttcatgcaaaacgtcatgctctggagtcgtggaggcaactagtagaaattatactgacagcttgtccccaggacctcattcaggcagaggatcgacaactgattattcgtgatattttacaagatgtgcatgataagatactggatgatgaagctgcgcaagagttaatgcctgtggtcgccggggcagtgttcacactgactgctcacctaagccaggccgtcctcactgaacagaagcaaacatcagtcttgggaccagcagaggcccattacgcttttatgcttgatagttgcttcacctcacctcctcctgaagagaacccattagtgggttttgcttctattggagattcttcactttacatcatattgaagaaactgttagacttcattttgaagacaggtggtggattccaacgagtgaggactcacttgtatggctctctgctttattacttacagattgcccagagacctgatgaaccagacaccttagaagcagccaagaaaaccatgtgggaaaggctgacagcccctgaagatgtatttagcaaattacagcgagaaaacatagccattattgaaagttatggcgccgccctcatggaagtggtctgtcgagatgcttgtgatggtcatgagattggaaggatgctggccctggctctacttgatagaattgtctccgtggataaacagcagcagtggcttttgtatctttctaacagtggctacttgaaggtcctcgtagacagcttggtagaagatgaccgtactttgcagagcttactcaccccacagcctccccttttaaaagcactttatacttatgaatctaaaatggcatttctcacaagagtggcaaagatacagcagggtgcattagagctgctaagatcaggggtgattgtgagactagctcaatgccaagtctatgacatgcgcccagaaacggacccgcagagcatgtttggcatgagagaccctccaatgttcatccctaccccagtggatcgctaccgccagattctcctcccagctctccagctgtgccaggtcatcctcacatctagtatggcccagcacttgcaggcagcagggcaggtattgcagtttcttatttcacattctgataccatacaagcaattctgcgctgtcaggatgttagtgctgggtctttgcaggaattggctctgctgacaggaattataagtaaagcagcacttcctggaatattaagtgaacttgacgttgatgtaaatgaagggtctctaatggagctacagggacatattggaagattccagcgccagtgcttaggactactaagtcgctttggtggctctgacagactgcgtcagtttaaatttcaagacgataatgtggagggagataaagtaagcaagaaagatgagattgaactggctatgcagcagatttgtgccaatgtaatggaatattgccagtcactcatgttacagagttcccctaccttccagcatgctgtgtgtctcttcactcctagcctttcagaaacagttaatagagatggaccgcggcaagatacccaagctccagtggttccatactggcgcctgcctggtttaggcattatcatctacctgctgaaacagagtgctaatgatttcttcagctattatgacagtcatcgacagagtgtcagcaagctacaaaatgtagagcagcttcccccagatgagataaaagagttgtgtcagtctgtgatgcctgctggtgttgataaaatctccactgctcagaaatatgttctagcaagacggcgcttggtgaaggtgatcaacaatcgagctaaactgctttccctttgttcttggggctgatccagctctagaagaatggaggaggtctgctattatgctgattcttattgctggagtgggcctctgtgactgatggccatatattggatcccttaggtggaaggaaatagagaaaagctgagaaccctgattccttcgcctcagaaaccaatctagattttagaagtgggctggctatagtgagccaacatgatttagaccagcttcaggctgatgcaatcaacgcttttggagaatcactacaaaagaaacttctggacattgaaggattatattcaaaagttcgatctcgatatagtttcatacaggctcttgtcagacgtatccgtggcctcttgaggatatcaaggaactgagagcccgtgcttatgctcttctatgagagagatgaattggggagaattgtctccattttatagattagtttctttctaaattatgaccaaaaatattttgctatttctttctttgtatatggacatcttttctgtaaacttcttcccctagttccatcctcactagtaaaaaataaatactttttaaaaaaacaaaaaaaat

SEQ ID NO: 453320 - DNA, 5775 bp, Homo sapiens
  misc_feature (1880)..(1880): n is a, c, g, or t
cagaagggctctgttagtgcgcctctaagatggcgacgcctttggcggtaaattcggctgctagtctatggggtccttacaaagacatttggcataaagtgggaaatgctctttggagaagacaacctgaagctgttcaccttcttgataagattttgaagaaacacaaacctgacttcatctcattgttcaaaaatccgccaaaaaatgttcaacagcatgagaaggttcagaaagccagtacagagggagtcgccattcagggtcaacagggaactcgacttcttcctgaacagctcattaaagaagcctttattctcagtgacctttttgatattggagaattggcagctgttgagcttcttcttgctggagagcatcaacagccacattttcctggccttaccagaggattagtagctgttcttctgtactgggatggaaagcgatgcattgcgaattccttgaaagccttgatacagtctagacggggaaagacatggaccctagaactcagtccagagctggcttccatgacaacacgctttacagatgagctgatggagcaaggattgacttataaagttcttacgctggtgtcacagattgatgtgaataatgagtttgagaaactacagcgagagagaggtttgggcagtgaaaaacatcgcaaagaggtttctgatctcattaaggagtgcaggcagtctcttgcagaaagcctttttgcctgggcttgccagtcacctttaggcaaagaagacactctcctcctcattggacatttggaaagagtgacagttgaggctaatggctcactggatgcagtgaatctggctcttcttatggcgcttctatactgttttgatatcagttttatagagcaaagcacagaggaacgagatgatatgattcatcaacttccactgttgacagaaaaacagtacattgcaacaattcactctcgtcttcaggactcacagctttggaaactgcctgggctccaagccactgttagacttgcctgggcgctggcattgaggggaatatcccagctacctgatgtgacagctctggcagaattcacagaggcagatgaagcaatggcagaactcgcaattgctgacaacgttttcctgttcctcatggaatctgtagtggtatcagaatacttttatcaggaagaattttatattcgcagagtccataatctcatcacagatttccttgcacttatgccaatgaaggtgaaacagctgaggaatcgggcagatgaagatgctcgaatgattcacatgagtatgcagatgggtaatgaaccccccatttcacttagaagggacctggaacacttaatgcttttgattggcgagctatataaaaagaacccttttcatctggagcttgctctagaatattggtgtcccacagagcctcttcagactccgactatcatgggctcttatctaggggtggctcatcagcggccccctcaacgccaggttgtcttgtcaaagtttgttaggcaaatgggtgacctgttgcctccaactatttatattccttatttgaagatgctccagggattggccaatgggcctcagtgtgcccactactgtttcagcctgctcaaagtcaatggtagtagtcatgttgaaaatattcagggagcaggtggcagtcctgtttcctgggaacatttctttcactccttgatgctttaccacgaacaccttcggaaggatcttccaagtgcagatagtgtccagtaccgtcaccttccttcccgtggcatcacccagaaggagcaagatggattgattgcttttttgcagctcacgtctaccatcattacttggagtgaaaatgctcgcttggcnctctgtgaacaccctcagtggacccctgttgtggtgattctgggactcctccaatgcagtattccccctgtcctaaaagctgagctactgaagacactcgcagcttttggaaaatctcctgaaattgctgcttccctctggcagtcattggaatacactcagatactgcagaccgtgaggattccaagccaaaggcaagctattggtattgaggttgaactaaatgaaatagaatcccggtgtgaagaatacccattgactcgggccttttgccagcttattagtactctggtggagagctcatttccttctaatttgggtgctggacttgcggccccctggctttgacccttatttgcagttccttagagactctgtgtttctacgattccgtacaagagcttaccggagagcagctgaaaagtgggaagttgctgaggtggttttggaggtgttttataaattgctcagagattatgagcctcagcttgaagattttgtagaccagtttgtggaactacaaggagaagaaatcatagcctataagccacctggatttagtctgatgtatcatctgctgaatgagtcaccaatgttggagcttgctctcagtttactggaagaaggagttaagcagcttgacacctatgccccctttcctgggaaaaaacacctggagaaagcagtacagcattgccttgcacttctcaatcttactctgcaaaaggaaaatctttttatggaccttctaagagagagtcaactggctctaatagtctgtcctttagaacagcttttgcagggaattaatcccagaactaagaaggcagataatgtggtaaacattgccagatacctatatcatggcaatactaatccagaattggcttttgaaagtgccaagatcctctgttgtatctcttgcaactctaatattcagataaagttggttggagatttcacacatgaccagagtataagtcagaaactaatggctggatttgtggagtgtttggattgtgaagatgcagaagaatttgtacgtctggaagagggatcagaacttgaaaagaaattagttgcaattcgtcatgaaacaagaatccacatcttgaatcttctcattacctctctggaatgcaatccacccaatcttgctctctacctgttgggctttgaattgaaaaaacctgtcagtactacaaacctacaagatccaggagtgttaggttgccctcggacatgccttcacgccattctaaacatcttggagaaaggaacggaagggagaacaggcccagtggcggtgcgagaatctcctcagctggctgagctatgttaccaggtcatatatcagttatgtgcatgctctgatacatctggtcctactatgaggtacttgagaaccagccaggatttcttattttcccagttgcagtatctaccattttctaacaaagaatatgaaatatctatgctgaaccagatgtcatggcttatgaaaactgcctcaatagagctaagggtaacctctctgaatcgtcagcggtcacatacccagaggctcctacacctcttactggatgacatgccagtgaaaccatactcagatggtgaaggaggaatagaagatgaaaacaggtctgtttctgggttccttcactttgacactgctacaaaagtacgtcgaaaaattctaaatattcttgactcgattgacttcagtcaggagatccctgagcctttgcagttggatttttttgatcgggcccagattgaacaagttattgctaactgtgaacacaagaatttacggggacagacagtctgcaatgtcaagcttcttcatagggttcttgtagctgaagtaaatgcccttcagggtatggcagccataggacagagacctctactaatggaggaaatcagcactgtacttcagtatgtggtaggaagaaataaattgctgcagtgtcttcatgcaaaacgtcatgctctggagtcgtggaggcaactagtagaaattatactgacagcttgtccccaggacctcattcaggcagaggatcgacaactgattattcgtgatattttacaagatgtgcatgataagatactggatgatgaagctgcgcaagagttaatgcctgtggtcgccggggcagtgttcacactgactgctcacctaagccaggccgtcctcactgaacagaagcaaacatcagtcttgggaccagcagaggcccattacgcttttatgcttgatagttgcttcacctcacctcctcctgaagagaacccattagtgggttttgcttctattggagattcttcactttacatcatattgaagaaactgttagacttcattttgaagacaggtggtggattccaacgagtgaggactcacttgtatggctctctgctttattacttacagattgcccagagacctgatgaaccagacaccttagaagcagccaagaaaaccatgtgggaaaggctgacagcccctgaagatgtatttagcaaattacagcgagaaaacatagccattattgaaagttatggcgccgccctcatggaagtggtctgtcgagatgcttgtgatggtcatgagattggaaggatgctggccctggctctacttgatagaattgtctccgtggataaacagcagcagtggcttttgtatctttctaacagtggctacttgaaggtcctcgtagacagcttggtagaagatgaccgtactttgcagagcttactcaccccacagcctccccttttaaaagcactttatacttatgaatctaaaatggcatttctcacaagagtggcaaagatacagcagggtgcattagagctgctaagatcaggggtgattgtgagactagctcaatgccaagtctatgacatgcgcccagaaacggacccgcagagcatgtttggcatgagagaccctccaatgttcatccctaccccagtggatcgctaccgccagattctcctcccagctctccagctgtgccaggtcatcctcacatctagtatggcccagcacttgcaggcagcagggcaggtattgcagtttcttatttcacattctgataccatacaagcaattctgcgctgtcaggatgttagtgctgggtctttgcaggaattggctctgctgacaggaattataagtaaagcagcacttcctggaatattaagtgaacttgacgttgatgtaaatgaagggtctctaatggagctacagggacatattggaagattccagcgccagtgcttaggactactaagtcgctttggtggctctgacagactgcgtcagtttaaatttcaagacgataatgtggagggagataaagtaagcaagaaagatgagattgaactggctatgcagcagatttgtgccaatgtaatggaatattgccagtcactcatgttacagagttcccctaccttccagcatgctgtgtgtctcttcactcctagcctttcagaaacagttaatagagatggaccgcggcaagatacccaagctccagtggttccatactggcgcctgcctggtttaggcattatcatctacctgctgaaacagagtgctaatgatttcttcagctattatgacagtcatcgacagagtgtcagcaagctacaaaatgtagagcagcttcccccagatgagataaaagagttgtgtcagtctgtgatgcctgctggtgttgataaaatctccactgctcagaaatatgttctagcaagacggcgcttggtgaaggtgatcaacaatcgagctaaactgctttccctttgttcttatagagacctgcctattattctttggcgccatcagagagagctgcagggatcctctaagcgc

SEQ ID NO: 453321 - DNA, 290 bp, Homo sapiens
ccgctcatgtacaagcagatccgcaagcagaagcctgtgttacagaagtacgctgagctgctggtgtcgcagggtgtggtcaaccagcctgagtatgaggtacgtccctgcggctctatcccagtgcgcctttccagggctggcgatgactagaaaaggtgggccacagggccagttctcacttttgccagttatgaggatacacgtgagaggatgtgaaatatttacaactacagcatttcaatgcataactttttggagaatctgggccactgagatgctttataaag

SEQ ID NO: 453322 - DNA, 2960 bp, Homo sapiens
ggctgctgcactgacggcgggtgcccgcgcctcagagttactgatttattcttgagattcctctactctcgttatctgacctcatggatgaacttcaggatgttcagctcacagagatcaaaccacttctaaatgataagaatggtacaagaaacttccaggactttgactgtcaggaacatgatatagaaacaactcatggtgtggtccacgtcactataagaggcttacccaaaggaaacagaccagttatactaacatatcatgacattggcctcaaccataaatcctgtttcaatgcattctttaactttgaggatatgcaagagatcacccagcactttgctgtctgtcatgtggatgccccaggccagcaggaaggtgcaccctctttcccaacagggtatcagtaccccacaatggatgagctggctgaaatgctgcctcctgttcttacccacctaagcctgaaaagcatcattggaattggagttggagctggagcttacatcctcagcagatttgcactcaaccatccagagcttgtggaaggccttgtgctcattaatgttgacccttgcgctaaaggctggattgactgggcagcttccaaactctctggcctgacaaccaatgttgtggacattattttggctcatcactttgggcaggaagagttacaggccaacctggacctgatccaaacctacagaatgcatattgcccaagacatcaaccaagacaacctgcagctcttcttgaattcctacaatggacgcagagacctggagatcgaaagacccatactgggccaaaatgataacaaatcaaaaacattaaagtgttctactttactggtggtaggggacaattcgcctgcagttgaggctgtggtcgaatgcaattcccgcctgaaccctataaatacaactttgctaaagatggcggactgtgggggactgccccaggtagttcagcctgggaagctcaccgaggccttcaagtactttttgcagggaatgggctacataccatctgccagcatgactcggctcgcccgatcacgaacccactcaacctcgagtagcctcggctctggagaaagtcccttcagccggtctgtcaccagcaatcagtcagatggaactcaagaatcctgtgagtcccctgatgtcctggacagacaccagaccatggaggtgtcctgctaagcagatgctcctcccctggaccattgcaagtccatccttcaaatgaccactccataatataacatttcatccagtaaactggcctctactatctttaactcatgcatggccactgaacctctctctagtagcctggatttatcattctctctgcctgcccacccccttttttgtatagcccaagaaccacttccatgccatactgtaacattccaacatctttagctgatcagatctctccatatcctctcttgccagctttttcccgtgctcccccaactatgtatcagataagattctttgatcccgactctgtgtgtgcgagcacgcgtgtctgtgtttgtgtgtgcatagttctgtggttttagacacgctttcttgtagtgcttctgcaaaaaacaaaaaagggacttattttgcattctcaatggtgtttttaagggaattaggcagaacagatttctaggttgggtaggccactgcattctcttttgtttgcaaattggtcaacaaaatttgcaaagtgatttcaggagagagcagctttgaggaatgtggaaaatcataattgccgtctggaccattgattgattgtgaccagtagcagaagggtgcctgttacatagagaggctccttctgtccaaatgaatttctgtatactcttctataaataaaagggaggaatatattctgctggaagcccatgaaccatcgctgaggttctgatacaacatagagttttttccaaggagtgaatgtggtttaattactggactctcttagcacaggaaggtggaaacaaaatgccaggcctctgctctgaagagcaaaactgctgtcgctgcagtatctgataccagacatccacatatccacaagaagtgcctcttaggtctgtgacagagagtgtgtctccattcctcagttcccagaaaggggagaggtttggcctaaaaagcatgtagatgggggagaaatgggtggggggagaggaacagccattaacacagtatcatgtttaacaagtatagccttgatttcagtagatgtaatggaagccaaattaaattgatacagaacccatttctcagagtctttttttttttttgagacagagtctcgctgttacccaggctggagtgcaatggcgcaaacttggctcactgcaacctctgccccctgggttcaagcgattctcctgcctcagcctcccgagtagctgagactacaggcacctgccaccatacccagctaagttatgtatttttagtagagatggagtttcaccatgttggccaggctggtctcaaactcctgacctcaggtgatccacctgcctcagcctcccaaagtgctgggattacaggcatgagtcattgctcccagccattagaaagattgttaatcctatgaactcccttttgtaggagagaaagggccaatctgtaggggtagccctgtccaggtaaagttgttttcagcctcatgtctactgttaggtgagggagtcacagccagacagagagtattgctggagggtgagagaattgtggagaccaactaccacatagcaagagcccagctcttgggagcattgagatgtaagctcagggttacacagttccaaatcttgggaaggggcttttcagacagactgtttgctttctgctgagataaggaatgcatcactctgccagagtatgactttttacagattattaaataaagctgcatatgtctcattgtta

SEQ ID NO: 453323 - DNA, 2516 bp, Homo sapiens
ggctgctgcactgacggcgggtgcccgcgcctcagagttactgatttattcttgagattcctctactctcgttatctgacctcatggatgaacttcaggatgttcagctcacagagatcaaaccacttctaaatgataaggaacatgatatagaaacaactcatggtgtggtccacgtcactataagaggcttacccaaaggaaacagaccagttatactaacatatcatgacattggcctcaaccataaatcctgtttcaatgcattctttaactttgaggatatgcaagagatcacccagcactttgctgtctgtcatgtggatgccccaggccagcaggaaggtgcaccctctttcccaacagggtatcagtaccccacaatggatgagctggctgaaatgctgcctcctgttcttacccacctaagcctgaaaagcatcattggaattggagttggagctggagcttacatcctcagcagatttgcactcaaccatccagagcttgtggaaggccttgtgctcattaatgttgacccttgcgctaaaggctggattgactgggcagcttccaaactctctggcctgacaaccaatgttgtggacattattttggctcatcactttgggcaggaagagttacaggccaacctggacctgatccaaacctacagaatgcatattgcccaagacatcaaccaagacaacctgcagctcttcttgaattcctacaatggacgcagagacctggagatcgaaagacccatactgggccaaaatgataacaaatcaaaaacattaaagtgttctactttactggtggtaggggacaattcgcctgcagttgaggctgtggtcgaatgcaattcccgcctgaaccctataaatacaactttgctaaagatggcggactgtgggggactgccccaggtagttcagcctgggaagctcaccgaggccttcaagtactttttgcagggaatgggctacataccatctgccagcatgactcggctcgcccgatcacgaacccactcaacctcgagtagcctcggctctggagaaagtcccttcagccggtctgtcaccagcaatcagtcagatggaactcaagaatcctgtgagtcccctgatgtcctggacagacaccagaccatggaggtgtcctgctaagcagatgctcctcccctggaccattgcaagtccatccttcaaatgaccactccataatataacatttcatccagtaaactggcctctactatctttaactcatgcatggccactgaacctctctctagtagcctggatttatcattctctctgcctgcccacccccttttttgtatagcccaagaaccacttccatgccatactgtaacattccaacatctttagctgatcagatctctccatatcctctcttgccagctttttcccgtgctcccccaactatgtatcagataagattctttgatcccgactctgtgtgtgcgagcacgcgtgtctgtgtttgtgtgtgcatagttctgtggttttagacacgctttcttgtagtgcttctgcaaaaaacaaaaaagggacttattttgcattctcaatggtgtttttaagggaattaggcagaacagatttctaggttgggtaggccactgcattctcttttgtttgcaaattggtcaacaaaatttgcaaagtgatttcaggagagagcagctttgaggaatgtggaaaatcataattgccgtctggaccattgattgattgtgaccagtagcagaagggtgcctgttacatagagaggctccttctgtccaaatgaatttctgtatactcttctataaataaaagggaggaatatattctgctggaagcccatgaaccatcgctgaggttctgatacaacatagagttttttccaaggagtgaatgtggtttaattactggactctcttagcacaggaaggtggaaacaaaatgccaggcctctgctctgaagagcaaaactgctgtcgctgcagtatctgataccagacatccacatatccacaagaagtgcctcttaggtctgtgacagagagtgtgtctccattcctcagttcccagaaaggggagaggtttggcctaaaaagcatgtagatgggggagaaatgggtggggggagaggaacagccattaacacagtatcatgtttaacaagtatagccttgatttcagtagatgtaatggaagccaaattaaattgatacagaacccatttctcagagtctttttttttttttgagacagagtctcgctgttacccaggctggagtgcaatggcgcaaacttggctcactgcaacctctgccccctgggttcaagcgattctcctgcctcagcctcccgagtagctgagactacaggcacctgccaccatacccagcaccttgggaggctgaggtgggaggatcatttgaggccaggagtttgagacctgcctgggcaacataatgaaacttcctttccagggag

SEQ ID NO: 453324 - DNA, 2720 bp, Homo sapiens
  misc_feature (2703)..(2706): n is a, c, g, or t
ggctgctgcactgacggcgggtgcccgcgcctcagagttactgatttattcttgagattcctctactctcgttatctgacctcatggatgaacttcaggatgttcagctcacagagatcaaaccacttctaaatgataagaatggtacaagaaacttccaggactttgactgtcaggaacatgatatagaaacaactcatggtgtggtccacgtcactataagagttggagctggagcttacatcctcagcagatttgcactcaaccatccagagcttgtggaaggccttgtgctcattaatgttgacccttgcgctaaaggctggattgactgggcagcttccaaactctctggcctgacaaccaatgttgtggacattattttggctcatcactttgggcaggaagagttacaggccaacctggacctgatccaaacctacagaatgcatattgcccaagacatcaaccaagacaacctgcagctcttcttgaattcctacaatggacgcagagacctggagatcgaaagacccatactgggccaaaatgataacaaatcaaaaacattaaagtgttctactttactggtggtaggggacaattcgcctgcagttgaggctgtggtcgaatgcaattcccgcctgaaccctataaatacaactttgctaaagatggcggactgtgggggactgccccaggtagttcagcctgggaagctcaccgaggccttcaagtactttttgcagggaatgggctacataccatctgccagcatgactcggctcgcccgatcacgaacccactcaacctcgagtagcctcggctctggagaaagtcccttcagccggtctgtcaccagcaatcagtcagatggaactcaagaatcctgtgagtcccctgatgtcctggacagacaccagaccatggaggtgtcctgctaagcagatgctcctcccctggaccattgcaagtccatccttcaaatgaccactccataatataacatttcatccagtaaactggcctctactatctttaactcatgcatggccactgaacctctctctagtagcctggatttatcattctctctgcctgcccacccccttttttgtatagcccaagaaccacttccatgccatactgtaacattccaacatctttagctgatcagatctctccatatcctctcttgccagctttttcccgtgctcccccaactatgtatcagataagattctttgatcccgactctgtgtgtgcgagcacgcgtgtctgtgtttgtgtgtgcatagttctgtggttttagacacgctttcttgtagtgcttctgcaaaaaacaaaaaagggacttattttgcattctcaatggtgtttttaagggaattaggcagaacagatttctaggttgggtaggccactgcattctcttttgtttgcaaattggtcaacaaaatttgcaaagtgatttcaggagagagcagctttgaggaatgtggaaaatcataattgccgtctggaccattgattgattgtgaccagtagcagaagggtgcctgttacatagagaggctccttctgtccaaatgaatttctgtatactcttctataaataaaagggaggaatatattctgctggaagcccatgaaccatcgctgaggttctgatacaacatagagttttttccaaggagtgaatgtggtttaattactggactctcttagcacaggaaggtggaaacaaaatgccaggcctctgctctgaagagcaaaactgctgtcgctgcagtatctgataccagacatccacatatccacaagaagtgcctcttaggtctgtgacagagagtgtgtctccattcctcagttcccagaaaggggagaggtttggcctaaaaagcatgtagatgggggagaaatgggtggggggagaggaacagccattaacacagtatcatgtttaacaagtatagccttgatttcagtagatgtaatggaagccaaattaaattgatacagaacccatttctcagagtctttttttttttttgagacagagtctcgctgttacccaggctggagtgcaatggcgcaaacttggctcactgcaacctctgccccctgggttcaagcgattctcctgcctcagcctcccgagtagctgagactacaggcacctgccaccatacccagctaagttatgtatttttagtagagatggagtttcaccatgttggccaggctggtctcaaactcctgacctcaggtgatccacctgcctcagcctcccaaagtgctgggattacaggcatgagtcattgctcccagccattagaaagattgttaatcctatgaactcccttttgtaggagagaaagggccaatctgtaggggtagccctgtccaggtaaagttgttttcagcctcatgtctactgttaggtgagggagtcacagccagacagagagtattgctggagggtgagagaattgtggagaccaactaccacatagcaagagcccagctcttgggagcattgagatgtaagctcagggttacacagttccaaatcttgggaaggggcttttcagacagactgtttgctttctgctgagataaggaatgcatcactctgccagagtatgactttttacagattattaaataaagctgcatatgtctcattgttaaaaaaaaacnnnnaaaaagggcggccg

SEQ ID NO: 453325 - DNA, 3279 bp, Homo sapiens
ggctgctgcactgacggcgggtgcccgcgcctcagagttactgatttattcttgagattcctctactctcgttatctgacctcatggatgaacttcaggatgttcagctcacagagatcaaaccacttctaaatgataagaatggtacaagaaacttccaggactttgactgtcaggaacatgatatagaaacaactcatggtgtggtccacgtcactataagagttggagctggagcttacatcctcagcagatttgcactcaaccatccagagcttgtggaaggccttgtgctcattaatgttgacccttgcgctaaaggctggattgactgggcagcttccaaactctctggcctgacaaccaatgttgtggacattattttggctcatcactttgggcaggaagagttacaggccaacctggacctgatccaaacctacagaatgcatattgcccaagacatcaaccaagacaacctgcagctcttcttgaattcctacaatggacgcagagacctggagatcgaaagacccatactgggccaaaatgataacaaatcaaaaacattaaagtgttctactttactggtggtaggggacaattcgcctgcagttgaggctgtggtcgaatgcaattcccgcctgaaccctataaatacaactttgctaaagatggcggactgtgggggactgccccaggtagttcagcctgggaagctcaccgaggccttcaagtactttttgcagggaatgggctacataccatctgccagcatgactcggctcgcccgatcacgaacccactcaacctcgagtagcctcggctctggagaaagtcccttcagccggtctgtcaccagcaatcagtcagatggaactcaagaatcctgtgagtcccctgatgtcctggacagacaccagaccatggaggtgtcctgctaagcagatgctcctcccctggaccattgcaagtccatccttcaaatgaccactccataatataacatttcatccagtaaactggcctctactatctttaactcatgcatggccactgaacctctctctagtagcctggatttatcattctctctgcctgcccacccccttttttgtatagcccaagaaccacttccatgccatactgtaacattccaacatctttagctgatcagatctctccatatcctctcttgccagctttttcccgtgctcccccaactatgtatcagataagattctttgatcccgactctgtgtgtgcgagcacgcgtgtctgtgtttgtgtgtgcatagttctgtggttttagacacgctttcttgtagtgcttctgcaaaaaacaaaaaagggacttattttgcattctcaatggtgtttttaagggaattaggcagaacagatttctaggttgggtaggccactgcattctcttttgtttgcaaattggtcaacaaaatttgcaaagtgatttcaggagagagcagctttgaggaatgtggaaaatcataattgccgtctggaccattgattgattgtgaccagtagcagaagggtgcctgttacatagagaggctccttctgtccaaatgaatttctgtatactcttctataaataaaagggaggaatatattctgctggaagcccatgaaccatcgctgaggttctgatacaacatagagttttttccaaggagtgaatgtggtttaattactggactctcttagcacaggaaggtggaaacaaaatgccaggcctctgctctgaagagcaaaactgctgtcgctgcagtatctgataccagacatccacatatccacaagaagtgcctcttaggtctgtgacagagagtgtgtctccattcctcagttcccagaaaggggagaggtttggcctaaaaagcatgtagatgggggagaaatgggtggggggagaggaacagccattaacacagtatcatgtttaacaagtatagccttgatttcagtagatgtaatggaagccaaattaaattgatacagaacccatttctcagagtctttttttttttttgagacagagtctcgctgttacccaggctggagtgcaatggcgcaaacttggctcactgcaacctctgccccctgggttcaagcgattctcctgcctcagcctcccgagtagctgagactacaggcacctgccaccatacccagctaagttatgtatttttagtagagatggagtttcaccatgttggccaggctggtctcaaactcctgacctcaggtgatccacctgcctcagcctcccaaagtgctgggattacaggcatgagtcattgctcccagccattagaaagattgttaatcctatgaactcccttttgtaggagagaaagggccaatctgtaggggtagccctgtccaggtaaagttgttttcagcctcatgtctactgttaggtgagggagtcacagccagacagagagtattgctggagggtgagagaattgtggagaccaactaccacatagcaagagcccagctcttgggagcattgagatgtaagctcagggttacacagttccaaatcttgggaaggggcttttcagacagactgtttgctttctgctgagataaggaatgcatcactctgccagagtatgactttttacagattattaaataaagctgcatatgtctcattgttagttaaaaaaaaaaaaaaaaaaaaaaaaaaaaaaaaaaaaaacctccgggggcttcttattttttgggggggggaaaaaggagggtattggaagtgggccagtgggtcatatagtgtgttttcgtgacccagtttttttgtgtcaaaggggggaaaatattggggggccccccaattgaggggcggggtattaaattgggaaagcccggggttaccctgtgttagaacttttgggaagaagggaaatgagcagccgcatgaagcaaggaaggaaatctacacactgaacacacgccccacaaacacactcaagataacaagagaaaccaagtaacagagaaagagagaccgagacaacacgcaagaaaccagcagcggcggcgaacaacacaacgcacatgacagaaaaaagagtacgacaaacaagacacagcatcacgtaccatgcaaaacgcgacaaacaaaaagacgaaagagaaagtacaaacacgacgagcagcagagagagcaggcacagaaaaatgacgcagaacgacgccagacctaagagagcaacaacgagaggtaggagacaacccaaagcataa

SEQ ID NO: 453326 - DNA, 2032 bp, Homo sapiens
ggctgctgcactgacggcgggtgcccgcgcctcagagttactgatttattcttgagattcctctactctcgttatctgacctcatggatgaacttcaggatgttcagctcacagagatcaaaccacttctaaatgataagaatggtacaagaaacttccaggactttgactgtcaggaacatgatatagaaacaactcatggtgtggtccacgtcactataagagttggagctggagcttacatcctcagcagatttgcactcaaccatccagagcttgtggaaggccttgtgctcattaatgttgacccttgcgctaaaggctggattgactgggcagcttccaaactctctggcctgacaaccaatgttgtggacattattttggctcatcactttgggcaggaagagttacaggccaacctggacctgatccaaacctacagaatgcatattgcccaagacatcaaccaagacaacctgcagctcttcttgaattcctacaatggacgcagagacctggagatcgaaagacccatactgggccaaaatgataacaaatcaaaaacattaaagtgttctactttactggtggtaggggacaattcgcctgcagttgaggctgtggtcgaatgcaattcccgcctgaaccctataaatacaactttgctaaagatggcggactgtgggggactgccccaggtagttcagcctgggaagctcaccgaggccttcaagtactttttgcagggaatgggctacataccatctgccagcatgactcggctcgcccgatcacgaacccactcaacctcgagtagcctcggctctggagaaagtcccttcagccggtctgtcaccagcaatcagtcagatggaactcaagaatcctgtgagtcccctgatgtcctggacagacaccagaccatggaggtgtcctgctaagcagatgctcctcccctggaccattgcaagtccatccttcaaatgaccactccataatataacatttcatccagtaaactggcctctactatctttaactcatgcatggccactgaacctctctctagtagcctggatttatcattctctctgcctgcccacccccttttttgtatagcccaagaaccacttccatgccatactgtaacattccaacatctttagctgatcagatctctccatatcctctcttgccagctttttcccgtgctcccccaactatgtatcagataagattctttgatcccgactctgtgtgtgcgagcacgcgtgtctgtgtttgtgtgtgcatagttctgtggttttagacacgctttcttgtagtgcttctgcaaaaaacaaaaaagggacttattttgcattctcaatggtgtttttaagggaattaggcagaacagatttctaggttgggtaggccactgcattctcttttgtttgcaaattggtcaacaaaatttgcaaagtgatttcaggagagagcagctttgaggaatgtggaaaatcataattgccgtctggaccattgattgattgtgaccagtagcagaagggtgcctgttacatagagaggctccttctgtccaaatgaatttctgtatactcttctataaataaaagggaggaatatattctgctggaagcccatgaaccatcgctgaggttctgatacaacatagagttttttccaaggagtgaatgtggtttaattactggactctcttagcacaggaaggtggaaacaaaatgccaggcctctgctctgaagagcaaaactgctgtcgctgcagtatctgataccagacatccacatatccacaagaagtgcctcttaggtctgtgacagagagtgtgtctccattcctcagttcccagaaaggggagaggtttggcctaaaaagcatgtagatgggggagaaatgtatacattcttattttagaactataaatatactaaatctttaccttacttcttttatttctttcctatttttaatatatacttattttttatatcacccttattactc

SEQ ID NO: 453327 - DNA, 513 bp, Homo sapiens
tagtctcgttgtatcgggcttgcactgtgtttgtgaaacaccttcatacttgtgtgtgtgtctttcttttcttttggtttagtcttgcatgcactgtaggttttggttacctgtttgggttcccaaagcctccattctgtcactgtctgaatggtgtgggcatagttaagaggctatactctggatttagggtttccccttgttctgcggtgactacaatcagctgagattccaaccagatctaaaggattaaagtggcctcacatatcgccactcacctagagcaaatgatacaaaatggggatggctatatcttgtcctgggtgtcatggtaaatgagtcggaaaagctaaacataaagactttgatgagactcctaggttagctgggcttaaccggggcttcatcttctagtccccttggttctctgttacagtaccatctgccagcatgactcggctcgcccgatcacgaacccactcaacctcgagtagcctcggctctggagaaagt

SEQ ID NO: 453328 - DNA, 2924 bp, Homo sapiens
ggctgctgcactgacggcgggtgcccgcgcctcagagttactgatttattcttgagattcctctactctcgttatctgacctcatggatgaacttcaggatgttcagctcacagagatcaaaccacttctaaatgataaggaacatgatatagaaacaactcatggtgtggtccacgtcactataagaggcttacccaaaggaaacagaccagttatactaacatatcatgacattggcctcaaccataaatcctgtttcaatgcattctttaactttgaggatatgcaagagatcacccagcactttgctgtctgtcatgtggatgccccaggccagcaggaaggtgcaccctctttcccaacagggtatcagtaccccacaatggatgagctggctgaaatgctgcctcctgttcttacccacctaagcctgaaaagcatcattggaattggagttggagctggagcttacatcctcagcagatttgcactcaaccatccagagcttgtggaaggccttgtgctcattaatgttgacccttgcgctaaaggctggattgactgggcagcttccaaactctctggcctgacaaccaatgttgtggacattattttggctcatcactttgggcaggaagagttacaggccaacctggacctgatccaaacctacagaatgcatattgcccaagacatcaaccaagacaacctgcagctcttcttgaattcctacaatggacgcagagacctggagatcgaaagacccatactgggccaaaatgataacaaatcaaaaacattaaagtgttctactttactggtggtaggggacaattcgcctgcagttgaggctgtggtcgaatgcaattcccgcctgaaccctataaatacaactttgctaaagatggcggactgtgggggactgccccaggtagttcagcctgggaagctcaccgaggccttcaagtactttttgcagggaatgggctacataccatctgccagcatgactcggctcgcccgatcacgaacccactcaacctcgagtagcctcggctctggagaaagtcccttcagccggtctgtcaccagcaatcagtcagatggaactcaagaatcctgtgagtcccctgatgtcctggacagacaccagaccatggaggtgtcctgctaagcagatgctcctcccctggaccattgcaagtccatccttcaaatgaccactccataatataacatttcatccagtaaactggcctctactatctttaactcatgcatggccactgaacctctctctagtagcctggatttatcattctctctgcctgcccacccccttttttgtatagcccaagaaccacttccatgccatactgtaacattccaacatctttagctgatcagatctctccatatcctctcttgccagctttttcccgtgctcccccaactatgtatcagataagattctttgatcccgactctgtgtgtgcgagcacgcgtgtctgtgtttgtgtgtgcatagttctgtggttttagacacgctttcttgtagtgcttctgcaaaaaacaaaaaagggacttattttgcattctcaatggtgtttttaagggaattaggcagaacagatttctaggttgggtaggccactgcattctcttttgtttgcaaattggtcaacaaaatttgcaaagtgatttcaggagagagcagctttgaggaatgtggaaaatcataattgccgtctggaccattgattgattgtgaccagtagcagaagggtgcctgttacatagagaggctccttctgtccaaatgaatttctgtatactcttctataaataaaagggaggaatatattctgctggaagcccatgaaccatcgctgaggttctgatacaacatagagttttttccaaggagtgaatgtggtttaattactggactctcttagcacaggaaggtggaaacaaaatgccaggcctctgctctgaagagcaaaactgctgtcgctgcagtatctgataccagacatccacatatccacaagaagtgcctcttaggtctgtgacagagagtgtgtctccattcctcagttcccagaaaggggagaggtttggcctaaaaagcatgtagatgggggagaaatgggtggggggagaggaacagccattaacacagtatcatgtttaacaagtatagccttgatttcagtagatgtaatggaagccaaattaaattgatacagaacccatttctcagagtctttttttttttttgagacagagtctcgctgttacccaggctggagtgcaatggcgcaaacttggctcactgcaacctctgccccctgggttcaagcgattctcctgcctcagcctcccgagtagctgagactacaggcacctgccaccatacccagctaagttatgtatttttagtagagatggagtttcaccatgttggccaggctggtctcaaactcctgacctcaggtgatccacctgcctcagcctcccaaagtgctgggattacaggcatgagtcattgctcccagccattagaaagattgttaatcctatgaactcccttttgtaggagagaaagggccaatctgtaggggtagccctgtccaggtaaagttgttttcagcctcatgtctactgttaggtgagggagtcacagccagacagagagtattgctggagggtgagagaattgtggagaccaactaccacatagcaagagcccagctcttgggagcattgagatgtaagctcagggttacacagttccaaatcttgggaaggggcttttcagacagactgtttgctttctgctgagataaggaatgcatcactctgccagagtatgactttttacagattattaaataaagctgcatatgtctcattgtta

SEQ ID NO: 453329 - DNA, 2693 bp, Homo sapiens
ggctgctgcactgacggcgggtgcccgcgcctcagagttactgatttattcttgagattcctctactctcgttatctgacctcatggatgaacttcaggatgttcagctcacagagatcaaaccacttctaaatgataagaatggtacaagaaacttccaggactttgactgtcaggaacatgatatagaaacaactcatggtgtggtccacgtcactataagagttggagctggagcttacatcctcagcagatttgcactcaaccatccagagcttgtggaaggccttgtgctcattaatgttgacccttgcgctaaaggctggattgactgggcagcttccaaactctctggcctgacaaccaatgttgtggacattattttggctcatcactttgggcaggaagagttacaggccaacctggacctgatccaaacctacagaatgcatattgcccaagacatcaaccaagacaacctgcagctcttcttgaattcctacaatggacgcagagacctggagatcgaaagacccatactgggccaaaatgataacaaatcaaaaacattaaagtgttctactttactggtggtaggggacaattcgcctgcagttgaggctgtggtcgaatgcaattcccgcctgaaccctataaatacaactttgctaaagatggcggactgtgggggactgccccaggtagttcagcctgggaagctcaccgaggccttcaagtactttttgcagggaatgggctacataccatctgccagcatgactcggctcgcccgatcacgaacccactcaacctcgagtagcctcggctctggagaaagtcccttcagccggtctgtcaccagcaatcagtcagatggaactcaagaatcctgtgagtcccctgatgtcctggacagacaccagaccatggaggtgtcctgctaagcagatgctcctcccctggaccattgcaagtccatccttcaaatgaccactccataatataacatttcatccagtaaactggcctctactatctttaactcatgcatggccactgaacctctctctagtagcctggatttatcattctctctgcctgcccacccccttttttgtatagcccaagaaccacttccatgccatactgtaacattccaacatctttagctgatcagatctctccatatcctctcttgccagctttttcccgtgctcccccaactatgtatcagataagattctttgatcccgactctgtgtgtgcgagcacgcgtgtctgtgtttgtgtgtgcatagttctgtggttttagacacgctttcttgtagtgcttctgcaaaaaacaaaaaagggacttattttgcattctcaatggtgtttttaagggaattaggcagaacagatttctaggttgggtaggccactgcattctcttttgtttgcaaattggtcaacaaaatttgcaaagtgatttcaggagagagcagctttgaggaatgtggaaaatcataattgccgtctggaccattgattgattgtgaccagtagcagaagggtgcctgttacatagagaggctccttctgtccaaatgaatttctgtatactcttctataaataaaagggaggaatatattctgctggaagcccatgaaccatcgctgaggttctgatacaacatagagttttttccaaggagtgaatgtggtttaattactggactctcttagcacaggaaggtggaaacaaaatgccaggcctctgctctgaagagcaaaactgctgtcgctgcagtatctgataccagacatccacatatccacaagaagtgcctcttaggtctgtgacagagagtgtgtctccattcctcagttcccagaaaggggagaggtttggcctaaaaagcatgtagatgggggagaaatgggtggggggagaggaacagccattaacacagtatcatgtttaacaagtatagccttgatttcagtagatgtaatggaagccaaattaaattgatacagaacccatttctcagagtctttttttttttttgagacagagtctcgctgttacccaggctggagtgcaatggcgcaaacttggctcactgcaacctctgccccctgggttcaagcgattctcctgcctcagcctcccgagtagctgagactacaggcacctgccaccatacccagctaagttatgtatttttagtagagatggagtttcaccatgttggccaggctggtctcaaactcctgacctcaggtgatccacctgcctcagcctcccaaagtgctgggattacaggcatgagtcattgctcccagccattagaaagattgttaatcctatgaactcccttttgtaggagagaaagggccaatctgtaggggtagccctgtccaggtaaagttgttttcagcctcatgtctactgttaggtgagggagtcacagccagacagagagtattgctggagggtgagagaattgtggagaccaactaccacatagcaagagcccagctcttgggagcattgagatgtaagctcagggttacacagttccaaatcttgggaaggggcttttcagacagactgtttgctttctgctgagataaggaatgcatcactctgccagagtatgactttttacagattattaaataaagctgcatatgtctcattgtta

SEQ ID NO: 453330 - DNA, 3031 bp, Homo sapiens
aggctcattgtgtagtcacactctagaatgctggggtgggagatgagataactggatagagagcctgtaaaacagatgataattgactaagacaaaaaggtagcaacagcacgttactccctgcagtggcctgacaactgaatcagctccttagccagggtctctgcacattcatcttcagatggagtttttttcaagctgttcattcacaaggtcacgaaaaatatgcatgccaatcaccatggaggaacatgatatagaaacaactcatggtgtggtccacgtcactataagaggcttacccaaaggaaacagaccagttatactaacatatcatgacattggcctcaaccataaatcctgtttcaatgcattctttaactttgaggatatgcaagagatcacccagcactttgctgtctgtcatgtggatgccccaggccagcaggaaggtgcaccctctttcccaacagggtatcagtaccccacaatggatgagctggctgaaatgctgcctcctgttcttacccacctaagcctgaaaagcatcattggaattggagttggagctggagcttacatcctcagcagatttgcactcaaccatccagagcttgtggaaggccttgtgctcattaatgttgacccttgcgctaaaggctggattgactgggcagcttccaaactctctggcctgacaaccaatgttgtggacattattttggctcatcactttgggcaggaagagttacaggccaacctggacctgatccaaacctacagaatgcatattgcccaagacatcaaccaagacaacctgcagctcttcttgaattcctacaatggacgcagagacctggagatcgaaagacccatactgggccaaaatgataacaaatcaaaaacattaaagtgttctactttactggtggtaggggacaattcgcctgcagttgaggctgtggtcgaatgcaattcccgcctgaaccctataaatacaactttgctaaagatggcggactgtgggggactgccccaggtagttcagcctgggaagctcaccgaggccttcaagtactttttgcagggaatgggctacataccatctgccagcatgactcggctcgcccgatcacgaacccactcaacctcgagtagcctcggctctggagaaagtcccttcagccggtctgtcaccagcaatcagtcagatggaactcaagaatcctgtgagtcccctgatgtcctggacagacaccagaccatggaggtgtcctgctaagcagatgctcctcccctggaccattgcaagtccatccttcaaatgaccactccataatataacatttcatccagtaaactggcctctactatctttaactcatgcatggccactgaacctctctctagtagcctggatttatcattctctctgcctgcccacccccttttttgtatagcccaagaaccacttccatgccatactgtaacattccaacatctttagctgatcagatctctccatatcctctcttgccagctttttcccgtgctcccccaactatgtatcagataagattctttgatcccgactctgtgtgtgcgagcacgcgtgtctgtgtttgtgtgtgcatagttctgtggttttagacacgctttcttgtagtgcttctgcaaaaaacaaaaaagggacttattttgcattctcaatggtgtttttaagggaattaggcagaacagatttctaggttgggtaggccactgcattctcttttgtttgcaaattggtcaacaaaatttgcaaagtgatttcaggagagagcagctttgaggaatgtggaaaatcataattgccgtctggaccattgattgattgtgaccagtagcagaagggtgcctgttacatagagaggctccttctgtccaaatgaatttctgtatactcttctataaataaaagggaggaatatattctgctggaagcccatgaaccatcgctgaggttctgatacaacatagagttttttccaaggagtgaatgtggtttaattactggactctcttagcacaggaaggtggaaacaaaatgccaggcctctgctctgaagagcaaaactgctgtcgctgcagtatctgataccagacatccacatatccacaagaagtgcctcttaggtctgtgacagagagtgtgtctccattcctcagttcccagaaaggggagaggtttggcctaaaaagcatgtagatgggggagaaatgggtggggggagaggaacagccattaacacagtatcatgtttaacaagtatagccttgatttcagtagatgtaatggaagccaaattaaattgatacagaacccatttctcagagtctttttttttttttgagacagagtctcgctgttacccaggctggagtgcaatggcgcaaacttggctcactgcaacctctgccccctgggttcaagcgattctcctgcctcagcctcccgagtagctgagactacaggcacctgccaccatacccagctaagttatgtatttttagtagagatggagtttcaccatgttggccaggctggtctcaaactcctgacctcaggtgatccacctgcctcagcctcccaaagtgctgggattacaggcatgagtcattgctcccagccattagaaagattgttaatcctatgaactcccttttgtaggagagaaagggccaatctgtaggggtagccctgtccaggtaaagttgttttcagcctcatgtctactgttaggtgagggagtcacagccagacagagagtattgctggagggtgagagaattgtggagaccaactaccacatagcaagagcccagctcttgggagcattgagatgtaagctcagggttacacagttccaaatcttgggaaggggcttttcagacagactgtttgctttctgctgagataaggaatgcatcactctgccagagtatgactttttacagattattaaataaagctgcatatgtctcattgtta

SEQ ID NO: 453331 - DNA, 857 bp, Homo sapiens
  misc_feature (857)..(857): n is a, c, g, or t
caattattccaaatctattccactctcttcaagcctgtaccccacctgccctttctcagcaggctgctcctctcacttctaggagtcccgtcagctgtcccagagcctgtgtcgcgcccgtgccggtagcgcccgtgccggtagcgccgctgccaccgctcaccatgggcccgggtcctcggctgctgctacctctcgtgctttgcgtggggctcggcgcacttgtgttttcttcgggggccgagggcttccgcaagcgaggcccctcggtgacggccaaggtcttctttgatgtgaggattggagacaaagatgttggcagaattgtgattggcctctttggaaaagttgtgcccaagacagtggaaaattttgttgctctagcaacaggagagaaaggatatggatataaaggaagcaagtttcatcgtgtcatcaaggatttcatgattcaaggaggtgacatcaccactggagatggcactgggggtgtgagcatctatggtgagacatttccagatgagaacttcaagctgaagcactatggcattgggtgggtcagcatggccaacgctgggcctgacaccaatggctctcagttctttatcaccttgaccaagcccacctggttggacggcaaacatgtggtgtttggaaaagtcattgatgggatgacagtggtgcactccatagagctccaagcaactgatgggcatgaccgtccactcaccaactgctcgatcatcaacagtggcaagatagacgtgaaaacgccttttgtggttgagatcgctgattggtgacacaactggcacacacacacacacacgcacatgcacacacgcacgcatgcaccn

SEQ ID NO: 453332 - DNA, 1643 bp, Homo sapiens
caattattccaaatctattccactctcttcaagcctgtaccccacctgccctttctcagcaggctgctcctctcacttctaggagtcccgtcagctgtcccagagcctgtgtcgcgcccgtgccggtagcgcccgtgccggtagcgccgctgccaccgctcaccatgggcccgggtcctcggctgctgctacctctcgtgctttgcgtggggctcggcgcacttgtgttttcttcgggggccgagggcttccgcaagcgaggcccctcggtgacggccaaggtcttctttgatgtgaggattggagacaaagatgttggcagaattgtgattggcctctttggaaaagttgtgcccaagacagtggaaaattttgttgctctagcaacaggagagaaaggatatggatataaaggaagcaagtttcatcgtgtcatcaaggatttcatgattcaaggaggtgacatcaccactggagatggcactgggggtgtgagcatctatggtgagacatttccagatgagaacttcaagctgaagcactatggcattgggtgggtcagcatggccaacgctgggcctgacaccaatggctctcagttctttatcaccttgaccaagcccacctggttggacggcaaacatgtggtgtttggaaaagtcattgatgggatgacagtggtgcactccatagagctccaagcaactgatgggcatgaccgtccactcaccaactgctcgatcatcaacagtggcaagatagacgtgaaaacgccttttgtggttgagatcgctgattggtgacacaactggcagaaaacaaggatatgctttggcaggggtgtgtgtgtgtgtgtgtgtgtgtgtgtgtgtgttgtgttgtctttcaattatttgcttttttttttttactttctttttgtattctatcccagatcacaggaaagttataaaaatcaaaccgtcaccctttagtttgcttgaactttagtaaaccacctgcttagggactttgaacttaaatatatccccttcctcaagtggtgctattttaaaactaaaaaaaactttgaattggctatttttttaatgcaatattttttttctgaattcattatgatccccatattgggtaatgctgaacatttatctgaaacagatgaggatattattattttgtatccaaacagaaattcagataaagggaaatttgactagtgtaatctgagatatgtcatagggatttctttctgacaaaagggtgctttgctgttctttatattaaatacttttagatcaactctttttgcaagactttttaaaaatgtaaagttctttaagaaatatacaaaaatacacacactctagcattaacagtgaacagattagaaagattttataaatcaaactacaaacataattagataactcagaaattatgcccatccacatctcatatacttaaggtgattatttacttattgttattcaatgtaacatttttagaaagttatctttagcccagttgcaataggaatattttttgttacttacataaggggattaagactcaggctataaggcctgggtatggtggctcatgcctataatcccagcactttgggaggctgagacaagagaatt

SEQ ID NO: 453333 - DNA, 1635 bp, Homo sapiens
caattattccaaatctattccactctcttcaagcctgtaccccacctgccctttctcagcaggctgctcctctcacttctaggagtcccgtcagctgtcccagagcctgtgtcgcgcccgtgccggtagcgcccgtgccggtagcgccgctgccaccgctcaccatgggcccgggtcctcggctgctgctacctctcgtgctttgcgtggggctcggcgcacttgtgttttcttcgggggccgagggcttccgcaagcgaggcccctcggtgacggccaaggtcttctttgatgtgaggattggagacaaagatgttggcagaattgtgattggcctctttggaaaagttgtgcccaagacagtggaaaattttgttgctctagcaacaggagagaaaggatatggatataaaggaagcaagtttcatcgtgtcatcaaggatttcatgattcaaggaggtgacatcaccactggagatggcactgggggtgtgagcatctatggtgagacatttccagatgagaacttcaagctgaagcactatggcattgggtgggtcagcatggccaacgctgggcctgacaccaatggctctcagttctttatcaccttgaccaagcccacctggttggacggcaaacatgtggtgtttggaaaagtcattgatgggatgacagtggtgcactccatagagctccaagcaactgatgggcatgaccgtccactcaccaactgctcgatcatcaacagtggcaagatagacgtgaaaacgccttttgtggttgagatcgctgattggtgacacaactggcagaaaacaaggatatgctttggcaggggtgtgtgtgtgtgtgtgtgtgtgtgtgtgtgtgttgtgttgtctttcaattatttgcttttttttttttactttctttttgtattctatcccagatcacaggaaagttataaaaatcaaaccgtcaccctttagtttgcttgaactttagtaaaccacctgcttagggactttgaacttaaatatatccccttcctcaagtggtgctattttaaaactaaaaaaaactttgaattgggccaaaaaaaaaaaaaaaaaaaaaaaaaaaacaaaaaaaaaaaaaaaaaaaaaaaaaaaaaaaaaagggcggcggcgcgcgcccccaaaagaaaatacacccccgcgagggaggcgccccacactcaccgcgccgcaccccccagtttttctgttgcaacaaaggcggcgcccccaaataaggcgggcaggcgcattaatacaaacaagagcgagcggggcgccgcgacaaaaaaccacagcggccgcggagcagggggaaaaaaaggggtgacgacacgcgggagaacactcctggggagaagaagaaccccactccttctcgggggcgtggtgcccatattgtcgggaccaagctaaccccccagagagagagagaattaaagcgacccagaggtggaaaacatctgacacacttacacaggttggattcacagggttgtcaaccacacgatgcagcgaatattgctgagccgcgagacaaaagtggctgaccaaccaggacaaagctgaataagaaacaattattataacaagggacatgactaggcaacacgag

SEQ ID NO: 453334 - DNA, 1995 bp, Homo sapiens
ctatgatggccagccaccgctgagagcacgaagctgctgctggctggcatttttctctagcgttgtggtgccaccttcccttcttgtcccaaggttataaggccttgtctttctctttggaatcataaagtggaacagagtccccagaactcatgtggccatttccgccagcatcactccccggtgcctatggggtcccggtgtacctaaagggagaaggaccccatgtgctagccagaaatatactgtctcttgaaggaaagcaggagctcagactcttagagccagctgtggcttcggacccaaggcctgacctaggctgctatcctaatattgcaggaggggcctctcttccaagccccaccctaagggttagcccttggccaaatcttttgccgtctaggcccagccaggcttttctgactaaataagcaataagaggctctaagctgactgagttgcaaggaccctttccgccctcccttggatctccatgtttttccagatggcggaagagcatgtgccaccccctttcctaacagacttgtccaagtgcttggcgtgggacccatgaccaaagcccaggatggcttggtgggagtgtccctgctgcatctgcatgaagcccctgctttttaggcctcactcccatcagaaccctgcctgcccacctgcaactcccccccaacaatgccattcccacttgccccagagaagctactcggccaaacctagccagggtctgttcttgtggaccagagccagcctagtcattatttgctgtcgggtttccagtttcaccgtgtgttagggtgagggatgattgtaaaatttgctcctcaaaggaatcaggccagactcaattttggagggcaagacagggaggaggccgcttcatcccagactctcttctagggcttcccaccatcagcccctcccacttgagactggtctttgggaggcaataggccaccatgcctggtcagcaccaattcaagccatgccaggaatctgcctacctgccaggttcagttcttttaaggtgcctcttcagggacacagtgtgtctctctgattgggcttctaaatcaaaagcctgatgttcgtgtccctctcatagggggagctttggacacaggaccagtttggaaaagggtcaggtaagggtttccactctgcacattgtagagggaacactctgtaggcccatgggtcccttactagagaggttgagtgaatttgccttcagttaacatgggaccttctgtttagcttcctcttgcttcccaaagattttaagcattttgtaaatgtataaactcacctctggtaacagtggcccagacgctgctttgtgctaaaagcatgggaaatgtaaaggcagtctttctctgggaaatggatgctattctattctgctgcccctacctgttcctgaggcctcatttagaaagaaaatcccctcagaaggctgtctggcacccagtgtcctagccaggccaagtatatgagaaaggtaagtccattttccccttcaggtcctcagtggattacttaaccactgctgtccctcggtccctttttcctaaacgggtttagttctgtcttttttctccttttttctaaatgctggtaaatatttacattcagccagggaagaggaggccagaggtcgggccagctgccccattcttttaacgttgtagggcctgcccatggagcggaccctcctctttggggcctcgtgagcttttttgcttatcatgttccatttcgtgccgctttcccccttcaagatgccatttggagggtaggggatctgcttcccactgtgactgggctatgggattctgactaccttgcttacagattcatggtttgataaatttgttgtattccaaaacttgaaatgcaggacgccattaagtgtctgtttatatttttggaatatttgtattacttacaattaattaataaaagtgggtttaaaaaacc

SEQ ID NO: 453335 - DNA, 3215 bp, Homo sapiens
gataaaggaagggtatgcctttgggtactccaggcacacacctttctgaaatccttctccagccagctgctgcagacaaaagatcacatttctgggaagatgagaacttgtttccagaccagcatccagtggccatcaggtcttgtggcccaaaggctatgcttgcctccggctgagtgcctgggataggccttttctatgtctccccaaggctggggtgctgagcctgctctaccacctagccatagtctcaaacctgtggggaaggaggttttctccctgcccgggaagaggacagataactgatttccgttcttttgactgtgttttaaaattctctttctaaacacagagtgttgggcctggtttgtttctgacaaagttacagtcctgggcctgtaatgaatgtcggcggcgctggggttgcagggaaaagacaaatcctcaaagcgtggacgtgtgtccccatggcttgtggatcagctaagctcgggatcatttccataagtctgcttttcagggattctctgctggtgctggtgcaaggacttctgttccaaaggctgggaaaaactaagctgtcccagcccctcccatttcttgggcagggctcttttcctgttgtgtcttcccccagggcctgtcctgtaccgagctctgtctgttccagccttcatccttcctggctgttgcttttcctcttaagggcctcagaactcttgctcttcctgggctgagggggaatgagtgttcttgccatttgccagcctaatgcgcatgctttctgcctctggtaacaggagtgagtgagcccctcagacctgcactctgggtgtctcctgctttcaaaggttcttaatagtgaatgctttaaaattaaagtcatcacgaaatggaagttttcccagggtggaaaataagaggaagtgctgctgtaattgggagcacaaggggcctcccaaaaaggagccccacctcagcatcactgccttaatcgtggcctccctggggtgggtggggttctctcctccctccctccctcctcctggggtgggagggcgctcctgttcccatctctgtgttccctggaggcaggtatcacaaagcatttgtgaattgctttaggtgcagggacaccacccactcaggactcttccccatcatcccttccattgccacaccctagatccagcctcaggaactaacaagttttgagaaaagcaggtggtagagcagcagcttcgtgctctcagcggtggctggctggcatttttctctagcgttgtggtgccaccttcccttcttgtcccaaggttataaggccttgtctttctctttggaatcataaagtggaacagagtccccagaactcatgtggccatttccgccagcatcactccccggtgcctatggggtcccggtgtacctaaagggagaaggaccccatgtgctagccagaaatatactgtctcttgaaggaaagcaggagctcagactcttagagccagctgtggcttcggacccaaggcctgacctaggctgctatcctaatattgcaggaggggcctctcttccaagccccaccctaagggttagcccttggccaaatcttttgccgtctaggcccagccaggcttttctgactaaataagcaataagaggctctaagctgactgagttgcaaggaccctttccgccctcccttggatctccatgtttttccagatggcggaagagcatgtgccaccccctttcctaacagacttgtccaagtgcttggcgtgggacccatgaccaaagcccaggatggcttggtgggagtgtccctgctgcatctgcatgaagcccctgctttttaggcctcactcccatcagaaccctgcctgcccacctgcaactcccccccaacaatgccattcccacttgccccagagaagctactcggccaaacctagccagggtctgttcttgtggaccagagccagcctagtcattatttgctgtcgggtttccagtttcaccgtgtgttagggtgagggatgattgtaaaatttgctcctcaaaggaatcaggccagactcaattttggagggcaagacagggaggaggccgcttcatcccagactctcttctagggcttcccaccatcagcccctcccacttgagactggtctttgggaggcaataggccaccatgcctggtcagcaccaattcaagccatgccaggaatctgcctacctgccaggttcagttcttttaaggtgcctcttcagggacacagtgtgtctctctgattgggcttctaaatcaaaagcctgatgttcgtgtccctctcatagggggagctttggacacaggaccagtttggaaaagggtcaggtaagggtttccactctgcacattgtagagggaacactctgtaggcccatgggtcccttactagagaggttgagtgaatttgccttcagttaacatgggaccttctgtttagcttcctcttgcttcccaaagattttaagcattttgtaaatgtataaactcacctctggtaacagtggcccagacgctgctttgtgctaaaagcatgggaaatgtaaaggcagtctttctctgggaaatggatgctattctattctgctgcccctacctgttcctgaggcctcatttagaaagaaaatcccctcagaaggctgtctggcacccagtgtcctagccaggccaagtatatgagaaaggtaagtccattttccccttcaggtcctcagtggattacttaaccactgctgtccctcggtccctttttcctaaacgggtttagttctgtcttttttctccttttttctaaatgctggtaaatatttacattcagccagggaagaggaggccagaggtcgggccagctgccccattcttttaacgttgtagggcctgcccatggagcggaccctcctctttggggcctcgtgagcttttttgcttatcatgttccatttcgtgccgctttcccccttcaagatgccatttggagggtaggggatctgcttcccactgtgactgggctatgggattctgactaccttgcttacagattcatggtttgataaatttgttgtattccaaaacttgaaatgcaggacgccattaagtgtctgtttatatttttggaatatttgtattacttacaattaattaataaaagtgggtttaaaaaacc

SEQ ID NO: 453336 - DNA, 3161 bp, Homo sapiens
gataaaggaagggtatgcctttgggtactccaggcacacacctttctgaaatccttctccagccagctgctgcagacaaaagatcacatttctgggaagatgagaacttgtttccagaccagcatccagtggccatcaggtcttgtggcccaaaggctatgcttgcctccggctgagtgcctgggataggccttttctatgtctccccaaggctggggtgctgagcctgctctaccacctagccatagtctcaaacctgtggggaaggaggttttctccctgcccgggaagaggacagataactgatttccgttcttttgactgtgttttaaaattctctttctaaacacagagtgttgggcctggtttgtttctgacaaagttacagtcctgggcctgtaatgaatgtcggcggcgctggggttgcagggaaaagacaaatcctcaaagcgtggacgtgtgtccccatggcttgtggatcagctaagctcgggatcatttccataagtctgcttttcagggattctctgctggtgctggtgcaaggacttctgttccaaaggctgggaaaaactaagctgtcccagcccctcccatttcttgggcagggctcttttcctgttgtgtcttcccccagggcctgtcctgtaccgagctctgtctgttccagccttcatccttcctggctgttgcttttcctcttaagggcctcagaactcttgctcttcctgggctgagggggaatgagtgttcttgccatttgccagcctaatgcgcatgctttctgcctctggtaacaggagtgagtgagcccctcagacctgcactctgggtgtctcctgctttcaaaggttcttaatagtgaatgctttaaaattaaagtcatcacgaaatggaagttttcccagggtggaaaataagaggaagtgctgctgtaattgggagcacaaggggcctcccaaaaaggagccccacctcagcatcactgccttaatcgtggcctccctggggtgggtggggttctctcctccctccctccctcctcctggggtgggagggcgctcctgttcccatctctgtgttccctggaggcaggtatcacaaagcatttgtgaattgctttaggtgcagggacaccacccactcaggactcttccccatcatcccttccattgccacaccctagatccagcctcaggaactaacaagttttgagttttctctagcgttgtggtgccaccttcccttcttgtcccaaggttataaggccttgtctttctctttggaatcataaagtggaacagagtccccagaactcatgtggccatttccgccagcatcactccccggtgcctatggggtcccggtgtacctaaagggagaaggaccccatgtgctagccagaaatatactgtctcttgaaggaaagcaggagctcagactcttagagccagctgtggcttcggacccaaggcctgacctaggctgctatcctaatattgcaggaggggcctctcttccaagccccaccctaagggttagcccttggccaaatcttttgccgtctaggcccagccaggcttttctgactaaataagcaataagaggctctaagctgactgagttgcaaggaccctttccgccctcccttggatctccatgtttttccagatggcggaagagcatgtgccaccccctttcctaacagacttgtccaagtgcttggcgtgggacccatgaccaaagcccaggatggcttggtgggagtgtccctgctgcatctgcatgaagcccctgctttttaggcctcactcccatcagaaccctgcctgcccacctgcaactcccccccaacaatgccattcccacttgccccagagaagctactcggccaaacctagccagggtctgttcttgtggaccagagccagcctagtcattatttgctgtcgggtttccagtttcaccgtgtgttagggtgagggatgattgtaaaatttgctcctcaaaggaatcaggccagactcaattttggagggcaagacagggaggaggccgcttcatcccagactctcttctagggcttcccaccatcagcccctcccacttgagactggtctttgggaggcaataggccaccatgcctggtcagcaccaattcaagccatgccaggaatctgcctacctgccaggttcagttcttttaaggtgcctcttcagggacacagtgtgtctctctgattgggcttctaaatcaaaagcctgatgttcgtgtccctctcatagggggagctttggacacaggaccagtttggaaaagggtcaggtaagggtttccactctgcacattgtagagggaacactctgtaggcccatgggtcccttactagagaggttgagtgaatttgccttcagttaacatgggaccttctgtttagcttcctcttgcttcccaaagattttaagcattttgtaaatgtataaactcacctctggtaacagtggcccagacgctgctttgtgctaaaagcatgggaaatgtaaaggcagtctttctctgggaaatggatgctattctattctgctgcccctacctgttcctgaggcctcatttagaaagaaaatcccctcagaaggctgtctggcacccagtgtcctagccaggccaagtatatgagaaaggtaagtccattttccccttcaggtcctcagtggattacttaaccactgctgtccctcggtccctttttcctaaacgggtttagttctgtcttttttctccttttttctaaatgctggtaaatatttacattcagccagggaagaggaggccagaggtcgggccagctgccccattcttttaacgttgtagggcctgcccatggagcggaccctcctctttggggcctcgtgagcttttttgcttatcatgttccatttcgtgccgctttcccccttcaagatgccatttggagggtaggggatctgcttcccactgtgactgggctatgggattctgactaccttgcttacagattcatggtttgataaatttgttgtattccaaaacttgaaatgcaggacgccattaagtgtctgtttatatttttggaatatttgtattacttacaattaattaataaaagtgggtttaaaaaacc

SEQ ID NO: 453337 - DNA, 3189 bp, Homo sapiens
gataaaggaagggtatgcctttgggtactccaggcacacacctttctgaaatccttctccagccagctgctgcagacaaaagatcacatttctgggaagatgagaacttgtttccagaccagcatccagtggccatcaggtcttgtggcccaaaggctatgcttgcctccggctgagtgcctgggataggccttttctatgtctccccaaggctggggtgctgagcctgctctaccacctagccatagtctcaaacctgtggggaaggaggttttctccctgcccgggaagaggacagataactgatttccgttcttttgactgtgttttaaaattctctttctaaacacagagtgttgggcctggtttgtttctgacaaagttacagtcctgggcctgtaatgaatgtcggcggcgctggggttgcagggaaaagacaaatcctcaaagcgtggacgtgtgtccccatggcttgtggatcagctaagctcgggatcatttccataagtctgcttttcagggattctctgctggtgctggtgcaaggacttctgttccaaaggctgggaaaaactaagctgtcccagcccctcccatttcttgggcagggctcttttcctgttgtgtcttcccccagggcctgtcctgtaccgagctctgtctgttccagccttcatccttcctggctgttgcttttcctcttaagggcctcagaactcttgctcttcctgggctgagggggaatgagtgttcttgccatttgccagcctaatgcgcatgctttctgcctctggtaacaggagtgagtgagcccctcagacctgcactctgggtgtctcctgctttcaaaggttcttaatagtgaatgctttaaaattaaagtcatcacgaaatggaagttttcccagggtggaaaataagaggaagtgctgctgtaattgggagcacaaggggcctcccaaaaaggagccccacctcagcatcactgccttaatcgtggcctccctccctccctcctcctggggtgggagggcgctcctgttcccatctctgtgttccctggaggcaggtatcacaaagcatttgtgaattgctttaggtgcagggacaccacccactcaggactcttccccatcatcccttccattgccacaccctagatccagcctcaggaactaacaagttttgagaaaagcaggtggtagagcagcagcttcgtgctctcagcggtggctggctggcatttttctctagcgttgtggtgccaccttcccttcttgtcccaaggttataaggccttgtctttctctttggaatcataaagtggaacagagtccccagaactcatgtggccatttccgccagcatcactccccggtgcctatggggtcccggtgtacctaaagggagaaggaccccatgtgctagccagaaatatactgtctcttgaaggaaagcaggagctcagactcttagagccagctgtggcttcggacccaaggcctgacctaggctgctatcctaatattgcaggaggggcctctcttccaagccccaccctaagggttagcccttggccaaatcttttgccgtctaggcccagccaggcttttctgactaaataagcaataagaggctctaagctgactgagttgcaaggaccctttccgccctcccttggatctccatgtttttccagatggcggaagagcatgtgccaccccctttcctaacagacttgtccaagtgcttggcgtgggacccatgaccaaagcccaggatggcttggtgggagtgtccctgctgcatctgcatgaagcccctgctttttaggcctcactcccatcagaaccctgcctgcccacctgcaactcccccccaacaatgccattcccacttgccccagagaagctactcggccaaacctagccagggtctgttcttgtggaccagagccagcctagtcattatttgctgtcgggtttccagtttcaccgtgtgttagggtgagggatgattgtaaaatttgctcctcaaaggaatcaggccagactcaattttggagggcaagacagggaggaggccgcttcatcccagactctcttctagggcttcccaccatcagcccctcccacttgagactggtctttgggaggcaataggccaccatgcctggtcagcaccaattcaagccatgccaggaatctgcctacctgccaggttcagttcttttaaggtgcctcttcagggacacagtgtgtctctctgattgggcttctaaatcaaaagcctgatgttcgtgtccctctcatagggggagctttggacacaggaccagtttggaaaagggtcaggtaagggtttccactctgcacattgtagagggaacactctgtaggcccatgggtcccttactagagaggttgagtgaatttgccttcagttaacatgggaccttctgtttagcttcctcttgcttcccaaagattttaagcattttgtaaatgtataaactcacctctggtaacagtggcccagacgctgctttgtgctaaaagcatgggaaatgtaaaggcagtctttctctgggaaatggatgctattctattctgctgcccctacctgttcctgaggcctcatttagaaagaaaatcccctcagaaggctgtctggcacccagtgtcctagccaggccaagtatatgagaaaggtaagtccattttccccttcaggtcctcagtggattacttaaccactgctgtccctcggtccctttttcctaaacgggtttagttctgtcttttttctccttttttctaaatgctggtaaatatttacattcagccagggaagaggaggccagaggtcgggccagctgccccattcttttaacgttgtagggcctgcccatggagcggaccctcctctttggggcctcgtgagcttttttgcttatcatgttccatttcgtgccgctttcccccttcaagatgccatttggagggtaggggatctgcttcccactgtgactgggctatgggattctgactaccttgcttacagattcatggtttgataaatttgttgtattccaaaacttgaaatgcaggacgccattaagtgtctgtttatatttttggaatatttgtattacttacaattaattaataaaagtgggtttaaaaaacc

SEQ ID NO: 453338 - DNA, 1933 bp, Homo sapiens
cttgcttctgagcggaaactgaaagtgaaatagggagctggctaccagcgttgagtcccctgtaaagccaaaccccctaaaggtctccacactgctgtttaacggcacacttgacaatggcttcagcagcacgcttgacaatgatgtgggaggaggtcacatgccctatctgcctggaccccttcgtggagcctgtgagcatcgagtgtggccacagcttctgccaggaatgcatctctcaggttgggaaaggtgggggcagcgtctgtcctgtgtgccggcagcgctttctgctcaagaatctccggcccaatcgacagctagccaacatggtgaacaaccttaaagaaatcagccaggaggccagagagggcacacagggggaacggtgtgcagtgcatggagagagacttcacctgttctgtgagaaagatgggaaggccctttgctgggtatgtgcccagtctcggaaacaccgtgaccacgccatggtccctcttgaggaggctgcacaggagtaccaggagaagctccaggtggcattaggggaactgagaagaaagcaggagttggctgagaagttggaagtggaaattgcaataaagagagcagactggaagaaaacagtggaaacacagaaatctaggattcacgcagagtttgtgcagcaaaaaaacttcctggttgaagaagaacagaggcagctgcaggagctggagaaggatgagagggagcagctgagaatcctgggggagaaagaggccaagctggcccagcagagccaggccctacaggagctcatctcagagctagatcgaaggtgccacagctcagcactggaactgctgcaggaggtgataattgtcctggaaaggagtgagtcctggaacctgaaggacctggatattacctctccagaactcaggagtgtgtgccatgtgccagggctgaagaagatgctgaggacatgtgcagtccacatcactctggatccagacacagccaatccgtggctgatactttcagaagatcggagacaagtgaggcttggagacacccagcagagcatacctggaaatgaagagagatttgatagttatcctatggtcctgggtgcccagcactttcactctggaaaacattactgggaggtagatgtgacaggaaaggaggcctgggacctgggtgtctgcagagactctgtgcgcaggaaggggcactttttgcttagttccaagagtggcttctggacaatttggttgtggaacaaacaaaaatatgaggctggcacctacccccagactcccctccaccttcaggtgcctccatgccaagttgggattttcctggactatgaggctggcatggtctccttctacaacatcactgaccatggctccctcatctactccttctctgaatgtgcctttacaggacctctgcggcccttcttcagtcctggtttcaatgatggaggaaaaaacacagcccctctaaccctctgtccactgaatattggatcacaaggatccactgactattgatggctttctctggacactgccactctccccattggcaccgcttctcagccacaaaccctgcctcttttccccatgaactctgaaccacctttgtctctgcagaggcatccggatcccagcaagcgagctttagcagggaagtcacttcaccatcaacattcctgccccagatggctttgtgattccctccagtgaagcagcctccttatatttggcccaaactcatcttgatcaaccaaaaacatgtttctgccttctttatgggacttaagttttttttttctcctctccatctctaggatgtcgtctttggtgagatctctattatatcttgtatggtttgcaaaagggcttcctaaaaataaaaaataaaatttaaaaaactgtga

SEQ ID NO: 453339 - DNA, 757 bp, Homo sapiens
tgctggggttacaggagtgagccactacacctgtctgtaaaccaggctttccaacacacttttgactgagtctaggagcctgctagctcccatgtaatggcgcctaatccctacgacaaaaatattctcagtgatttggtttcacatacaggaagaggcaacattaagtacccaagggagctttaactaaccaacctttccttcccaaacaatgctagcccacaagtggaatagagtggtttctggacacctgaactcggccattctctgcctgtgattgtttctgggcttaagccaagctgggttatgtgccctctctgccctcctttctttctcccctggggaaaaaaaaaaaaaactggtctttgagtcagagtcctgaaactgataacccttccctagccataggtcacatccatgctgggcttctggttacctcacaagcagccacacatcctttctgctttgagctggtcagaatcatctctggggcctaggaccagaggaaggagaggaacagtgccccagggaccaaagatggatcacatcacccacagggctgatgtctcagtggcgatccagcaatccagaacttactttctgtctcttttctcctcaggaggtgataattgtcctggaaaggtaaggaggagttttctttgttagaagaggggccagcagaaagcatatatgcctatgacaaaggtgattgaattagaagtacatgcactgaagttttccccatctggcttcctat

SEQ ID NO: 453340 - DNA, 1889 bp, Homo sapiens
agcgcactgaggactctcagacaccaaaccccctaaaggtctccacactgctgtttaacggcacacttgacaatggcttcagcagcacgcttgacaatgatgtgggaggaggtcacatgccctatctgcctggaccccttcgtggagcctgtgagcatcgagtgtggccacagcttctgccaggaatgcatctctcaggttgggaaaggtgggggcagcgtctgtcctgtgtgccggcagcgctttctgctcaagaatctccggcccaatcgacagctagccaacatggtgaacaaccttaaagaaatcagccaggaggccagagagggcacacagggggaacggtgtgcagtgcatggagagagacttcacctgttctgtgagaaagatgggaaggccctttgctgggtatgtgcccagtctcggaaacaccgtgaccacgccatggtccctcttgaggaggctgcacaggagtaccaggagaagctccaggtggcattaggggaactgagaagaaagcaggagttggctgagaagttggaagtggaaattgcaataaagagagcagactggaagaaaacagtggaaacacagaaatctaggattcacgcagagtttgtgcagcaaaaaaacttcctggttgaagaagaacagaggcagctgcaggagctggagaaggatgagagggagcagctgagaatcctgggggagaaagaggccaagctggcccagcagagccaggccctacaggagctcatctcagagctagatcgaaggtgccacagctcagcactggaactgctgcaggaggtgataattgtcctggaaaggagtgagtcctggaacctgaaggacctggatattacctctccagaactcaggagtgtgtgccatgtgccagggctgaagaagatgctgaggacatgtgcagtccacatcactctggatccagacacagccaatccgtggctgatactttcagaagatcggagacaagtgaggcttggagacacccagcagagcatacctggaaatgaagagagatttgatagttatcctatggtcctgggtgcccagcactttcactctggaaaacattactgggaggtagatgtgacaggaaaggaggcctgggacctgggtgtctgcagagactctgtgcgcaggaaggggcactttttgcttagttccaagagtggcttctggacaatttggttgtggaacaaacaaaaatatgaggctggcacctacccccagactcccctccaccttcaggtgcctccatgccaagttgggattttcctggactatgaggctggcatggtctccttctacaacatcactgaccatggctccctcatctactccttctctgaatgtgcctttacaggacctctgcggcccttcttcagtcctggtttcaatgatggaggaaaaaacacagcccctctaaccctctgtccactgaatattggatcacaaggatccactgactattgatggctttctctggacactgccactctccccattggcaccgcttctcagccacaaaccctgcctcttttccccatgaactctgaaccacctttgtctctgcagaggcatccggatcccagcaagcgagctttagcagggaagtcacttcaccatcaacattcctgccccagatggctttgtgattccctccagtgaagcagcctccttatatttggcccaaactcatcttgatcaaccaaaaacatgtttctgccttctttatgggacttaagttttttttttctcctctccatctctaggatgtcgtctttggtgagatctctattatatcttgtatggtttgcaaaagggcttcctaaaaataaaaaataaaatttaaaaaactgtga

SEQ ID NO: 453341 - DNA, 589 bp, Homo sapiens
cttgcttctgagcggaaactgaaagtgaaatagggagctggctaccagcgttgagtcccctgtaaagccaaaccccctaaaggtctccacactgctgtttaacggcacacttgacaatggcttcagcagcacgcttgacaatgatgtgggaggaggtcacatgccctatctgcctggaccccttcgtggagcctgtgagcatcgagtgtggccacagcttctgccaggaatgcatctctcaggttgggaaaggtgggggcagcgtctgtcctgtgtgccggcagcgctttctgctcaagaatctccggcccaatcgacagctagccaacatggtgaacaaccttaaagaaatcagccaggaggccagagagggcacacagggggaacggtgtgcagtgcatggagagagacttcacccaaactcatcttgatcaaccaaaaacatgtttctgccttctttatgggacttaagttttttttttctcctctccatctctaggatgtcgtctttggtgagatctctattatatcttgtatggtttgcaaaagggcttcctaaaaataaaaaataaaatttaaaaaactgtga

SEQ ID NO: 453342 - DNA, 1701 bp, Homo sapiens
tgctggggttacaggagtgagccactacacctgtctgtaaaccaggctttccaacacacttttgactgagtctaggagcctgctagctcccatgtaatggcgcctaatccctacgacaaaaatattctcagtgatttggtttcacatacaggaagaggcaacattaagtacccaagggagctttaactaaccaacctttccttcccaaacaatgctagcccacaagtggaatagagtggtttctggacacctgaactcggccattctctgcctgtgattgtttctgggcttaagccaagctgggttatgtgccctctctgccctcctttctttctcccctggggaaaaaaaaaaaaaactggtctttgagtcagagtcctgaaactgataacccttccctagccataggtcacatccatgctgggcttctggttacctcacaagcagccacacatcctttctgctttgagctggtcagaatcatctctggggcctaggaccagaggaaggagaggaacagtgccccagggaccaaagatggatcacatcacccacagggctgatgtctcagtggcgatccagcaatccagaacttactttctgtctcttttctcctcaggaggtgataattgtcctggaaaggagtgagtcctggaacctgaaggacctggatattacctctccagaactcaggagtgtgtgccatgtgccagggctgaagaagatgctgaggacatgtgcagtccacatcactctggatccagacacagccaatccgtggctgatactttcagaagatcggagacaagtgaggcttggagacacccagcagagcatacctggaaatgaagagagatttgatagttatcctatggtcctgggtgcccagcactttcactctggaaaacattactgggaggtagatgtgacaggaaaggaggcctgggacctgggtgtctgcagagactctgtgcgcaggaaggggcactttttgcttagttccaagagtggcttctggacaatttggttgtggaacaaacaaaaatatgaggctggcacctacccccagactcccctccaccttcaggtgcctccatgccaagttgggattttcctggactatgaggctggcatggtctccttctacaacatcactgaccatggctccctcatctactccttctctgaatgtgcctttacaggacctctgcggcccttcttcagtcctggtttcaatgatggaggaaaaaacacagcccctctaaccctctgtccactgaatattggatcacaaggatccactgactattgatggctttctctggacactgccactctccccattggcaccgcttctcagccacaaaccctgcctcttttccccatgaactctgaaccacctttgtctctgcagaggcatccggatcccagcaagcgagctttagcagggaagtcacttcaccatcaacattcctgccccagatggctttgtgattccctccagtgaagcagcctccttatatttggcccaaactcatcttgatcaaccaaaaacatgtttctgccttctttatgggacttaagttttttttttctcctctccatctctaggatgtcgtctttggtgagatctctattatatcttgtatggtttgcaaaagggcttcctaaaaataaaaaataaaatttaaaaaactgtga

SEQ ID NO: 453343 - DNA, 6614 bp, Homo sapiens
ctggtttatcaacttgacgagaatcatttcaaaattttaggaaaaaaatttatgtctcagtaaaactttgtttagaattaggtttttcagtagcaaggataaggtgaagggattaaaaatgtacgtaaaattagtagtcaatgaattctggaatgcagtctgtataatcctattcagagattatgctatttactgaatatagctttggttgtgtttaaatctgcactagtattaggtgctccttaaaagttgaaaatatatagccaataaggtataaagaagaattgacagataaatctaaacagtttctttgtatagtactaacttctgaaatgttcagtggtggcatttgataaagtaagttgtaatatgatcacattgaggaatgttatataattattaaactcaatttttataaaaggcatcattttataaaagtatcataagaaagtgccaatgtttcaatgaataaattgaggcaacatgataccaacttagtgaaaaatatacaagaccagaaggaagtaacctaaaatattactagtgattgcctctgggtaataggatatgggctttttgtctttctatatttttcattttcccactgccgtgttcctggtacctcagtgaaatgaagtgctcagttcttttaacagttgtcagtttttaaaacaaatatagtcttctggaaatgttttaggtagcattttcaattttatgtttttaagccatctcttgaatttgaataaattatttgaactgcataaatatttgcaatccattgagaacaccaaaacaaaaagtaaaaagcagaaacctaaatttttctaaattttttttaatatctagaagttgtatctcaaagtttttgtaattttcttcattgtcagattttattttttactgtcaaatatccaatgacagaggccacctcttttaaaatagaaactttaaatggaaatatacattatactaagtcttatattttatagccttgaaagtttctattcatgtaattaagctttttctgatttttagaggaacagaaagaaagtgaaaagatgaaaagtgaggagcagcctatggatttagaaaaccgttctacagccaatgttctagaagagactactgtgaaaaaagaaaaagaagatgaaaaggaacttgtgaaactgccagtcatagtgaagctagaaaaacctttgccagaaaatgaagaaaaaaagattatcaaagaagaaagtgattccttcaaggaaaatgtcaaacccattaaagttgaggtgaaggaatgtagagcagatcctaaagataccaaaagtagcatggagaagccagtggcacaggagcctgaaaggatcgaatttggtggcaatattaaatcttctcacgaaattactgagaaatctactgaagaaactgagaaacttaaaaatgaccagcaggccaagataccactaaaaaaacgagaaattaaactgagtgatgattttgacagtccagtcaagggacctttgtgtaaatcagttactccaacaaaagagtttttgaaagatgaaataaaacaagaggaagagacttgtaaaaggatctctacaatcactgctttgggtcatgaagggaaacagctggtaaatggagaagttagtgatgaaagggtagctccaaattttaagacagaaccaatagagacaaagttttatgagacaaaggaagagagctatagcccctctaaggacagaaatatcatcacggagggaaatggaacagagtccttaaattctgtcataacaagtatgaaaacaggtgagcttgagaaagaaacagcccctttgaggaaagatgcagatagttcaatatcagtcttagagatccatagtcaaaaagcacaaatagaggaacccgatcctccagaaatggaaacttctcttgattcttctgagatggcaaaagatctctcttcaaaaactgctttatcttccaccgagtcgtgtaccatgaaaggtgaagagaagtctcccaaaactaagaaggataagcgcccaccaatcctagaatgtcttgaaaagttagagaagtccaaaaagacttttcttgataaggacgcacaaagattgagtccaataccagaagaagttccaaagagtactctagagtcagaaaagcctggctctcctgaggcagctgaaacttctccaccatctaatatcattgaccactgtgagaaactagcctcagaaaaagaagtggtagaatgccagagtacaagtactgttggtggccagtctgtgaaaaaagtagacctagaaaccctaaaagaggattctgagttcacaaaggtagaaatggataatctggacaatgcccagacctctggcatagaggagccttctgagacaaagggttctatgcaaaaaagcaaattcaaatataagttggttcctgaagaagaaaccactgcctcagaaaatacagagataacctctgaaaggcagaaagagggcatcaaattaacaatcaggatatcaagtcggaaaaagaagcccgattctccccccaaagttctagaaccagaaaacaagcaagagaagacagaaaaggaagaggagaaaacaaatgtgggtcgtactttaagaagatctccaagaatatctagacccactgcaaaagtggctgagatcagagatcagaaagctgataaaaaaagaggggaaggagaagatgaggtggaagaagagtcaacagctttgcaaaaaactgacaaaaaggaaattttgaaaaaatcagagaaagatacaaattctaaagtaagcaaggtaaaacccaaaggcaaagttcgatggactggttctcggacacgtggcagatggaaatattccagcaatgatgaaagtgaagggtctggcagtgaaaaatcatctgcagcttcagaagaggaggaagaaaaggaaagtgaagaagccatcctagcagatgatgatgaaccatgcaaaaaatgtggccttccaaaccatcctgagctaattcttctgtgtgactcttgcgatagtggataccatactgcctgccttcgccctcctctgatgatcatcccagatggagaatggttctgcccaccttgccaacataaactgctctgtgaaaaattagaggaacagttgcaggatttggatgttgccttaaagaagaaagagcgtgccgaacgaagaaaagaacgcttggtgtatgttggtatcagtattgaaaacatcattcctccacaagagccagacttttctgaagatcaagaagaaaagaaaaaagattcaaaaaaatccaaagcaaacttgcttgaaaggaggtcaacaagaacaaggaaatgtataagctacagatttgatgagtttgatgaagcaattgatgaagctattgaagatgacatcaaagaagccgatggaggaggagttggccgaggaaaagatatctccaccatcacaggtcatcgtgggaaagacatctctactattttggatgaagaaagaaaagaaaataaacgaccccagagggcagctgctgctcgaaggaagaaacgccggcgattaaatgatctggacagtgatagcaacctggatgaagaagagagcgaggatgaattcaagatcagtgatggatctcaagatgagtttgttgtgtctgatgaaaacccagatgaaagtgaagaagatccgccatctaatgatgacagtgacactgacttttgtagccgtagactgaggcgacacccctctcggccaatgaggcagagcaggcgtttgcgaagaaagaccccaaagaaaaaatattccgatgatgatgaagaggaggaatctgaggagaatagtagagactctgaaagtgacttcagtgatgattttagtgatgattttgtagaaactcggcgaaggcggtcaaggagaaatcagaaaagacaaattaactacaaagaagactcagaaagtgacggttcccagaagagtttgcgacgtggtaaagaaataaggcgagtacacaagcgaagactttccagctcagagagtgaagagagctatttgtccaagaactctgaagatgatgagctagctaaagaatcaaagcggtcagttcgaaagcggggccgaagcacagacgagtattcagaagcagatgaggaggaggaggaagaggaaggcaaaccatcccgcaaacggctacaccggattgagacggatgaggaggagagttgtgacaatgctcatggagatgcaaatcagcctgcccgtgacagccagcctagggtcctgccctcagaacaagagagcaccaagaagccctaccggatagaaagtgatgaggaagaggactttgaaaatgtaggcaaagtggggagcccattggactatagcttagtggacttaccttcaaccaatggacagagccctggcaaagccattgagaacttgattggcaagcctactgagaagtctcagacccccaaggacaacagcacagccagtgcaagcctagcctccaatgggacaagtggtgggcaggaggcaggagcaccagaagaggaggaagatgagcttttgagagtgactgaccttgttgattatgtctgtaacagtgaacagttataagactttttttccatttttgtgctaatttattccacggtagctctcacaccagcgggccagttattaaaagctgtttaatttttcctagaaaactccactacagaatgacttttagaagaaaaatttcaacaaatcctgaagtctttctgtgaagtgaccagttctgaactttgaagataaataattgctgtaaattccttttgattttctttttccaggttcatggtccttggtaatttcattcatggaaaaaaatcttattataataacaacaaagatttgtatatttttgactttatatttcctgagctctcctgactttgtgaaaaagggtggatgaaaatgcattccgaatctgtgagggcccaaaacagaatttaggggtgggtgaaagcacttgtgctttagctttttcatattaaatatatattatatttaaacattcatggcatagatgatgatttacagacaatttaaaagttcaagtctgtactgttacagtttgagaattgtagataacatcatacataagtcatttagtaacagcctttgtgaaatgaacttgtttactattggagataaccacacttaataaagaagagacagtgaaagtaccatcataattaacctaaatttttgttatagcagagtttcttgtttaaaaaaaaataaaatcatctgaaaagcatttgtacagtaaaatgtataatgaagctttgccaaccagactgtgctagcaacaaatttttttaaataagctttatgcagtggtaataaggtggcctcaaatatattgtgtctgatggagagttattagtgaaatgaatgtggtctttcttaaggcctgggtggactgtaaactttgccaatagtataactcttgtcttctggccacttgatgtttaaatatctgaaatatcattttgaaaaaaatacatctatatataacatacatgaagagatgctaagctgacagtgatattttagcacatttgaagactgggaagagattttcaggtgaattttaactggtctattcttgcccttagtatctacttcaaattgaagtctacaaacaaagcagttcctttgggaggtttttagtttgagttttagcgtgtgtgtgtgtttgtgtgtgtgcgtgtgcgtgtgtgtgtgtgttggaatttcctatctgcctggatatattagcagagtttgaatgtagttttggcctttggccattaagacttctattaaaattcattaatagtcatacaaccaacatagagttgaatgagaactgccgatgtaattaataggcatgacatccatttcaaacatctcaacactttaaagaaaagccctttgtttcaagaaaaaagggtttgtaactaactaaatacctaacatgtaattgacactaaaatatgaactttgtcttatttagtttctgttatagctgtaaaatttcaggcagagccataacattgtacagagtgtagcacttgtgattaaacctagcctgttaaatcctgaaaccttcaaccattacttctgtgaatactttagccctgggatttgggtttttctgttccggtgttgtgtctgttgccggcaatggacacaccatatctgctgctggcccaaggaacgtcattaatttttctttccaaattaagtattatgtgctagtcagtgtatagtaaagcacttctcttttttattactaaaaagctggcattagatttgcattataaatacctctctaggaactttatactccttttccttcttcaacaggtattgcccttaaatcttatcttttggccttgaaagtttatagctattgtttttcagttgttcgttgttttgttttgtttcactttagttctgtagtacctgcccattaatatttttgctttgattctagcaatgtgtatgtatctgtataaaaaataaaataatgaaagcaacctaaaaataggatgcaccaataaaaag

SEQ ID NO: 453344 - DNA, 4851 bp, Homo sapiens
aaaaaaaaaaaaaaaaaaaacataacaagtatgaaaacaggtgagcttgagaaagaaacagcccctttgaggaaagatgcagatagttcaatatcagtcttagagatccatagtcaaaaagcacaaatagaggaacccgatcctccagaaatggaaacttctcttgattcttctgagatggcaaaagatctctcttcaaaaactgctttatcttccaccgagtcgtgtaccatgaaaggtgaagagaagtctcccaaaactaagaaggataagcgcccaccaatcctagaatgtcttgaaaagttagagaagtccaaaaagacttttcttgataaggacgcacaaagattgagtccaataccagaagaagttccaaagagtactctagagtcagaaaagcctggctctcctgaggcagctgaaacttctccaccatctaatatcattgaccactgtgagaaactagcctcagaaaaagaagtggtagaatgccagagtacaagtactgttggtggccagtctgtgaaaaaagtagacctagaaaccctaaaagaggattctgagttcacaaaggtagaaatggataatctggacaatgcccagacctctggcatagaggagccttctgagacaaagggttctatgcaaaaaagcaaattcaaatataagttggttcctgaagaagaaaccactgcctcagaaaatacagagataacctctgaaaggcagaaagagggcatcaaattaacaatcaggatatcaagtcggaaaaagaagcccgattctccccccaaagttctagaaccagaaaacaagcaagagaagacagaaaaggaagaggagaaaacaaatgtgggtcgtactttaagaagatctccaagaatatctagacccactgcaaaagtggctgagatcagagatcagaaagctgataaaaaaagaggggaaggagaagatgaggtggaagaagagtcaacagctttgcaaaaaactgacaaaaaggaaattttgaaaaaatcagagaaagatacaaattctaaagtaagcaaggtaaaacccaaaggcaaagttcgatggactggttctcggacacgtggcagatggaaatattccagcaatgatgaaagtgaagggtctggcagtgaaaaatcatctgcagcttcagaagaggaggaagaaaaggaaagtgaagaagccatcctagcagatgatgatgaaccatgcaaaaaatgtggccttccaaaccatcctgagctaattcttctgtgtgactcttgcgatagtggataccatactgcctgccttcgccctcctctgatgatcatcccagatggagaatggttctgcccaccttgccaacataaactgctctgtgaaaaattagaggaacagttgcaggatttggatgttgccttaaagaagaaagagcgtgccgaacgaagaaaagaacgcttggtgtatgttggtatcagtattgaaaacatcattcctccacaagagccagacttttctgaagatcaagaagaaaagaaaaaagattcaaaaaaatccaaagcaaacttgcttgaaaggaggtcaacaagaacaaggaaatgtataagctacagatttgatgagtttgatgaagcaattgatgaagctattgaagatgacatcaaagaagccgatggaggaggagttggccgaggaaaagatatctccaccatcacaggtcatcgtgggaaagacatctctactattttggatgaagaaagaaaagaaaataaacgaccccagagggcagctgctgctcgaaggaagaaacgccggcgattaaatgatctggacagtgatagcaacctggatgaagaagagagcgaggatgaattcaagatcagtgatggatctcaagatgagtttgttgtgtctgatgaaaacccagatgaaagtgaagaagatccgccatctaatgatgacagtgacactgacttttgtagccgtagactgaggcgacacccctctcggccaatgaggcagagcaggcgtttgcgaagaaagaccccaaagaaaaaatattccgatgatgatgaagaggaggaatctgaggagaatagtagagactctgaaagtgacttcagtgatgattttagtgatgattttgtagaaactcggcgaaggcggtcaaggagaaatcagaaaagacaaattaactacaaagaagactcagaaagtgacggttcccagaagagtttgcgacgtggtaaagaaataaggcgagtacacaagcgaagactttccagctcagagagtgaagagagctatttgtccaagaactctgaagatgatgagctagctaaagaatcaaagcggtcagttcgaaagcggggccgaagcacagacgagtattcagaagcagatgaggaggaggaggaagaggaaggcaaaccatcccgcaaacggctacaccggattgagacggatgaggaggagagttgtgacaatgctcatggagatgcaaatcagcctgcccgtgacagccagcctagggtcctgccctcagaacaagagagcaccaagaagccctaccggatagaaagtgatgaggaagaggactttgaaaatgtaggcaaagtggggagcccattggactatagcttagtggacttaccttcaaccaatggacagagccctggcaaagccattgagaacttgattggcaagcctactgagaagtctcagacccccaaggacaacagcacagccagtgcaagcctagcctccaatgggacaagtggtgggcaggaggcaggagcaccagaagaggaggaagatgagcttttgagagtgactgaccttgttgattatgtctgtaacagtgaacagttataagactttttttccatttttgtgctaatttattccacggtagctctcacaccagcgggccagttattaaaagctgtttaatttttcctagaaaactccactacagaatgacttttagaagaaaaatttcaacaaatcctgaagtctttctgtgaagtgaccagttctgaactttgaagataaataattgctgtaaattccttttgattttctttttccaggttcatggtccttggtaatttcattcatggaaaaaaatcttattataataacaacaaagatttgtatatttttgactttatatttcctgagctctcctgactttgtgaaaaagggtggatgaaaatgcattccgaatctgtgagggcccaaaacagaatttaggggtgggtgaaagcacttgtgctttagctttttcatattaaatatatattatatttaaacattcatggcatagatgatgatttacagacaatttaaaagttcaagtctgtactgttacagtttgagaattgtagataacatcatacataagtcatttagtaacagcctttgtgaaatgaacttgtttactattggagataaccacacttaataaagaagagacagtgaaagtaccatcataattaacctaaatttttgttatagcagagtttcttgtttaaaaaaaaataaaatcatctgaaaagcatttgtacagtaaaatgtataatgaagctttgccaaccagactgtgctagcaacaaatttttttaaataagctttatgcagtggtaataaggtggcctcaaatatattgtgtctgatggagagttattagtgaaatgaatgtggtctttcttaaggcctgggtggactgtaaactttgccaatagtataactcttgtcttctggccacttgatgtttaaatatctgaaatatcattttgaaaaaaatacatctatatataacatacatgaagagatgctaagctgacagtgatattttagcacatttgaagactgggaagagattttcaggtgaattttaactggtctattcttgcccttagtatctacttcaaattgaagtctacaaacaaagcagttcctttgggaggtttttagtttgagttttagcgtgtgtgtgtgtttgtgtgtgtgcgtgtgcgtgtgtgtgtgtgttggaatttcctatctgcctggatatattagcagagtttgaatgtagttttggcctttggccattaagacttctattaaaattcattaatagtcatacaaccaacatagagttgaatgagaactgccgatgtaattaataggcatgacatccatttcaaacatctcaacactttaaagaaaagccctttgtttcaagaaaaaagggtttgtaactaactaaatacctaacatgtaattgacactaaaatatgaactttgtcttatttagtttctgttatagctgtaaaatttcaggcagagccataacattgtacagagtgtagcacttgtgattaaacctagcctgttaaatcctgaaaccttcaaccattacttctgtgaatactttagccctgggatttgggtttttctgttccggtgttgtgtctgttgccggcaatggacacaccatatctgctgctggcccaaggaacgtcattaatttttctttccaaattaagtattatgtgctagtcagtgtatagtaaagcacttctcttttttattactaaaaagctggcattagatttgcattataaatacctctctaggaactttatactccttttccttcttcaacaggtattgcccttaaatcttatcttttggccttgaaagtttatagctattgtttttcagttgttcgttgttttgttttgtttcactttagttctgtagtacctgcccattaatatttttgctttgattctagcaatgtgtatgtatctgtataaaaaataaaataatgaaagcaacctaaaaataggatgcaccaataaaaag

SEQ ID NO: 453345 - DNA, 6274 bp, Homo sapiens
gatccgcagaggagcccacttgagagcgcctcctgtcgtctgtaaggttgccttgccatccctcggcaccccaacttcccccgcccccccatcgcctcctcctccatcctccagttcaaaatggcgacggcggcggcagcggcggcggtgatggctcctccgggctgcccgggttcgtgccccaacttcgccgtagtctgctccttcttggagcgctacgggccgctgctagacctgcctgagttgccgttccctgagctggagcgggtgctgcaggcgccgccgccggacgtcggcaacggagaagtaccaaaagaattggtggagctccatttgaagctgatgaggaaaattggcaaatctgttactgcagacagatgggaaaaatatttgatcaagatatgccaagagtttaacagtacctgggcatgggagatggagaagaagggctatcttgaaatgagtgttgaatgcaaactagcactcttaaagtacctctgtgagtgtcagtttgatgacaatctcaaattcaagaatattattaatgaggaggatgccgatactatgcgtctccagccaattggtcgagacaaagatggcctcatgtactggtaccaattggatcaagatcacaatgtcagaatgtacatagaagaacaagatgatcaagatggctcttcatggaaatgcattgtcagaggaacagaaagaaagtgaaaagatgaaaagtgaggagcagcctatggatttagaaaaccgttctacagccaatgttctagaagagactactgtgaaaaaagaaaaagaagatgaaaaggaacttgtgaaactgccagtcatagtgaagctagaaaaacctttgccagaaaatgaagaaaaaaagattatcaaagaagaaagtgattccttcaaggaaaatgtcaaacccattaaagttgaggtgaaggaatgtagagcagatcctaaagataccaaaagtagcatggagaagccagtggcacaggagcctgaaaggatcgaatttggtggcaatattaaatcttctcacgaaattactgagaaatctactgaagaaactgagaaacttaaaaatgaccagcaggccaagataccactaaaaaaacgagaaattaaactgagtgatgattttgacagtccagtcaagggacctttgtgtaaatcagttactccaacaaaagagtttttgaaagatgaaataaaacaagaggaagagacttgtaaaaggatctctacaatcactgctttgggtcatgaagggaaacagctggtaaatggagaagttagtgatgaaagggtagctccaaattttaagacagaaccaatagagacaaagttttatgagacaaaggaagagagctatagcccctctaaggacagaaatatcatcacggagggaaatggaacagagtccttaaattctgtcataacaagtatgaaaacaggtgagcttgagaaagaaacagcccctttgaggaaagatgcagatagttcaatatcagtcttagagatccatagtcaaaaagcacaaatagaggaacccgatcctccagaaatggaaacttctcttgattcttctgagatggcaaaagatctctcttcaaaaactgctttatcttccaccgagtcgtgtaccatgaaaggtgaagagaagtctcccaaaactaagaaggataagcgcccaccaatcctagaatgtcttgaaaagttagagaagtccaaaaagacttttcttgataaggacgcacaaagattgagtccaataccagaagaagttccaaagagtactctagagtcagaaaagcctggctctcctgaggcagctgaaacttctccaccatctaatatcattgaccactgtgagaaactagcctcagaaaaagaagtggtagaatgccagagtacaagtactgttggtggccagtctgtgaaaaaagtagacctagaaaccctaaaagaggattctgagttcacaaaggtagaaatggataatctggacaatgcccagacctctggcatagaggagccttctgagacaaagggttctatgcaaaaaagcaaattcaaatataagttggttcctgaagaagaaaccactgcctcagaaaatacagagataacctctgaaaggcagaaagagggcatcaaattaacaatcaggatatcaagtcggaaaaagaagcccgattctccccccaaagttctagaaccagaaaacaagcaagagaagacagaaaaggaagaggagaaaacaaatgtgggtcgtactttaagaagatctccaagaatatctagacccactgcaaaagtggctgagatcagagatcagaaagctgataaaaaaagaggggaaggagaagatgaggtggaagaagagtcaacagctttgcaaaaaactgacaaaaaggaaattttgaaaaaatcagagaaagatacaaattctaaagtaagcaaggtaaaacccaaaggcaaagttcgatggactggttctcggacacgtggcagatggaaatattccagcaatgatgaaagtgaagggtctggcagtgaaaaatcatctgcagcttcagaagaggaggaagaaaaggaaagtgaagaagccatcctagcagatgatgatgaaccatgcaaaaaatgtggccttccaaaccatcctgagctaattcttctgtgtgactcttgcgatagtggataccatactgcctgccttcgccctcctctgatgatcatcccagatggagaatggttctgcccaccttgccaacataaactgctctgtgaaaaattagaggaacagttgcaggatttggatgttgccttaaagaagaaagagcgtgccgaacgaagaaaagaacgcttggtgtatgttggtatcagtattgaaaacatcattcctccacaagagccagacttttctgaagatcaagaagaaaagaaaaaagattcaaaaaaatccaaagcaaacttgcttgaaaggaggtcaacaagaacaaggaaatgtataagctacagatttgatgagtttgatgaagcaattgatgaagctattgaagatgacatcaaagaagccgatggaggaggagttggccgaggaaaagatatctccaccatcacaggtcatcgtgggaaagacatctctactattttggatgaagaaagaaaagaaaataaacgaccccagagggcagctgctgctcgaaggaagaaacgccggcgattaaatgatctggacagtgatagcaacctggatgaagaagagagcgaggatgaattcaagatcagtgatggatctcaagatgagtttgttgtgtctgatgaaaacccagatgaaagtgaagaagatccgccatctaatgatgacagtgacactgacttttgtagccgtagactgaggcgacacccctctcggccaatgaggcagagcaggcgtttgcgaagaaagaccccaaagaaaaaatattccgatgatgatgaagaggaggaatctgaggagaatagtagagactctgaaagtgacttcagtgatgattttagtgatgattttgtagaaactcggcgaaggcggtcaaggagaaatcagaaaagacaaattaactacaaagaagactcagaaagtgacggttcccagaagagtttgcgacgtggtaaagaaataaggcgagtacacaagcgaagactttccagctcagagagtgaagagagctatttgtccaagaactctgaagatgatgagctagctaaagaatcaaagcggtcagttcgaaagcggggccgaagcacagacgagtattcagaagcagatgaggaggaggaggaagaggaaggcaaaccatcccgcaaacggctacaccggattgagacggatgaggaggagagttgtgacaatgctcatggagatgcaaatcagcctgcccgtgacagccagcctagggtcctgccctcagaacaagagagcaccaagaagccctaccggatagaaagtgatgaggaagaggactttgaaaatgtaggcaaagtggggagcccattggactatagcttagtggacttaccttcaaccaatggacagagccctggcaaagccattgagaacttgattggcaagcctactgagaagtctcagacccccaaggacaacagcacagccagtgcaagcctagcctccaatgggacaagtggtgggcaggaggcaggagcaccagaagaggaggaagatgagcttttgagagtgactgaccttgttgattatgtctgtaacagtgaacagttataagactttttttccatttttgtgctaatttattccacggtagctctcacaccagcgggccagttattaaaagctgtttaatttttcctagaaaactccactacagaatgacttttagaagaaaaatttcaacaaatcctgaagtctttctgtgaagtgaccagttctgaactttgaagataaataattgctgtaaattccttttgattttctttttccaggttcatggtccttggtaatttcattcatggaaaaaaatcttattataataacaacaaagatttgtatatttttgactttatatttcctgagctctcctgactttgtgaaaaagggtggatgaaaatgcattccgaatctgtgagggcccaaaacagaatttaggggtgggtgaaagcacttgtgctttagctttttcatattaaatatatattatatttaaacattcatggcatagatgatgatttacagacaatttaaaagttcaagtctgtactgttacagtttgagaattgtagataacatcatacataagtcatttagtaacagcctttgtgaaatgaacttgtttactattggagataaccacacttaataaagaagagacagtgaaagtaccatcataattaacctaaatttttgttatagcagagtttcttgtttaaaaaaaaataaaatcatctgaaaagcatttgtacagtaaaatgtataatgaagctttgccaaccagactgtgctagcaacaaatttttttaaataagctttatgcagtggtaataaggtggcctcaaatatattgtgtctgatggagagttattagtgaaatgaatgtggtctttcttaaggcctgggtggactgtaaactttgccaatagtataactcttgtcttctggccacttgatgtttaaatatctgaaatatcattttgaaaaaaatacatctatatataacatacatgaagagatgctaagctgacagtgatattttagcacatttgaagactgggaagagattttcaggtgaattttaactggtctattcttgcccttagtatctacttcaaattgaagtctacaaacaaagcagttcctttgggaggtttttagtttgagttttagcgtgtgtgtgtgtttgtgtgtgtgcgtgtgcgtgtgtgtgtgtgttggaatttcctatctgcctggatatattagcagagtttgaatgtagttttggcctttggccattaagacttctattaaaattcattaatagtcatacaaccaacatagagttgaatgagaactgccgatgtaattaataggcatgacatccatttcaaacatctcaacactttaaagaaaagccctttgtttcaagaaaaaagggtttgtaactaactaaatacctaacatgtaattgacactaaaatatgaactttgtcttatttagtttctgttatagctgtaaaatttcaggcagagccataacattgtacagagtgtagcacttgtgattaaacctagcctgttaaatcctgaaaccttcaaccattacttctgtgaatactttagccctgggatttgggtttttctgttccggtgttgtgtctgttgccggcaatggacacaccatatctgctgctggcccaaggaacgtcattaatttttctttccaaattaagtattatgtgctagtcagtgtatagtaaagcacttctcttttttattactaaaaagctggcattagatttgcattataaatacctctctaggaactttatactccttttccttcttcaacaggtattgcccttaaatcttatcttttggccttgaaagtttatagctattgtttttcagttgttcgttgttttgttttgtttcactttagttctgtagtacctgcccattaatatttttgctttgattctagcaatgtgtatgtatctgtataaaaaataaaataatgaaagcaacctaaaaataggatgcaccaataaaaag

SEQ ID NO: 453346 - DNA, 3672 bp, Homo sapiens
taggctaggtacgaggcccggggttaatcggccgagggaacgatgcaaaaatgtggccttccaaaccatcctgagctaattcttctgtgtgactcttgcgatagtggataccatactgcctgccttcgccctcctctgatgatcatcccagatggagaatggttctgcccaccttgccaacataaactgctctgtgaaaaattagaggaacagttgcaggatttggatgttgccttaaagaagaaagagcgtgccgaacgaagaaaagaacgcttggtgtatgttggtatcagtattgaaaacatcattcctccacaagagccagacttttctgaagatcaagaagaaaagaaaaaagattcaaaaaaatccaaagcaaacttgcttgaaaggaggtcaacaagaacaaggaaatgtataagctacagatttgatgagtttgatgaagcaattgatgaagctattgaagatgacatcaaagaagccgatggaggaggagttggccgaggaaaagatatctccaccatcacaggtcatcgtgggaaagacatctctactattttggatgaagaaagaaaagaaaataaacgaccccagagggcagctgctgctcgaaggaagaaacgccggcgattaaatgatctggacagtgatagcaacctggatgaagaagagagcgaggatgaattcaagatcagtgatggatctcaagatgagtttgttgtgtctgatgaaaacccagatgaaagtgaagaagatccgccatctaatgatgacagtgacactgacttttgtagccgtagactgaggcgacacccctctcggccaatgaggcagagcaggcgtttgcgaagaaagaccccaaagaaaaaatattccgatgatgatgaagaggaggaatctgaggagaatagtagagactctgaaagtgacttcagtgatgattttagtgatgattttgtagaaactcggcgaaggcggtcaaggagaaatcagaaaagacaaattaactacaaagaagactcagaaagtgacggttcccagaagagtttgcgacgtggtaaagaaataaggcgagtacacaagcgaagactttccagctcagagagtgaagagagctatttgtccaagaactctgaagatgatgagctagctaaagaatcaaagcggtcagttcgaaagcggggccgaagcacagacgagtattcagaagcagatgaggaggaggaggaagaggaaggcaaaccatcccgcaaacggctacaccggattgagacggatgaggaggagagttgtgacaatgctcatggagatgcaaatcagcctgcccgtgacagccagcctagggtcctgccctcagaacaagagagcaccaagaagccctaccggatagaaagtgatgaggaagaggactttgaaaatgtaggcaaagtggggagcccattggactatagcttagtggacttaccttcaaccaatggacagagccctggcaaagccattgagaacttgattggcaagcctactgagaagtctcagacccccaaggacaacagcacagccagtgcaagcctagcctccaatgggacaagtggtgggcaggaggcaggagcaccagaagaggaggaagatgagcttttgagagtgactgaccttgttgattatgtctgtaacagtgaacagttataagactttttttccatttttgtgctaatttattccacggtagctctcacaccagcgggccagttattaaaagctgtttaatttttcctagaaaactccactacagaatgacttttagaagaaaaatttcaacaaatcctgaagtctttctgtgaagtgaccagttctgaactttgaagataaataattgctgtaaattccttttgattttctttttccaggttcatggtccttggtaatttcattcatggaaaaaaatcttattataataacaacaaagatttgtatatttttgactttatatttcctgagctctcctgactttgtgaaaaagggtggatgaaaatgcattccgaatctgtgagggcccaaaacagaatttaggggtgggtgaaagcacttgtgctttagctttttcatattaaatatatattatatttaaacattcatggcatagatgatgatttacagacaatttaaaagttcaagtctgtactgttacagtttgagaattgtagataacatcatacataagtcatttagtaacagcctttgtgaaatgaacttgtttactattggagataaccacacttaataaagaagagacagtgaaagtaccatcataattaacctaaatttttgttatagcagagtttcttgtttaaaaaaaaataaaatcatctgaaaagcatttgtacagtaaaatgtataatgaagctttgccaaccagactgtgctagcaacaaatttttttaaataagctttatgcagtggtaataaggtggcctcaaatatattgtgtctgatggagagttattagtgaaatgaatgtggtctttcttaaggcctgggtggactgtaaactttgccaatagtataactcttgtcttctggccacttgatgtttaaatatctgaaatatcattttgaaaaaaatacatctatatataacatacatgaagagatgctaagctgacagtgatattttagcacatttgaagactgggaagagattttcaggtgaattttaactggtctattcttgcccttagtatctacttcaaattgaagtctacaaacaaagcagttcctttgggaggtttttagtttgagttttagcgtgtgtgtgtgtttgtgtgtgtgcgtgtgcgtgtgtgtgtgtgttggaatttcctatctgcctggatatattagcagagtttgaatgtagttttggcctttggccattaagacttctattaaaattcattaatagtcatacaaccaacatagagttgaatgagaactgccgatgtaattaataggcatgacatccatttcaaacatctcaacactttaaagaaaagccctttgtttcaagaaaaaagggtttgtaactaactaaatacctaacatgtaattgacactaaaatatgaactttgtcttatttagtttctgttatagctgtaaaatttcaggcagagccataacattgtacagagtgtagcacttgtgattaaacctagcctgttaaatcctgaaaccttcaaccattacttctgtgaatactttagccctgggatttgggtttttctgttccggtgttgtgtctgttgccggcaatggacacaccatatctgctgctggcccaaggaacgtcattaatttttctttccaaattaagtattatgtgctagtcagtgtatagtaaagcacttctcttttttattactaaaaagctggcattagatttgcattataaatacctctctaggaactttatactccttttccttcttcaacaggtattgcccttaaatcttatcttttggccttgaaagtttatagctattgtttttcagttgttcgttgttttgttttgtttcactttagttctgtagtacctgcccattaatatttttgctttgattctagcaatgtgtatgtatctgtataaaaaataaaataatgaaagcaacctaaaaataggatgcaccaataaaaag

SEQ ID NO: 453347 - DNA, 3219 bp, Homo sapiens
gatccgcagaggagcccacttgagagcgcctcctgtcgtctgtaaggttgccttgccatccctcggcaccccaacttcccccgcccccccatcgcctcctcctccatcctccagttcaaaatggcgacggcggcggcagcggcggcggtgatggctcctccgggctgcccgggttcgtgccccaacttcgccgtagtctgctccttcttggagcgctacgggccgctgctagacctgcctgagttgccgttccctgagctggagcgggtgctgcaggcgccgccgccggacgtcggcaacggagaagtaccaaaagaattggtggagctccatttgaagctgatgaggaaaattggcaaatctgttactgcagacagatgggaaaaatatttgatcaagatatgccaagagtttaacagtacctgggcatgggagatggagaagaagggctatcttgaaatgagtgttgaatgcaaactagcactcttaaagtacctctgtgagtgtcagtttgatgacaatctcaaattcaagaatattattaatgaggaggatgccgatactatgcgtctccagccaattggtcgagacaaagatggcctcatgtactggtaccaattggatcaagatcacaatgtcagaatgtacatagaagaacaagatgatcaagatggctcttcatggaaatgcattgtcagaaatcgaaacgagttggctgagactcttgcactcctgaaagcacaaattgatcctgtactattgaaaaactctagccaacaagacaactcttctcgggaaagtcccagcttagaggatgaggagactaaaaaagaggaagaaacacctaaacaagaggaacagaaagaaagtgaaaagatgaaaagtgaggagcagcctatggatttagaaaaccgttctacagccaatgttctagaagagactactgtgaaaaaagaaaaagaagatgaaaaggaacttgtgaaactgccagtcatagtgaagctagaaaaacctttgccagaaaatgaagaaaaaaagattatcaaagaagaaagtgattccttcaaggaaaatgtcaaacccattaaagttgaggtgaaggaatgtagagcagatcctaaagataccaaaagtagcatggagaagccagtggcacaggagcctgaaaggatcgaatttggtggcaatattaaatcttctcacgaaattactgagaaatctactgaagaaactgagaaacttaaaaatgaccagcaggccaagataccactaaaaaaacgagaaattaaactgagtgatgattttgacagtccagtcaagggacctttgtgtaaatcagttactccaacaaaagagtttttgaaagatgaaataaaacaagaggaagagacttgtaaaaggatctctacaatcactgctttgggtcatgaagggaaacagctggtaaatggagaagttagtgatgaaagggtagctccaaattttaagacagaaccaatagagacaaagttttatgagacaaaggaagagagctatagcccctctaaggacagaaatatcatcacggagggaaatggaacagagtccttaaattctgtcataacaagtatgaaaacaggtgagcttgagaaagaaacagcccctttgaggaaagatgcagatagttcaatatcagtcttagagatccatagtcaaaaagcacaaatagaggaacccgatcctccagaaatggaaacttctcttgattcttctgagatggcaaaagatctctcttcaaaaactgctttatcttccaccgagtcgtgtaccatgaaaggtgaagagaagtctcccaaaactaagaaggataagcgcccaccaatcctagaatgtcttgaaaagttagagaagtccaaaaagacttttcttgataaggacgcacaaagattgagtccaataccagaagaagttccaaagagtactctagagtcagaaaagcctggctctcctgaggcagctgaaacttctccaccatctaatatcattgaccactgtgagaaactagcctcagaaaaagaagtggtagaatgccagagtacaagtactgttggtggccagtctgtgaaaaaagtagacctagaaaccctaaaagaggattctgagttcacaaaggtagaaatggataatctggacaatgcccagacctctggcatagaggagccttctgagacaaagggttctatgcaaaaaagcaaattcaaatataagttggttcctgaagaagaaaccactgcctcagaaaatacagagataacctctgaaaggcagaaagagggcatcaaattaacaatcaggatatcaagtcggaaaaagaagcccgattctccccccaaagttctagaaccagaaaacaagcaagagaagacagaaaaggaagaggagaaaacaaatgtgggtcgtactttaagaagatctccaagaatatctagacccactgcaaaagtggctgagatcagagatcagaaagctgataaaaaaagaggggaaggagaagatgaggtggaagaagagtcaacagctttgcaaaaaactgacaaaaaggaaattttgaaaaaatcagagaaagatacaaattctaaagtaagcaaggtaaaacccaaaggcaaagttcgatggactggttctcggacacgtggcagatggaaatattccagcaatgatgaaagtgaagggtctggcagtgaaaaatcatctgcagcttcagaagaggaggaagaaaaggaaagtgaagaagccatcctagcagatgatgatgaaccatgcaaaaaatgtggccttccaaaccatcctgagctaattcttctgtgtgactcttgcgatagtggataccatactgcctgccttcgccctcctctgatgatcatcccagatggagaatggttctgcccaccttgccaacataaactgctctgtgaaaaattagaggaacagttgcaggatttggatgttgccttaaagaagaaagagcgtgccgaacgaaggtatttttatatgtgtgttaatgttttgtttgggaatatgagagcagaattgtctcactgtatggataaatggatccatctaaaacaaggattggcatactgtggcctgtgggccaaatccagcctcctttttgtttttgtactgcctgctaactaagaatgttttttatgtttttaaatgattggggggaaaaactag

SEQ ID NO: 453348 - DNA, 503 bp, Homo sapiens
ttttcagacctttcacatgtgctacctaaatggagattacaaaactgtttatcccaaggaactttgttctgcataaggaataacctctatgcttattatcatattttttaaggagccagacttttctgaagatcaagaagaaaagaaaaaagattcaaaaaaatccaaagcaaacttgcttgaaaggaggtcaacaagaacaaggaaatgtataagctacaggtatgaagtgtatggaaatgtctacagcaaaagaggatttattttgcaagtacacagcatgatccagaagtatatgctttttctatcatgctgattattgcagttgtatatatatttcttgccttccatctttagtcatagaattttttttttcctttttcttttttttttgagactgagtctcgctcttgttggccaggctggtctcgaatgcctgacctctggtgatttgccctcctcagcctcccaaagtgctgggattacagccatgagccaccgcg

SEQ ID NO: 453349 - DNA, 788 bp, Homo sapiens
cctttaaaacatcttgggatcttttttaaaaagtataatcactgttacatacacatgttgaaccaaatgctgttttaaacattgactattgccagtaggataggcacagaatccgtttcttttggcaaagctgtatgtttctttaacgtgtgctttatttcaaaggtactgtgctcatcttctgttcaaaaggtgtgtttaattaaacacaagaaaagcttcattgttcacttactatgtggtcccttaccagctctcagagcccactacccatgaagttaacatgtatgtaataaatgattgctaaaagttgtttaaaatgacttttatctattttgcttcttcagaaactgctctgtgaaaaattagaggaacagttgcaggatttggatgttgccttaaagaagaaagagcgtgccgaacgaaggtatttttatatgtgtgttaatgttttgtttgggaatatgagagcagaattgtctcactgtatggataaatggatccatctaaaacaaggattggcatactgtggcctgtgggccaaatccagcctcctttttgtttttgtactgcctgctaactaagaatgttttttatgtttttaaatgattggggggaaaaactagaatcatatttcatgacacatgaaaattatatgatactcaaattttattgtctgtgaataaagttttattgaacgcaaccttgctcatttgtttgtatattgtctgtggctacttttgccctgtgacagcagcattgagtagttggaacagagaccttatgac

SEQ ID NO: 453350 - DNA, 985 bp, Homo sapiens
gatccgcagaggagcccacttgagagcgcctcctgtcgtctgtaaggttgccttgccatccctcggcaccccaacttcccccgcccccccatcgcctcctcctccatcctccagttcaaaatggcgacggcggcggcagcggcggcggtgatggctcctccgggctgcccgggttcgtgccccaacttcgccgtagtctgctccttcttggagcgctacgggccgctgctagacctgcctgagttgccgttccctgagctggagcgggtgctgcaggcgccgccgccggacgtcggcaacggagaagtaccaaaagaattggtggagctccatttgaagctgatgaggaaaattggcaaatctgttactgcagacagatgggaaaaatatttgatcaagatatgccaagagtttaacagtacctgggcatgggagatggagaagaagggctatcttgaaatgagtgttgaatgcaaactagcactcttaaagtacctctgtgagtgtcagtttgatgacaatctcaaattcaagaatattattaatgaggaggatgccgatactatgcgtctccagccaattggtcgagacaaagatggcctcatgtactggtaccaattggatcaagatcacaatgtcagaatgtacatagaagaacaagatgatcaagatggctcttcatggaaatgcattgtcagcagcaaacaatggctacaaacttcctagcacatgagaagatctggttcgacaagttcaaatatgacgacgcacgaaaggagattctacgagcagatgaacgggcctgtggcaaggtgcctcccgccaggagaacggcgccagcgtgatcctccgtgacattgggaagagccagaagagaacatccagaaatcctggctggaagctcaggccccggggctcagggggcaccagcgggagaccacgggtgagctcggcgtccggatggcaggctggaagtggagaaccc

SEQ ID NO: 453351 - DNA, 6429 bp, Homo sapiens
gatccgcagaggagcccacttgagagcgcctcctgtcgtctgtaaggttgccttgccatccctcggcaccccaacttcccccgcccccccatcgcctcctcctccatcctccagttcaaaatggcgacggcggcggcagcggcggcggtgatggctcctccgggctgcccgggttcgtgccccaacttcgccgtagtctgctccttcttggagcgctacgggccgctgctagacctgcctgagttgccgttccctgagctggagcgggtgctgcaggcgccgccgccggacgtcggcaacggagaagtaccaaaagaattggtggagctccatttgaagctgatgaggaaaattggcaaatctgttactgcagacagatgggaaaaatatttgatcaagatatgccaagagtttaacagtacctgggcatgggagatggagaagaagggctatcttgaaatgagtgttgaatgcaaactagcactcttaaagtacctctgtgagtgtcagtttgatgacaatctcaaattcaagaatattattaatgaggaggatgccgatactatgcgtctccagccaattggtcgagacaaagatggcctcatgtactggtaccaattggatcaagatcacaatgtcagaatgtacatagaagaacaagatgatcaagatggctcttcatggaaatgcattgtcagaaatcgaaacgagttggctgagactcttgcactcctgaaagcacaaattgatcctgtactattgaaaaactctagccaacaagacaactcttctcgggaaagtcccagcttagaggatgaggagactaaaaaagaggaagaaacacctaaacaagaggaacagaaagaaagtgaaaagatgaaaagtgaggagcagcctatggatttagaaaaccgttctacagccaatgttctagaagagactactgtgaaaaaagaaaaagaagatgaaaaggaacttgtgaaactgccagtcatagtgaagctagaaaaacctttgccagaaaatgaagaaaaaaagattatcaaagaagaaagtgattccttcaaggaaaatgtcaaacccattaaagttgaggtgaaggaatgtagagcagatcctaaagataccaaaagtagcatggagaagccagtggcacaggagcctgaaaggatcgaatttggtggcaatattaaatcttctcacgaaattactgagaaatctactgaagaaactgagaaacttaaaaatgaccagcaggccaagataccactaaaaaaacgagaaattaaactgagtgatgattttgacagtccagtcaagggacctttgtgtaaatcagttactccaacaaaagagtttttgaaagatgaaataaaacaagaggaagagacttgtaaaaggatctctacaatcactgctttgggtcatgaagggaaacagctggtaaatggagaagttagtgatgaaagggtagctccaaattttaagacagaaccaatagagacaaagttttatgagacaaaggaagagagctatagcccctctaaggacagaaatatcatcacggagggaaatggaacagagtccttaaattctgtcataacaagtatgaaaacaggtgagcttgagaaagaaacagcccctttgaggaaagatgcagatagttcaatatcagtcttagagatccatagtcaaaaagcacaaatagaggaacccgatcctccagaaatggaaacttctcttgattcttctgagatggcaaaagatctctcttcaaaaactgctttatcttccaccgagtcgtgtaccatgaaaggtgaagagaagtctcccaaaactaagaaggataagcgcccaccaatcctagaatgtcttgaaaagttagagaagtccaaaaagacttttcttgataaggacgcacaaagattgagtccaataccagaagaagttccaaagagtactctagagtcagaaaagcctggctctcctgaggcagctgaaacttctccaccatctaatatcattgaccactgtgagaaactagcctcagaaaaagaagtggtagaatgccagagtacaagtactgttggtggccagtctgtgaaaaaagtagacctagaaaccctaaaagaggattctgagttcacaaaggtagaaatggataatctggacaatgcccagacctctggcatagaggagccttctgagacaaagggttctatgcaaaaaagcaaattcaaatataagttggttcctgaagaagaaaccactgcctcagaaaatacagagataacctctgaaaggcagaaagagggcatcaaattaacaatcaggatatcaagtcggaaaaagaagcccgattctccccccaaagttctagaaccagaaaacaagcaagagaagacagaaaaggaagaggagaaaacaaatgtgggtcgtactttaagaagatctccaagaatatctagacccactgcaaaagtggctgagatcagagatcagaaagctgataaaaaaagaggggaaggagaagatgaggtggaagaagagtcaacagctttgcaaaaaactgacaaaaaggaaattttgaaaaaatcagagaaagatacaaattctaaagtaagcaaggtaaaacccaaaggcaaagttcgatggactggttctcggacacgtggcagatggaaatattccagcaatgatgaaagtgaagggtctggcagtgaaaaatcatctgcagcttcagaagaggaggaagaaaaggaaagtgaagaagccatcctagcagatgatgatgaaccatgcaaaaaatgtggccttccaaaccatcctgagctaattcttctgtgtgactcttgcgatagtggataccatactgcctgccttcgccctcctctgatgatcatcccagatggagaatggttctgcccaccttgccaacataaactgctctgtgaaaaattagaggaacagttgcaggatttggatgttgccttaaagaagaaagagcgtgccgaacgaagaaaagaacgcttggtgtatgttggtatcagtattgaaaacatcattcctccacaagagccagacttttctgaagatcaagaagaaaagaaaaaagattcaaaaaaatccaaagcaaacttgcttgaaaggaggtcaacaagaacaaggaaatgtataagctacagatttgatgagtttgatgaagcaattgatgaagctattgaagatgacatcaaagaagccgatggaggaggagttggccgaggaaaagatatctccaccatcacaggtcatcgtgggaaagacatctctactattttggatgaagaaagaaaagaaaataaacgaccccagagggcagctgctgctcgaaggaagaaacgccggcgattaaatgatctggacagtgatagcaacctggatgaagaagagagcgaggatgaattcaagatcagtgatggatctcaagatgagtttgttgtgtctgatgaaaacccagatgaaagtgaagaagatccgccatctaatgatgacagtgacactgacttttgtagccgtagactgaggcgacacccctctcggccaatgaggcagagcaggcgtttgcgaagaaagaccccaaagaaaaaatattccgatgatgatgaagaggaggaatctgaggagaatagtagagactctgaaagtgacttcagtgatgattttagtgatgattttgtagaaactcggcgaaggcggtcaaggagaaatcagaaaagacaaattaactacaaagaagactcagaaagtgacggttcccagaagagtttgcgacgtggtaaagaaataaggcgagtacacaagcgaagactttccagctcagagagtgaagagagctatttgtccaagaactctgaagatgatgagctagctaaagaatcaaagcggtcagttcgaaagcggggccgaagcacagacgagtattcagaagcagatgaggaggaggaggaagaggaaggcaaaccatcccgcaaacggctacaccggattgagacggatgaggaggagagttgtgacaatgctcatggagatgcaaatcagcctgcccgtgacagccagcctagggtcctgccctcagaacaagagagcaccaagaagccctaccggatagaaagtgatgaggaagaggactttgaaaatgtaggcaaagtggggagcccattggactatagcttagtggacttaccttcaaccaatggacagagccctggcaaagccattgagaacttgattggcaagcctactgagaagtctcagacccccaaggacaacagcacagccagtgcaagcctagcctccaatgggacaagtggtgggcaggaggcaggagcaccagaagaggaggaagatgagcttttgagagtgactgaccttgttgattatgtctgtaacagtgaacagttataagactttttttccatttttgtgctaatttattccacggtagctctcacaccagcgggccagttattaaaagctgtttaatttttcctagaaaactccactacagaatgacttttagaagaaaaatttcaacaaatcctgaagtctttctgtgaagtgaccagttctgaactttgaagataaataattgctgtaaattccttttgattttctttttccaggttcatggtccttggtaatttcattcatggaaaaaaatcttattataataacaacaaagatttgtatatttttgactttatatttcctgagctctcctgactttgtgaaaaagggtggatgaaaatgcattccgaatctgtgagggcccaaaacagaatttaggggtgggtgaaagcacttgtgctttagctttttcatattaaatatatattatatttaaacattcatggcatagatgatgatttacagacaatttaaaagttcaagtctgtactgttacagtttgagaattgtagataacatcatacataagtcatttagtaacagcctttgtgaaatgaacttgtttactattggagataaccacacttaataaagaagagacagtgaaagtaccatcataattaacctaaatttttgttatagcagagtttcttgtttaaaaaaaaataaaatcatctgaaaagcatttgtacagtaaaatgtataatgaagctttgccaaccagactgtgctagcaacaaatttttttaaataagctttatgcagtggtaataaggtggcctcaaatatattgtgtctgatggagagttattagtgaaatgaatgtggtctttcttaaggcctgggtggactgtaaactttgccaatagtataactcttgtcttctggccacttgatgtttaaatatctgaaatatcattttgaaaaaaatacatctatatataacatacatgaagagatgctaagctgacagtgatattttagcacatttgaagactgggaagagattttcaggtgaattttaactggtctattcttgcccttagtatctacttcaaattgaagtctacaaacaaagcagttcctttgggaggtttttagtttgagttttagcgtgtgtgtgtgtttgtgtgtgtgcgtgtgcgtgtgtgtgtgtgttggaatttcctatctgcctggatatattagcagagtttgaatgtagttttggcctttggccattaagacttctattaaaattcattaatagtcatacaaccaacatagagttgaatgagaactgccgatgtaattaataggcatgacatccatttcaaacatctcaacactttaaagaaaagccctttgtttcaagaaaaaagggtttgtaactaactaaatacctaacatgtaattgacactaaaatatgaactttgtcttatttagtttctgttatagctgtaaaatttcaggcagagccataacattgtacagagtgtagcacttgtgattaaacctagcctgttaaatcctgaaaccttcaaccattacttctgtgaatactttagccctgggatttgggtttttctgttccggtgttgtgtctgttgccggcaatggacacaccatatctgctgctggcccaaggaacgtcattaatttttctttccaaattaagtattatgtgctagtcagtgtatagtaaagcacttctcttttttattactaaaaagctggcattagatttgcattataaatacctctctaggaactttatactccttttccttcttcaacaggtattgcccttaaatcttatcttttggccttgaaagtttatagctattgtttttcagttgttcgttgttttgttttgtttcactttagttctgtagtacctgcccattaatatttttgctttgattctagcaatgtgtatgtatctgtataaaaaataaaataatgaaagcaacctaaaaataggatgcaccaataaaaag

SEQ ID NO: 453352 - DNA, 6336 bp, Homo sapiens
gatccgcagaggagcccacttgagagcgcctcctgtcgtctgtaaggttgccttgccatccctcggcaccccaacttcccccgcccccccatcgcctcctcctccatcctccagttcaaaatggcgacggcggcggcagcggcggcggtgatggctcctccgggctgcccgggttcgtgccccaacttcgccgtagtctgctccttcttggagcgctacgggccgctgctagacctgcctgagttgccgttccctgagctggagcgggtgctgcaggcgccgccgccggacgtcggcaacggagaagtaccaaaagaattggtggagctccatttgaagctgatgaggaaaattggcaaatctgttactgcagacagatgggaaaaatatttgatcaagtacctctgtgagtgtcagtttgatgacaatctcaaattcaagaatattattaatgaggaggatgccgatactatgcgtctccagccaattggtcgagacaaagatggcctcatgtactggtaccaattggatcaagatcacaatgtcagaatgtacatagaagaacaagatgatcaagatggctcttcatggaaatgcattgtcagaaatcgaaacgagttggctgagactcttgcactcctgaaagcacaaattgatcctgtactattgaaaaactctagccaacaagacaactcttctcgggaaagtcccagcttagaggatgaggagactaaaaaagaggaagaaacacctaaacaagaggaacagaaagaaagtgaaaagatgaaaagtgaggagcagcctatggatttagaaaaccgttctacagccaatgttctagaagagactactgtgaaaaaagaaaaagaagatgaaaaggaacttgtgaaactgccagtcatagtgaagctagaaaaacctttgccagaaaatgaagaaaaaaagattatcaaagaagaaagtgattccttcaaggaaaatgtcaaacccattaaagttgaggtgaaggaatgtagagcagatcctaaagataccaaaagtagcatggagaagccagtggcacaggagcctgaaaggatcgaatttggtggcaatattaaatcttctcacgaaattactgagaaatctactgaagaaactgagaaacttaaaaatgaccagcaggccaagataccactaaaaaaacgagaaattaaactgagtgatgattttgacagtccagtcaagggacctttgtgtaaatcagttactccaacaaaagagtttttgaaagatgaaataaaacaagaggaagagacttgtaaaaggatctctacaatcactgctttgggtcatgaagggaaacagctggtaaatggagaagttagtgatgaaagggtagctccaaattttaagacagaaccaatagagacaaagttttatgagacaaaggaagagagctatagcccctctaaggacagaaatatcatcacggagggaaatggaacagagtccttaaattctgtcataacaagtatgaaaacaggtgagcttgagaaagaaacagcccctttgaggaaagatgcagatagttcaatatcagtcttagagatccatagtcaaaaagcacaaatagaggaacccgatcctccagaaatggaaacttctcttgattcttctgagatggcaaaagatctctcttcaaaaactgctttatcttccaccgagtcgtgtaccatgaaaggtgaagagaagtctcccaaaactaagaaggataagcgcccaccaatcctagaatgtcttgaaaagttagagaagtccaaaaagacttttcttgataaggacgcacaaagattgagtccaataccagaagaagttccaaagagtactctagagtcagaaaagcctggctctcctgaggcagctgaaacttctccaccatctaatatcattgaccactgtgagaaactagcctcagaaaaagaagtggtagaatgccagagtacaagtactgttggtggccagtctgtgaaaaaagtagacctagaaaccctaaaagaggattctgagttcacaaaggtagaaatggataatctggacaatgcccagacctctggcatagaggagccttctgagacaaagggttctatgcaaaaaagcaaattcaaatataagttggttcctgaagaagaaaccactgcctcagaaaatacagagataacctctgaaaggcagaaagagggcatcaaattaacaatcaggatatcaagtcggaaaaagaagcccgattctccccccaaagttctagaaccagaaaacaagcaagagaagacagaaaaggaagaggagaaaacaaatgtgggtcgtactttaagaagatctccaagaatatctagacccactgcaaaagtggctgagatcagagatcagaaagctgataaaaaaagaggggaaggagaagatgaggtggaagaagagtcaacagctttgcaaaaaactgacaaaaaggaaattttgaaaaaatcagagaaagatacaaattctaaagtaagcaaggtaaaacccaaaggcaaagttcgatggactggttctcggacacgtggcagatggaaatattccagcaatgatgaaagtgaagggtctggcagtgaaaaatcatctgcagcttcagaagaggaggaagaaaaggaaagtgaagaagccatcctagcagatgatgatgaaccatgcaaaaaatgtggccttccaaaccatcctgagctaattcttctgtgtgactcttgcgatagtggataccatactgcctgccttcgccctcctctgatgatcatcccagatggagaatggttctgcccaccttgccaacataaactgctctgtgaaaaattagaggaacagttgcaggatttggatgttgccttaaagaagaaagagcgtgccgaacgaagaaaagaacgcttggtgtatgttggtatcagtattgaaaacatcattcctccacaagagccagacttttctgaagatcaagaagaaaagaaaaaagattcaaaaaaatccaaagcaaacttgcttgaaaggaggtcaacaagaacaaggaaatgtataagctacagatttgatgagtttgatgaagcaattgatgaagctattgaagatgacatcaaagaagccgatggaggaggagttggccgaggaaaagatatctccaccatcacaggtcatcgtgggaaagacatctctactattttggatgaagaaagaaaagaaaataaacgaccccagagggcagctgctgctcgaaggaagaaacgccggcgattaaatgatctggacagtgatagcaacctggatgaagaagagagcgaggatgaattcaagatcagtgatggatctcaagatgagtttgttgtgtctgatgaaaacccagatgaaagtgaagaagatccgccatctaatgatgacagtgacactgacttttgtagccgtagactgaggcgacacccctctcggccaatgaggcagagcaggcgtttgcgaagaaagaccccaaagaaaaaatattccgatgatgatgaagaggaggaatctgaggagaatagtagagactctgaaagtgacttcagtgatgattttagtgatgattttgtagaaactcggcgaaggcggtcaaggagaaatcagaaaagacaaattaactacaaagaagactcagaaagtgacggttcccagaagagtttgcgacgtggtaaagaaataaggcgagtacacaagcgaagactttccagctcagagagtgaagagagctatttgtccaagaactctgaagatgatgagctagctaaagaatcaaagcggtcagttcgaaagcggggccgaagcacagacgagtattcagaagcagatgaggaggaggaggaagaggaaggcaaaccatcccgcaaacggctacaccggattgagacggatgaggaggagagttgtgacaatgctcatggagatgcaaatcagcctgcccgtgacagccagcctagggtcctgccctcagaacaagagagcaccaagaagccctaccggatagaaagtgatgaggaagaggactttgaaaatgtaggcaaagtggggagcccattggactatagcttagtggacttaccttcaaccaatggacagagccctggcaaagccattgagaacttgattggcaagcctactgagaagtctcagacccccaaggacaacagcacagccagtgcaagcctagcctccaatgggacaagtggtgggcaggaggcaggagcaccagaagaggaggaagatgagcttttgagagtgactgaccttgttgattatgtctgtaacagtgaacagttataagactttttttccatttttgtgctaatttattccacggtagctctcacaccagcgggccagttattaaaagctgtttaatttttcctagaaaactccactacagaatgacttttagaagaaaaatttcaacaaatcctgaagtctttctgtgaagtgaccagttctgaactttgaagataaataattgctgtaaattccttttgattttctttttccaggttcatggtccttggtaatttcattcatggaaaaaaatcttattataataacaacaaagatttgtatatttttgactttatatttcctgagctctcctgactttgtgaaaaagggtggatgaaaatgcattccgaatctgtgagggcccaaaacagaatttaggggtgggtgaaagcacttgtgctttagctttttcatattaaatatatattatatttaaacattcatggcatagatgatgatttacagacaatttaaaagttcaagtctgtactgttacagtttgagaattgtagataacatcatacataagtcatttagtaacagcctttgtgaaatgaacttgtttactattggagataaccacacttaataaagaagagacagtgaaagtaccatcataattaacctaaatttttgttatagcagagtttcttgtttaaaaaaaaataaaatcatctgaaaagcatttgtacagtaaaatgtataatgaagctttgccaaccagactgtgctagcaacaaatttttttaaataagctttatgcagtggtaataaggtggcctcaaatatattgtgtctgatggagagttattagtgaaatgaatgtggtctttcttaaggcctgggtggactgtaaactttgccaatagtataactcttgtcttctggccacttgatgtttaaatatctgaaatatcattttgaaaaaaatacatctatatataacatacatgaagagatgctaagctgacagtgatattttagcacatttgaagactgggaagagattttcaggtgaattttaactggtctattcttgcccttagtatctacttcaaattgaagtctacaaacaaagcagttcctttgggaggtttttagtttgagttttagcgtgtgtgtgtgtttgtgtgtgtgcgtgtgcgtgtgtgtgtgtgttggaatttcctatctgcctggatatattagcagagtttgaatgtagttttggcctttggccattaagacttctattaaaattcattaatagtcatacaaccaacatagagttgaatgagaactgccgatgtaattaataggcatgacatccatttcaaacatctcaacactttaaagaaaagccctttgtttcaagaaaaaagggtttgtaactaactaaatacctaacatgtaattgacactaaaatatgaactttgtcttatttagtttctgttatagctgtaaaatttcaggcagagccataacattgtacagagtgtagcacttgtgattaaacctagcctgttaaatcctgaaaccttcaaccattacttctgtgaatactttagccctgggatttgggtttttctgttccggtgttgtgtctgttgccggcaatggacacaccatatctgctgctggcccaaggaacgtcattaatttttctttccaaattaagtattatgtgctagtcagtgtatagtaaagcacttctcttttttattactaaaaagctggcattagatttgcattataaatacctctctaggaactttatactccttttccttcttcaacaggtattgcccttaaatcttatcttttggccttgaaagtttatagctattgtttttcagttgttcgttgttttgttttgtttcactttagttctgtagtacctgcccattaatatttttgctttgattctagcaatgtgtatgtatctgtataaaaaataaaataatgaaagcaacctaaaaataggatgcaccaataaaaag

SEQ ID NO: 453353 - DNA, 3238 bp, Homo sapiens
aaagggaagcttttaataaacacatatttttctctccccgaacttccctcccccaaattcaggagttggccgaggaaaagatatctccaccatcacaggtcatcgtgggaaagacatctctactattttggatgaagaaagaaaagaaaataaacgaccccagagggcagctgctgctcgaaggaagaaacgccggcgattaaatgatctggacagtgatagcaacctggatgaagaagagagcgaggatgaattcaagatcagtgatggatctcaagatgagtttgttgtgtctgatgaaaacccagatgaaagtgaagaagatccgccatctaatgatgacagtgacactgacttttgtagccgtagactgaggcgacacccctctcggccaatgaggcagagcaggcgtttgcgaagaaagaccccaaagaaaaaatattccgatgatgatgaagaggaggaatctgaggagaatagtagagactctgaaagtgacttcagtgatgattttagtgatgattttgtagaaactcggcgaaggcggtcaaggagaaatcagaaaagacaaattaactacaaagaagactcagaaagtgacggttcccagaagagtttgcgacgtggtaaagaaataaggcgagtacacaagcgaagactttccagctcagagagtgaagagagctatttgtccaagaactctgaagatgatgagctagctaaagaatcaaagcggtcagttcgaaagcggggccgaagcacagacgagtattcagaagcagatgaggaggaggaggaagaggaaggcaaaccatcccgcaaacggctacaccggattgagacggatgaggaggagagttgtgacaatgctcatggagatgcaaatcagcctgcccgtgacagccagcctagggtcctgccctcagaacaagagagcaccaagaagccctaccggatagaaagtgatgaggaagaggactttgaaaatgtaggcaaagtggggagcccattggactatagcttagtggacttaccttcaaccaatggacagagccctggcaaagccattgagaacttgattggcaagcctactgagaagtctcagacccccaaggacaacagcacagccagtgcaagcctagcctccaatgggacaagtggtgggcaggaggcaggagcaccagaagaggaggaagatgagcttttgagagtgactgaccttgttgattatgtctgtaacagtgaacagttataagactttttttccatttttgtgctaatttattccacggtagctctcacaccagcgggccagttattaaaagctgtttaatttttcctagaaaactccactacagaatgacttttagaagaaaaatttcaacaaatcctgaagtctttctgtgaagtgaccagttctgaactttgaagataaataattgctgtaaattccttttgattttctttttccaggttcatggtccttggtaatttcattcatggaaaaaaatcttattataataacaacaaagatttgtatatttttgactttatatttcctgagctctcctgactttgtgaaaaagggtggatgaaaatgcattccgaatctgtgagggcccaaaacagaatttaggggtgggtgaaagcacttgtgctttagctttttcatattaaatatatattatatttaaacattcatggcatagatgatgatttacagacaatttaaaagttcaagtctgtactgttacagtttgagaattgtagataacatcatacataagtcatttagtaacagcctttgtgaaatgaacttgtttactattggagataaccacacttaataaagaagagacagtgaaagtaccatcataattaacctaaatttttgttatagcagagtttcttgtttaaaaaaaaataaaatcatctgaaaagcatttgtacagtaaaatgtataatgaagctttgccaaccagactgtgctagcaacaaatttttttaaataagctttatgcagtggtaataaggtggcctcaaatatattgtgtctgatggagagttattagtgaaatgaatgtggtctttcttaaggcctgggtggactgtaaactttgccaatagtataactcttgtcttctggccacttgatgtttaaatatctgaaatatcattttgaaaaaaatacatctatatataacatacatgaagagatgctaagctgacagtgatattttagcacatttgaagactgggaagagattttcaggtgaattttaactggtctattcttgcccttagtatctacttcaaattgaagtctacaaacaaagcagttcctttgggaggtttttagtttgagttttagcgtgtgtgtgtgtttgtgtgtgtgcgtgtgcgtgtgtgtgtgtgttggaatttcctatctgcctggatatattagcagagtttgaatgtagttttggcctttggccattaagacttctattaaaattcattaatagtcatacaaccaacatagagttgaatgagaactgccgatgtaattaataggcatgacatccatttcaaacatctcaacactttaaagaaaagccctttgtttcaagaaaaaagggtttgtaactaactaaatacctaacatgtaattgacactaaaatatgaactttgtcttatttagtttctgttatagctgtaaaatttcaggcagagccataacattgtacagagtgtagcacttgtgattaaacctagcctgttaaatcctgaaaccttcaaccattacttctgtgaatactttagccctgggatttgggtttttctgttccggtgttgtgtctgttgccggcaatggacacaccatatctgctgctggcccaaggaacgtcattaatttttctttccaaattaagtattatgtgctagtcagtgtatagtaaagcacttctcttttttattactaaaaagctggcattagatttgcattataaatacctctctaggaactttatactccttttccttcttcaacaggtattgcccttaaatcttatcttttggccttgaaagtttatagctattgtttttcagttgttcgttgttttgttttgtttcactttagttctgtagtacctgcccattaatatttttgctttgattctagcaatgtgtatgtatctgtataaaaaataaaataatgaaagcaacctaaaaataggatgcaccaataaaaag

SEQ ID NO: 453354 - DNA, 2982 bp, Homo sapiens
gatccgcagaggagcccacttgagagcgcctcctgtcgtctgtaaggttgccttgccatccctcggcaccccaacttcccccgcccccccatcgcctcctcctccatcctccagttcaaaatggcgacggcggcggcagcggcggcggtgatggctcctccgggctgcccgggttcgtgccccaacttcgccgtagtctgctccttcttggagcgctacgggccgctgctagacctgcctgagttgccgttccctgagctggagcgggtgctgcaggcgccgccgccggacgtcggcaacggagaagtaccaaaagaattggtggagctccatttgaagctgatgaggaaaattggcaaatctgttactgcagacagatgggaaaaatatttgatcaagatatgccaagagtttaacagtacctgggcatgggagatggagaagaagggctatcttgaaatgagtgttgaatgcaaactagcactcttaaagtacctctgtgagtgtcagtttgatgacaatctcaaattcaagaatattattaatgaggaggatgccgatactatgcgtctccagccaattggtcgagacaaagatggcctcatgtactggtaccaattggatcaagatcacaatgtcagaatgtacatagaagaacaagatgatcaagatggctcttcatggaaatgcattgtcagaaatcgaaacgagttggctgagactcttgcactcctgaaagcacaaattgatcctgtactattgaaaaactctagccaacaagacaactcttctcgggaaagtcccagcttagaggatgaggagactaaaaaagaggaagaaacacctaaacaagaggaacagaaagaaagtgaaaagatgaaaagtgaggagcagcctatggatttagaaaaccgttctacagccaatgttctagaagagactactgtgaaaaaagaaaaagaagatgaaaaggaacttgtgaaactgccagtcatagtgaagctagaaaaacctttgccagaaaatgaagaaaaaaagattatcaaagaagaaagtgattccttcaaggaaaatgtcaaacccattaaagttgaggtgaaggaatgtagagcagatcctaaagataccaaaagtagcatggagaagccagtggcacaggagcctgaaaggatcgaatttggtggcaatattaaatcttctcacgaaattactgagaaatctactgaagaaactgagaaacttaaaaatgaccagcaggccaagataccactaaaaaaacgagaaattaaactgagtgatgattttgacagtccagtcaagggacctttgtgtaaatcagttactccaacaaaagagtttttgaaagatgaaataaaacaagaggaagagacttgtaaaaggatctctacaatcactgctttgggtcatgaagggaaacagctggtaaatggagaagttagtgatgaaagggtagctccaaattttaagacagaaccaatagagacaaagttttatgagacaaaggaagagagctatagcccctctaaggacagaaatatcatcacggagggaaatggaacagagtccttaaattctgtcataacaagtatgaaaacaggtgagcttgagaaagaaacagcccctttgaggaaagatgcagatagttcaatatcagtcttagagatccatagtcaaaaagcacaaatagaggaacccgatcctccagaaatggaaacttctcttgattcttctgagatggcaaaagatctctcttcaaaaactgctttatcttccaccgagtcgtgtaccatgaaaggtgaagagaagtctcccaaaactaagaaggataagcgcccaccaatcctagaatgtcttgaaaagttagagaagtccaaaaagacttttcttgataaggacgcacaaagattgagtccaataccagaagaagttccaaagagtactctagagtcagaaaagcctggctctcctgaggcagctgaaacttctccaccatctaatatcattgaccactgtgagaaactagcctcagaaaaagaagtggtagaatgccagagtacaagtactgttggtggccagtctgtgaaaaaagtagacctagaaaccctaaaagaggattctgagttcacaaaggtagaaatggataatctggacaatgcccagacctctggcatagaggagccttctgagacaaagggttctatgcaaaaaagcaaattcaaatataagttggttcctgaagaagaaaccactgcctcagaaaatacagagataacctctgaaaggcagaaagagggcatcaaattaacaatcaggatatcaagtcggaaaaagaagcccgattctccccccaaagttctagaaccagaaaacaagcaagagaagacagaaaaggaagaggagaaaacaaatgtgggtcgtactttaagaagatctccaagaatatctagacccactgcaaaagtggctgagatcagagatcagaaagctgataaaaaaagaggggaaggagaagatgaggtggaagaagagtcaacagctttgcaaaaaactgacaaaaaggaaattttgaaaaaatcagagaaagatacaaattctaaagtaagcaaggtaaaacccaaaggcaaagttcgatggactggttctcggacacgtggcagatggaaatattccagcaatgatgaaagtgaagggtctggcagtgaaaaatcatctgcagcttcagaagaggaggaagaaaaggaaagtgaagaagccatcctagcagatgatgatgaaccatgcaaaaaatgtggccttccaaaccatcctgagctatctaccaaatgctgcatatggattttcatttaatcctcatagcaactctttgagaggaacagaaagaaagtgaaaagatgaaaagtgaggagcagcctatggatttagaaaaccgttctacagccaatgttctagaagagactactg

SEQ ID NO: 453355 - DNA, 183 bp, Homo sapiens
ggggcagtcactcagggggcatttgactcacaccagttagtttcctgcctctgccttgacccgaaggtcttacaggaactgtgtgtgtcctacacaatggtgctattctgtgtcaaacacctctgtattttttaaaacatcaattgatattaaaaatgaaaagattattggaaagtaaaaaaa

SEQ ID NO: 453356 - DNA, 3092 bp, Homo sapiens
agcggagtggtgcaggaagacgcctgtgctgcccacactgctgacctcccctgggccctactagctgtggctctcagggtctctggaacactggctcagctcaccttttcttttccactgcagggacctgctggtgaacgaggcgagcagggtgctcctgggccatctgggttccagggacttcctggccctcctggtcccccaggtgaaggtggaaaaccaggtgaccagggtgttcccggtgaagctggagcccctggcctcgtgggtcccaggggtgaacgaggtttcccaggtgaacgtggctctcccggtgcccagggcctccagggtccccgtggcctccccggcactcctggcactgatggtcccaaaggtgcatctggcccagcaggcccccctggggctcagggccctccaggtcttcagggaatgcctggcgagaggggagcagctggtatcgctgggcccaaaggcgacaggggtgacgttggtgagaaaggccctgagggagcccctggaaaggatggtggacgaggcctgacaggtcccattggcccccctggcccagctggtgctaatggcgagaagggagaagttggacctcctggtcctgcaggaagtgctggtgctcgtggcgctccgggtgaacgtggagagactgggccccccggaccagcgggatttgctgggcctcctggtgctgatggccagcctggggccaagggtgagcaaggagaggccggccagaaaggcgatgctggtgcccctggtcctcagggcccctctggagcacctgggcctcagggtcctactggagtgactggtcctaaaggagcccgaggtgcccaaggccccccgggagccactggattccctggagctgctggccgcgttggacccccaggctccaatggcaaccctggaccccctggtccccctggtccttctggaaaagatggtcccaaaggtgctcgaggagacagcggcccccctggccgagctggtgaacccggcctccaaggtcctgctggaccccctggcgagaagggagagcctggagatgacggtccctctggtgccgaaggtccaccaggtccccagggtctggctggtcagagaggcatcgtcggtctgcctgggcaacgtggtgagagaggattccctggcttgcctggcccgtcgggtgagcccggcaagcagggtgctcctggagcatctggagacagaggtcctcctggccccgtgggtcctcctggcctgacgggtcctgcaggtgaacctggacgagagggaagccccggtgctgatggcccccctggcagagatggcgctgctggagtcaagggtgatcgtggtgagactggtgctgtgggagctcctggagcccctgggccccctggctcccctggccccgctggtccaactggcaagcaaggagacagaggagaagctggtgcacaaggccccatgggaccctcaggaccagctggagcccggggaatccagggtcctcaaggccccagaggtgacaaaggagaggctggagagcctggcgagagaggcctgaagggacaccgtggcttcactggtctgcagggtctgcccggccctcctggtccttctggagaccaaggtgcttctggtcctgctggtccttctggccctagaggtcctcctggccccgtcggtccctctggcaaagatggtgctaatggaatccctggccccattgggcctcctggtccccgtggacgatcaggcgaaaccggccctgctggtcctcctggaaatcctggaccccctggtcctccaggtccccctggccctggcatcgacatgtccgcctttgctggcttaggcccgagagagaagggccccgaccccctgcagtacatgcgggccgaccaggcagccggtggcctgagacagcatgacgccgaggtggatgccacactcaagtccctcaacaaccagattgagagcatccgcagccccgagggctcccgcaagaaccctgctcgcacctgcagagacctgaaactctgccaccctgagtggaagagtggagactactggattgaccccaaccaaggctgcaccttggacgccatgaaggttttctgcaacatggagactggcgagacttgcgtctaccccaatccagcaaacgttcccaagaagaactggtggagcagcaagagcaaggagaagaaacacatctggtttggagaaaccatcaatggtggcttccatttcagctatggagatgacaatctggctcccaacactgccaacgtccagatgaccttcctacgcctgctgtccacggaaggctcccagaacatcacctaccactgcaagaacagcattgcctatctggacgaagcagctggcaacctcaagaaggccctgctcatccagggctccaatgacgtggagatccgggcagagggcaatagcaggttcacgtacactgccctgaaggatggctgcacgaaacataccggtaagtggggcaagactgttatcgagtaccggtcacagaagacctcacgcctccccatcattgacattgcacccatggacataggagggcccgagcaggaattcggtgtggacatagggccggtctgcttcttgtaaaaacctgaacccagaaacaacacaatccgttgcaaacccaaaggacccaagtactttccaatctcagtcactctaggactctgcactgaatggctgacctgacctgatgtccattcatcccaccctctcacagttcggacttttctcccctctctttctaagagacctgaactgggcagactgcaaaataaaatctcggtgttctatttatttattgtcttcctgtaagaccttcgggtcaaggcagaggcaggaaactaactggtgtgagtcaaatgccccctgagtgactgcccccagcccaggccagaagacctcccttcaggtgccgggcgcaggaactgtgtgtgtcctacacaatggtgctattctgtgtcaaacacctctgtattttttaaaacatcaattgatattaaaaatgaaaagattattggaaagtaaaaaaa

SEQ ID NO: 453357 - DNA, 4068 bp, Homo sapiens
  misc_feature (1012)..(1012): n is a, c, g, or t
  misc_feature (1264)..(1264): n is a, c, g, or t
acgcagagcgctgctgggctgccgggtctcccgcttcctcctcctgctccaagggcctcctgcatgagggcgcggtagagacccggacccgcgccgtgctcctgccgtttcgctgcgctccgcccgggcccggctcagccaggccccgcggtgagccatgattcgcctcggggctccccagtcgctggtgctgctgacgctgctcgtcgccgctgtccttcggtgtcagggccaggatgtccggcaaccaggaccaaagggacagaaaggagaacctggagacatcaaggatattgtaggacccaaaggacctcctgggcctcagggacctgcaggggaacaaggacccagaggggatcgtggtgacaaaggtgaaaaaggtgcccctggacctcgtggcagagatggagaacctgggacccctggaaatcctggcccccctggtcctcccggcccccctggtccccctggtcttggtggaaactttgctgcccagatggctggaggatttgatgaaaaggctggtggcgcccagttgggagtaatgcaaggaccaatgggccccatgggacctcgaggacctccaggccctgcaggtgctcctgggcctcaaggatttcaaggcaatcctggtgaacctggtgaacctggtgtctctggtcccatgggtccccgtggtcctcctggtccccctggaaagcctggtgatgatggtgaagctggaaaacctggaaaagctggtgaaaggggtccgcctggtcctcagggtgctcgtggtttcccaggaaccccaggccttcctggtgtcaaaggtcacagaggttatccaggcctggacggtgctaagggagaggcgggtgctcctggtgtgaagggtgagagtggttccccgggtgagaacggatctccgggcccaatgggtcctcgtggcctgcctggtgaaagaggacggactggccctgctggcgctgcgggtgcccgaggcaacgatggtcagccaggccccgcaggncctccgggtcctgtcggtcctgctggtggtcctggcttccctggtgctcctggagccaagggtgaagccggccccactggtgcccgtggtcctgaaggtgctcaaggtcctcgcggtgaacctggtactcctgggtcccctgggcctgctggtgcctccggtaaccctggaacagatggaattcctggagccaaaggatctgctggtgctcctggcattgctggtgctcctggcttccctgggccacggggncctcctggccctcaaggtgcaactggtcctctgggcccgaaaggtcagacgggtgaacctggtattgctggcttcaaaggtgaacaaggccccaagggagaacctggccctgctggcccccagggagcccctggacccgctggtgaagaaggcaagagaggtgcccgtggagagcctggtggcgttgggcccatcggtccccctggagaaagaggtgctcccggcaaccgcggtttcccaggtcaagatggtctggcaggtcccaagggagcccctggagagcgagggcccagtggtcttgctggccccaagggagccaacggtgaccctggccgtcctggagaacctggccttcctggagcccggggtctcactggccgccctggtgatgctggtcctcaaggcaaagttggcccttctggagcccctggtgaagatggtcgtcctggacctccaggtcctcagggggctcgtgggcagcctggtgtcatgggtttccctggccccaaaggtgccaacggtgagcctggcaaagctggtgagaagggactgcctggtgctcctggtctgaggggtcttcctggcaaagatggtgagacaggtgctgcaggaccccctggccctgctggacctgctggtgaacgaggcgagcagggtgctcctgggccatctgggttccagggacttcctggccctcctggtcccccaggtgaaggtggaaaaccaggtgaccagggtgttcccggtgaagctggagcccctggcctcgtgggtcccaggggtgaacgaggtttcccaggtgaacgtggctctcccggtgcccagggcctccagggtccccgtggcctccccggcactcctggcactgatggtcccaaaggtgcatctggcccagcaggcccccctggggctcagggccctccaggtcttcagggaatgcctggcgagaggggagcagctggtatcgctgggcccaaaggcgacaggggtgacgttggtgagaaaggccctgagggagcccctggaaaggatggtggacgaggcctgacaggtcccattggcccccctggcccagctggtgctaatggcgagaagggagaagttggacctcctggtcctgcaggaagtgctggtgctcgtggcgctccgggtgaacgtggagagactgggccccccggaccagcgggatttgctgggcctcctggtgctgatggccagcctggggccaagggtgagcaaggagaggccggccagaaaggcgatgctggtgcccctggtcctcagggcccctctggagcacctgggcctcagggtcctactggagtgactggtcctaaaggagcccgaggtgcccaaggccccccgggagccactggattccctggagctgctggccgcgttggacccccaggctccaatggcaaccctggaccccctggtccccctggtccttctggaaaagatggtcccaaaggtgctcgaggagacagcggcccccctggccgagctggtgaacccggcctccaaggtcctgctggaccccctggcgagaagggagagcctggagatgacggtccctctggtgccgaaggtccaccaggtccccagggtctggctggtcagagaggcatcgtcggtctgcctgggcaacgtggtgagagaggattccctggcttgcctggcccgtcgggtgagcccggcaagcagggtgctcctggagcatctggagacagaggtcctcctggccccgtgggtcctcctggcctgacgggtcctgcaggtgaacctggacgagagggaagccccggtgctgatggcccccctggcagagatggcgctgctggagtcaagggtgatcgtggtgagactggtgctgtgggagctcctggagcccctgggccccctggctcccctggccccgctggtccaactggcaagcaaggagacagaggagaagctggtgcacaaggccccatgggaccctcaggaccagctggagcccggggaatccagggtcctcaaggccccagaggtgacaaaggagaggctggagagcctggcgagagaggcctgaagggacaccgtggcttcactggtctgcagggtctgcccggccctcctggtccttctggagaccaaggtgcttctggtcctgctggtccttctggccctagaggtcctcctggccccgtcggtccctctggcaaagatggtgctaatggaatccctggccccattgggcctcctggtccccgtggacgatcaggcgaaaccggccctgctggtcctcctggaaatcctggaccccctggtcctccaggtccccctggccctggcatcgacatgtccgcctttgctggcttaggcccgagagagaagggccccgaccccctgcagtacatgcgggccgaccaggcagccggtggcctgagacagcatgacgccgaggtggatgccacactcaagtccctcaacaaccagattgagagcatccgcagccccgagggctcccgcaagaaccctgctcgcacctgcagagacctgaaactctgccaccctgagtggaagagtggagactactggattgaccccaaccaaggctgcaccttggacgccatgaaggttttctgcaacatggagactggcgagacttgcgtctaccccaatccagcaaacgttcccaagaagaactggtggagcagcaagagcaaggagaagaaacacatctggtttggagaaaccatcaatggtggcttccatttcagctattgggatgacattttgggtccacacctgccacggtc

SEQ ID NO: 453358 - DNA, 4016 bp, Homo sapiens
  misc_feature (1012)..(1012): n is a, c, g, or t
  misc_feature (1264)..(1264): n is a, c, g, or t
acgcagagcgctgctgggctgccgggtctcccgcttcctcctcctgctccaagggcctcctgcatgagggcgcggtagagacccggacccgcgccgtgctcctgccgtttcgctgcgctccgcccgggcccggctcagccaggccccgcggtgagccatgattcgcctcggggctccccagtcgctggtgctgctgacgctgctcgtcgccgctgtccttcggtgtcagggccaggatgtccggcaaccaggaccaaagggacagaaaggagaacctggagacatcaaggatattgtaggacccaaaggacctcctgggcctcagggacctgcaggggaacaaggacccagaggggatcgtggtgacaaaggtgaaaaaggtgcccctggacctcgtggcagagatggagaacctgggacccctggaaatcctggcccccctggtcctcccggcccccctggtccccctggtcttggtggaaactttgctgcccagatggctggaggatttgatgaaaaggctggtggcgcccagttgggagtaatgcaaggaccaatgggccccatgggacctcgaggacctccaggccctgcaggtgctcctgggcctcaaggatttcaaggcaatcctggtgaacctggtgaacctggtgtctctggtcccatgggtccccgtggtcctcctggtccccctggaaagcctggtgatgatggtgaagctggaaaacctggaaaagctggtgaaaggggtccgcctggtcctcagggtgctcgtggtttcccaggaaccccaggccttcctggtgtcaaaggtcacagaggttatccaggcctggacggtgctaagggagaggcgggtgctcctggtgtgaagggtgagagtggttccccgggtgagaacggatctccgggcccaatgggtcctcgtggcctgcctggtgaaagaggacggactggccctgctggcgctgcgggtgcccgaggcaacgatggtcagccaggccccgcaggncctccgggtcctgtcggtcctgctggtggtcctggcttccctggtgctcctggagccaagggtgaagccggccccactggtgcccgtggtcctgaaggtgctcaaggtcctcgcggtgaacctggtactcctgggtcccctgggcctgctggtgcctccggtaaccctggaacagatggaattcctggagccaaaggatctgctggtgctcctggcattgctggtgctcctggcttccctgggccacggggncctcctggccctcaaggtgcaactggtcctctgggcccgaaaggtcagacgggtgaacctggtattgctggcttcaaaggtgaacaaggccccaagggagaacctggccctgctggcccccagggagcccctggacccgctggtgaagaaggcaagagaggtgcccgtggagagcctggtggcgttgggcccatcggtccccctggagaaagaggtgctcccggcaaccgcggtttcccaggtcaagatggtctggcaggtcccaagggagcccctggagagcgagggcccagtggtcttgctggccccaagggagccaacggtgaccctggccgtcctggagaacctggccttcctggagcccggggtctcactggccgccctggtgatgctggtcctcaaggcaaagttggcccttctggagcccctggtgaagatggtcgtcctggacctccaggtcctcagggggctcgtgggcagcctggtgtcatgggtttccctggccccaaaggtgccaacggtgagcctggcaaagctggtgagaagggactgcctggtgctcctggtctgaggggtcttcctggcaaagatggtgagacaggtgctgcaggaccccctggccctgctggacctgctggtgaacgaggcgagcagggtgctcctgggccatctgggttccagggacttcctggccctcctggtcccccaggtgaaggtggaaaaccaggtgaccagggtgttcccggtgaagctggagcccctggcctcgtgggtcccaggggtgaacgaggtttcccaggtgaacgtggctctcccggtgcccagggcctccagggtccccgtggcctccccggcactcctggcactgatggtcccaaaggtgcatctggcccagcaggcccccctggggctcagggccctccaggtcttcagggaatgcctggcgagaggggagcagctggtatcgctgggcccaaaggcgacaggggtgacgttggtgagaaaggccctgagggagcccctggaaaggatggtggacgaggcctgacaggtcccattggcccccctggcccagctggtgctaatggcgagaagggagaagttggacctcctggtcctgcaggaagtgctggtgctcgtggcgctccgggtgaacgtggagagactgggccccccggaccagcgggatttgctgggcctcctggtgctgatggccagcctggggccaagggtgagcaaggagaggccggccagaaaggcgatgctggtgcccctggtcctcagggcccctctggagcacctgggcctcagggtcctactggagtgactggtcctaaaggagcccgaggtgcccaaggccccccgggagccactggattccctggagctgctggccgcgttggacccccaggctccaatggcaaccctggaccccctggtccccctggtccttctggaaaagatggtcccaaaggtgctcgaggagacagcggcccccctggccgagctggtgaacccggcctccaaggtcctgctggaccccctggcgagaagggagagcctggagatgacggtccctctggtgccgaaggtccaccaggtccccagggtctggctggtcagagaggcatcgtcggtctgcctgggcaacgtggtgagagaggattccctggcttgcctggcccgtcgggtgagcccggcaagcagggtgctcctggagcatctggagacagaggtcctcctggccccgtgggtcctcctggcctgacgggtcctgcaggtgaacctggacgagagggaagccccggtgctgatggcccccctggcagagatggcgctgctggagtcaagggtgatcgtggtgagactggtgctgtgggagctcctggagcccctgggccccctggctcccctggccccgctggtccaactggcaagcaaggagacagaggagaagctggtgcacaaggccccatgggaccctcaggaccagctggagcccggggaatccagggtcctcaaggccccagaggtgacaaaggagaggctggagagcctggcgagagaggcctgaagggacaccgtggcttcactggtctgcagggtctgcccggccctcctggtccttctggagaccaaggtgcttctggtcctgctggtccttctggccctagaggtcctcctggccccgtcggtccctctggcaaagatggtgctaatggaatccctggccccattgggcctcctggtccccgtggacgatcaggcgaaaccggccctgctggtcctcctggaaatcctggaccccctggtcctccaggtccccctggccctggcatcgacatgtccgcctttgctggcttaggcccgagagagaagggccccgaccccctgcagtacatgcgggccgaccaggcagccggtggcctgagacagcatgacgccgaggtggatgccacactcaagtccctcaacaaccagattgagagcatccgcagccccgagggctcccgcaagaaccctgctcgcacctgcagagacctgaaactctgccaccctgagtggaagagtggagactactggattgaccccaaccaaggctgcaccttggacgccatgaaggttttctgcaacatggagactggcgagacttgcgtctaccccaatccagcaaacgttcccaagaagaactggtggagcagcaagagcaaggagagagatgacatttgggttcccaacactggccggtccg

SEQ ID NO: 453359 - DNA, 491 bp, Homo sapiens
tgcccagatggctggaggatttgatgaaaaggctggtggcgcccagttgggagtaatgcaaggaccaatggtaagaaaagacactagttctttgcagccaaaatggcaggaggtggcccttagcagagccagagagtctgacaacctctgctttacagataattgcttagagtggctctcctccgtagttatgtaacctcccattcagctagcccaaagcatttggtttttaatggcaatggatgccacttttaatgatgcgctggagtgactaagaagaatgaagatggggagatgcatataggctgatctgttagaagaccagttgctattgctcttggaatgagaactgaagaatgcagacagcagctactgttctccagcatccacagacttccagcaggaaatctcagcccgcagctctgacttggcacatgctaaatgaaactcagcctttagtaaacatggctgctgtccaggagaaagcaagg

SEQ ID NO: 453360 - DNA, 4860 bp, Homo sapiens
  misc_feature (1012)..(1012): n is a, c, g, or t
  misc_feature (1264)..(1264): n is a, c, g, or t
acgcagagcgctgctgggctgccgggtctcccgcttcctcctcctgctccaagggcctcctgcatgagggcgcggtagagacccggacccgcgccgtgctcctgccgtttcgctgcgctccgcccgggcccggctcagccaggccccgcggtgagccatgattcgcctcggggctccccagtcgctggtgctgctgacgctgctcgtcgccgctgtccttcggtgtcagggccaggatgtccggcaaccaggaccaaagggacagaaaggagaacctggagacatcaaggatattgtaggacccaaaggacctcctgggcctcagggacctgcaggggaacaaggacccagaggggatcgtggtgacaaaggtgaaaaaggtgcccctggacctcgtggcagagatggagaacctgggacccctggaaatcctggcccccctggtcctcccggcccccctggtccccctggtcttggtggaaactttgctgcccagatggctggaggatttgatgaaaaggctggtggcgcccagttgggagtaatgcaaggaccaatgggccccatgggacctcgaggacctccaggccctgcaggtgctcctgggcctcaaggatttcaaggcaatcctggtgaacctggtgaacctggtgtctctggtcccatgggtccccgtggtcctcctggtccccctggaaagcctggtgatgatggtgaagctggaaaacctggaaaagctggtgaaaggggtccgcctggtcctcagggtgctcgtggtttcccaggaaccccaggccttcctggtgtcaaaggtcacagaggttatccaggcctggacggtgctaagggagaggcgggtgctcctggtgtgaagggtgagagtggttccccgggtgagaacggatctccgggcccaatgggtcctcgtggcctgcctggtgaaagaggacggactggccctgctggcgctgcgggtgcccgaggcaacgatggtcagccaggccccgcaggncctccgggtcctgtcggtcctgctggtggtcctggcttccctggtgctcctggagccaagggtgaagccggccccactggtgcccgtggtcctgaaggtgctcaaggtcctcgcggtgaacctggtactcctgggtcccctgggcctgctggtgcctccggtaaccctggaacagatggaattcctggagccaaaggatctgctggtgctcctggcattgctggtgctcctggcttccctgggccacggggncctcctggccctcaaggtgcaactggtcctctgggcccgaaaggtcagacgggtgaacctggtattgctggcttcaaaggtgaacaaggccccaagggagaacctggccctgctggcccccagggagcccctggacccgctggtgaagaaggcaagagaggtgcccgtggagagcctggtggcgttgggcccatcggtccccctggagaaagaggtgctcccggcaaccgcggtttcccaggtcaagatggtctggcaggtcccaagggagcccctggagagcgagggcccagtggtcttgctggccccaagggagccaacggtgaccctggccgtcctggagaacctggccttcctggagcccggggtctcactggccgccctggtgatgctggtcctcaaggcaaagttggcccttctggagcccctggtgaagatggtcgtcctggacctccaggtcctcagggggctcgtgggcagcctggtgtcatgggtttccctggccccaaaggtgccaacggtgagcctggcaaagctggtgagaagggactgcctggtgctcctggtctgaggggtcttcctggcaaagatggtgagacaggtgctgcaggaccccctggccctgctggacctgctggtgaacgaggcgagcagggtgctcctgggccatctgggttccagggacttcctggccctcctggtcccccaggtgaaggtggaaaaccaggtgaccagggtgttcccggtgaagctggagcccctggcctcgtgggtcccaggggtgaacgaggtttcccaggtgaacgtggctctcccggtgcccagggcctccagggtccccgtggcctccccggcactcctggcactgatggtcccaaaggtgcatctggcccagcaggcccccctggggctcagggccctccaggtcttcagggaatgcctggcgagaggggagcagctggtatcgctgggcccaaaggcgacaggggtgacgttggtgagaaaggccctgagggagcccctggaaaggatggtggacgaggcctgacaggtcccattggcccccctggcccagctggtgctaatggcgagaagggagaagttggacctcctggtcctgcaggaagtgctggtgctcgtggcgctccgggtgaacgtggagagactgggccccccggaccagcgggatttgctgggcctcctggtgctgatggccagcctggggccaagggtgagcaaggagaggccggccagaaaggcgatgctggtgcccctggtcctcagggcccctctggagcacctgggcctcagggtcctactggagtgactggtcctaaaggagcccgaggtgcccaaggccccccgggagccactggattccctggagctgctggccgcgttggacccccaggctccaatggcaaccctggaccccctggtccccctggtccttctggaaaagatggtcccaaaggtgctcgaggagacagcggcccccctggccgagctggtgaacccggcctccaaggtcctgctggaccccctggcgagaagggagagcctggagatgacggtccctctggtgccgaaggtccaccaggtccccagggtctggctggtcagagaggcatcgtcggtctgcctgggcaacgtggtgagagaggattccctggcttgcctggcccgtcgggtgagcccggcaagcagggtgctcctggagcatctggagacagaggtcctcctggccccgtgggtcctcctggcctgacgggtcctgcaggtgaacctggacgagagggaagccccggtgctgatggcccccctggcagagatggcgctgctggagtcaagggtgatcgtggtgagactggtgctgtgggagctcctggagcccctgggccccctggctcccctggccccgctggtccaactggcaagcaaggagacagaggagaagctggtgcacaaggccccatgggaccctcaggaccagctggagcccggggaatccagggtcctcaaggccccagaggtgacaaaggagaggctggagagcctggcgagagaggcctgaagggacaccgtggcttcactggtctgcagggtctgcccggccctcctggtccttctggagaccaaggtgcttctggtcctgctggtccttctggccctagaggtcctcctggccccgtcggtccctctggcaaagatggtgctaatggaatccctggccccattgggcctcctggtccccgtggacgatcaggcgaaaccggccctgctggtcctcctggaaatcctggaccccctggtcctccaggtccccctggccctggcatcgacatgtccgcctttgctggcttaggcccgagagagaagggccccgaccccctgcagtacatgcgggccgaccaggcagccggtggcctgagacagcatgacgccgaggtggatgccacactcaagtccctcaacaaccagattgagagcatccgcagccccgagggctcccgcaagaaccctgctcgcacctgcagagacctgaaactctgccaccctgagtggaagagtggagactactggattgaccccaaccaaggctgcaccttggacgccatgaaggttttctgcaacatggagactggcgagacttgcgtctaccccaatccagcaaacgttcccaagaagaactggtggagcagcaagagcaaggagaagaaacacatctggtttggagaaaccatcaatggtggcttccatttcagctatggagatgacaatctggctcccaacactgccaacgtccagatgaccttcctacgcctgctgtccacggaaggctcccagaacatcacctaccactgcaagaacagcattgcctatctggacgaagcagctggcaacctcaagaaggccctgctcatccagggctccaatgacgtggagatccgggcagagggcaatagcaggttcacgtacactgccctgaaggatggctgcacgaaacataccggtaagtggggcaagactgttatcgagtaccggtcacagaagacctcacgcctccccatcattgacattgcacccatggacataggagggcccgagcaggaattcggtgtggacatagggccggtctgcttcttgtaaaaacctgaacccagaaacaacacaatccgttgcaaacccaaaggacccaagtactttccaatctcagtcactctaggactctgcactgaatggctgacctgacctgatgtccattcatcccaccctctcacagttcggacttttctcccctctctttctaagagacctgaactgggcagactgcaaaataaaatctcggtgttctatttatttattgtcttcctgtaagaccttcgggtcaaggcagaggcaggaaactaactggtgtgagtcaaatgccccctgagtgactgcccccagcccaggccagaagacctcccttcaggtgccgggcgcaggaactgtgtgtgtcctacacaatggtgctattctgtgtcaaacacctctgtattttttaaaacatcaattgatattaaaaatgaaaagattattggaaagtaaaaaaa

SEQ ID NO: 453361 - DNA, 3014 bp, Homo sapiens
agcggagtggtgcaggaagacgcctgtgctgcccacactgctgacctcccctgggccctactagctgtggctctcagggtctctggaacactggctcagctcaccttttcttttccactgcagggacctgctggtgaacgaggcgagcagggtgctcctgggccatctgggttccagggacttcctggccctcctggtcccccaggtgaaggtggaaaaccaggtgaccagggtgttcccggtgaagctggagcccctggcctcgtgggtcccaggggtgaacgaggtttcccaggtgaacgtggctctcccggtgcccagggcctccagggtccccgtggcctccccggcactcctggcactgatggtcccaaaggtgcatctggcccagcaggcccccctggggctcagggccctccaggtcttcagggaatgcctggcgagaggggagcagctggtatcgctgggcccaaaggcgacaggggtgacgttggtgagaaaggccctgagggagcccctggaaaggatggtggacgaggcctgacaggtcccattggcccccctggcccagctggtgctaatggcgagaagggagaagttggacctcctggtcctgcaggaagtgctggtgctcgtggcgctccgggtgaacgtggagagactgggccccccggaccagcgggatttgctgggcctcctggtgctgatggccagcctggggccaagggtgagcaaggagaggccggccagaaaggcgatgctggtgcccctggtcctcagggcccctctggagcacctgggcctcagggtcctactggagtgactggtcctaaaggaggcaaccctggaccccctggtccccctggtccttctggaaaagatggtcccaaaggtgctcgaggagacagcggcccccctggccgagctggtgaacccggcctccaaggtcctgctggaccccctggcgagaagggagagcctggagatgacggtccctctggtgccgaaggtccaccaggtccccagggtctggctggtcagagaggcatcgtcggtctgcctgggcaacgtggtgagagaggattccctggcttgcctggcccgtcgggtgagcccggcaagcagggtgctcctggagcatctggagacagaggtcctcctggccccgtgggtcctcctggcctgacgggtcctgcaggtgaacctggacgagagggaagccccggtgctgatggcccccctggcagagatggcgctgctggagtcaagggtgatcgtggtgagactggtgctgtgggagctcctggagcccctgggccccctggctcccctggccccgctggtccaactggcaagcaaggagacagaggagaagctggtgcacaaggccccatgggaccctcaggaccagctggagcccggggaatccagggtcctcaaggccccagaggtgacaaaggagaggctggagagcctggcgagagaggcctgaagggacaccgtggcttcactggtctgcagggtctgcccggccctcctggtccttctggagaccaaggtgcttctggtcctgctggtccttctggccctagaggtcctcctggccccgtcggtccctctggcaaagatggtgctaatggaatccctggccccattgggcctcctggtccccgtggacgatcaggcgaaaccggccctgctggtcctcctggaaatcctggaccccctggtcctccaggtccccctggccctggcatcgacatgtccgcctttgctggcttaggcccgagagagaagggccccgaccccctgcagtacatgcgggccgaccaggcagccggtggcctgagacagcatgacgccgaggtggatgccacactcaagtccctcaacaaccagattgagagcatccgcagccccgagggctcccgcaagaaccctgctcgcacctgcagagacctgaaactctgccaccctgagtggaagagtggagactactggattgaccccaaccaaggctgcaccttggacgccatgaaggttttctgcaacatggagactggcgagacttgcgtctaccccaatccagcaaacgttcccaagaagaactggtggagcagcaagagcaaggagaagaaacacatctggtttggagaaaccatcaatggtggcttccatttcagctatggagatgacaatctggctcccaacactgccaacgtccagatgaccttcctacgcctgctgtccacggaaggctcccagaacatcacctaccactgcaagaacagcattgcctatctggacgaagcagctggcaacctcaagaaggccctgctcatccagggctccaatgacgtggagatccgggcagagggcaatagcaggttcacgtacactgccctgaaggatggctgcacgaaacataccggtaagtggggcaagactgttatcgagtaccggtcacagaagacctcacgcctccccatcattgacattgcacccatggacataggagggcccgagcaggaattcggtgtggacatagggccggtctgcttcttgtaaaaacctgaacccagaaacaacacaatccgttgcaaacccaaaggacccaagtactttccaatctcagtcactctaggactctgcactgaatggctgacctgacctgatgtccattcatcccaccctctcacagttcggacttttctcccctctctttctaagagacctgaactgggcagactgcaaaataaaatctcggtgttctatttatttattgtcttcctgtaagaccttcgggtcaaggcagaggcaggaaactaactggtgtgagtcaaatgccccctgagtgactgcccccagcccaggccagaagacctcccttcaggtgccgggcgcaggaactgtgtgtgtcctacacaatggtgctattctgtgtcaaacacctctgtattttttaaaacatcaattgatattaaaaatgaaaagattattggaaagtaaaaaaa

SEQ ID NO: 453362 - DNA, 1023 bp, Homo sapiens
acgcagagcgctgctgggctgccgggtctcccgcttcctcctcctgctccaagggcctcctgcatgagggcgcggtagagacccggacccgcgccgtgctcctgccgtttcgctgcgctccgcccgggcccggctcagccaggccccgcggtgagccatgattcgcctcggggctccccagtcgctggtgctgctgacgctgctcgtcgccgctgtccttcggtgtcagggccaggatgtccggcaaccaggaccaaagggacagaaaggagaacctggagacatcaaggatattgtaggacccaaaggacctcctgggcctcagggacctgcaggggaacaaggacccagaggggatcgtggtgacaaaggtgaaaaaggtgcccctggacctcgtggcagagatggagaacctgggacccctggaaatcctggcccccctggtcctcccggcccccctggtccccctggtcttggtggaaactttgctgcccagatggctggaggatttgatgaaaaggctggtggcgcccagttgggagtaatgcaaggaccaatgggccccatgggacctcgaggacctccaggccctgcaggtgctcctgggcctcaaggatttcaaggcaatcctggtgaacctggtgaacctggtgtctctggtcccatgggtccccgtggtcctcctggtccccctggaaagcctggtgatgatggtgaagctggaaaacctggaaaagctggaccaggtcagggcctacagctgtgttgtccagtacaggagccacgagccaaatgtggcatttgaatttgaattaacttagaaattcatttcctcacctgtagtggccacctctatattgaggtgctcaataagcaaaagtggtcggtggctgctgtattggacagcacagaaaaagatttccatcaccacagaaaggtcggctggcagcactggccaaggtgatggggtgtgctacacagtgtatgtcactgtgtagtggatggagtttactgtttgtggaa

SEQ ID NO: 453363 - DNA, 1201 bp, Homo sapiens
ggtggagaggggtcatagttctccctgagtgagactcacctgctcctctggcccctggtcctgtcctgttctccagcatggtgtgtctgaagttccctggaggctcctgcatggcagctctgacagtgacactgatggtgctgagctccccactggctttggctggggacacccgaccacgtttcttggagcaggttaaacatgagtgtcatttcttcaacgggacggagcgggtgcggttcctggacagatacttctataaccaagaggagtacgtgcgcttcgacagcgacgtgggggagtaccgggcggtgacggagctggggcggcctgacgccgagtactggaacagccagaaggacctcctggagcagaggcgggccgcggtggacacctactgcagacacaactacggggttgtggagagcttcacagtgcagcggcgagtctatcctaaggtgactgtgtatcctgcaaagacccagcccctgcagcaccacaacctcctggtctgctctgtgaatggtttctatccaggcagcattgaagtcaggtggttccggaacggccaggaagagaaggctggggtggtgtccacaggcctgatccagaatggagactggaccttccagaccctggtgatgctggaaacagttcctcggagtggagaggtttacacctgccaagtggagcacccaagcctgacgagccctctcacagtggaatggagagcacggtctgaatctgcacagagcaagatgctgagtggagtcgggggctttgtgctgggcctgctcttccttggggccgggctgttcatctacttcaggaatcagaaaggacactctggacttcagccaacaggattcctgagctgaagtgaagatgaccacattcaaggaagaaccttctgccccagctttgcaggatgaaacacttccccgcttggctctcattcttccacaagagagacctttctccggacctggttgctactggttcagcaactctgcagaaaatgtcctcccttgtggctgcctcagctcctgttcttggcctgaagcctcacagctttgatggcagtgcctcatcttcaacttttgtgcttccctttacctaaactgtcctgcctcccgtgcatctgtactccccttgtgccacacattacattattaaatgtttctcaaacatggagttaaaa

SEQ ID NO: 453364 - DNA, 585 bp, Homo sapiens
ggaagagccactaaggctaatgcaattacgctggatcctgtgacagacacctcatgcttcatgggtcacatggtctgtttctgttcctctctgccctggttggtgtgggttgtggtgttagagaaatctcaggtgggagatctggggctgggacattgtgttagaagacagatttgcttccatatcttttaagtgtatatcttttcctctttttcccaggacactctggacttcagccaacaggattcctgagctgaagtgaagatgaccacattcaaggaagaaccttctgccccagctttgcaggatgaaacacttccccgcttggctctcattcttccacaagagagacctttctccggacctggttgctactggttcagcaactctgcagaaaatgtcctcccttgtggctgcctcagctccgtacctttggcctgaagtcccagcattaatggcagcccctcatcttccaagttttgtgctcccctttacctaatgcttcctgcctcccatgcatctgtactcctgcttgtgccacaaacacattacattattaaatgtttctcaaacatggagttaaaa

SEQ ID NO: 453365 - DNA, 568 bp, Homo sapiens
agtaatagcaaagacattggatccaaatttctgatcaggcaatttacaccagaactcctcctctccacttagaaaaggcctgtgctctgcaggagtattgactcatggagacttcagaacttgtttttcttcttcctgcagtgctctcatctgagtccttgaaagagggcaaaataaactgttagtagagccaggtctgaaaacaacactttcttgcgtctctgcaggattcctgagctgaagtgaagatgaccacattcaaggaagaaccttctgccccagctttgcaggatgaaacacttccccgcttggctctcattcttccacaagagagacctttctccggacctggttgctactggttcagcagctctgcagaaaatgtcctcccttgtggctgcctcagctcgtacctttggcctgaagtcccagcattaatggcagcccctcatcttccaagttttgtgctcccctttacctaatgcttcctgcctcccatgcatctgtactcctgctgtgccacaaacacattacattattaaatgtttctcaaacatggagttaaaaa

SEQ ID NO: 453366 - DNA, 257 bp, Homo sapiens
ccggcaggttgtactccaccggcggttgtactccaccaggcaggttgtactccaccggcaggttgtactccagaatggagactggaccttccagaccctggtgatgctggaaacagttcctcggagtggagaggtttacacctgccaagtggagcacccaagcctgacgagccctctcacagtggaatggaagcacggtctgaaagtccagtatccattctggagtacaacctgccgtggggaatcctcgagagcgc

SEQ ID NO: 453367 - DNA, 1206 bp, Homo sapiens
ggtggagaggggtcatagttctccctgagtgagactcacctgctcctctggcccctggtcctgtcctgttctccagcatggtgtgtctgaagttccctggaggctcctgcatggcagctctgacagtgacactgatggtgctgagctccccactggctttggctggggacacccgaccacgtttcttggagcaggttaaacatgagtgtcatttcttcaacgggacggagcgggtgcggttcctggacagatacttctataaccaagaggagtacgtgcgcttcgacagcgacgtgggggagtaccgggcggtgacggagctggggcggcctgacgccgagtactggaacagccagaaggacctcctggagcagaggcgggccgcggtggacacctactgcagacacaactacggggttgtggagagcttcacagtgcagcggcgagtctatcctaaggtgactgtgtatcctgcaaagacccagcccctgcagcaccacaacctcctggtctgctctgtgaatggtttctatccaggcagcattgaagtcaggtggttccggaacggccaggaagagaaggctggggtggtgtccacaggcctgatccagaatggagactggaccttccagaccctggtgatgctggaaacagttcctcggagtggagaggtttacacctgccaagtggagcacccaagcctgacgagccctctcacagtggaatggagagcacggtctgaatctgcacagagcaagatgctgagtggagtcgggggctttgtgctgggcctgctcttccttggggccgggctgttcatctacttcaggaatcagaaaggacactctggacttcagccaacaggattcctgagctgaagtgaagatgaccacattcaaggaagaaccttctgccccagctttgcaggatgaaacacttccccgcttggctctcattcttccacaagagagacctttctccggacctggttgctactggttcagcaactctgcagaaaatgtcctcccttgtggctgcctcagctccgtacctttggcctgaagtcccagcattaatggcagcccctcatcttccaagttttgtgctcccctttacctaatgcttcctgcctcccatgcatctgtactcctgcttgtgccacaaacacattacattattaaatgtttctcaaacatggagttaaaa

SEQ ID NO: 453368 - DNA, 1935 bp, Homo sapiens
gaggggggccatagttctccctgattgagacttgcctgctgctgtgaccactggtcttgtcctcttctccagcatggtgtgtctgaagctccctggaggctcctgtatggcagcgctgacagtgacattgacggtgctgagctccccactggctttggctggggacacccaacgtaagtgcacattgtgactgcagagctactatggggtgggggcaaaaataggaagttttgttaacattgtgcccaggctatgtctcttatgaaattgtgacactttcttcagagattgcccatctttatcagatggatcccaaattatttccaccacaaaaggcgcttggctacttgtcctgtccatgagatttgtgtaaagggcctacacacaggtcatttcttctcaaatctccaccaataaaacctatgcatcacatgtcctcagggtctttagaggatttagaaataagtatgctaaaataatttccccatacagcacttccctttattatgttgacttatgtcagacaaaaggaggtttttactgaaaattttgtgggagtcaagggaattcaaagggtctctcctagacgatccagtgttatgtcctccacaggacctttggtgttggcccctcttcctcatatgtgaggatggatccagtggcctccccattatctcctttcttttctttctgaactccaatgtttataaagcctgtacccctgttgcctatgtaggttctctgacaaaagttatacttagtgctctttctttcttatggggaaaaatccgtggaactgaagctgagatctttagtacgtggagtcaccttacagatatagagcatttatgcggtattcattggtgcctaaagaactttaggcatcctctggaaaaccggcccagcacgtttcttggagcaggctaagtgtgagtgtcatttcctcaatgggacggagcgagtgtggaacctgatcagatacatctataaccaagaggagtacgcgcgctacaacagtgacctgggggagtaccaggcggtgacggagctggggcggcctgacgctgagtactggaacagccagaaggacctcctggagcggaggcgggccgcggtggacacctactgcagacacaactacggggttgtgtgagagcttcacagtgcagcggcgagtcgagcctaaggtgactgtgtatccttcaaagacccagcccctgcagcaccacaacctcctggtctgctctgtgaatggtttctatccaggcagcattgaagtcaggtggttccggaacggccaggaagagaaggctggggtggtgtccacaggcctgatccagaatggagactggaccttccagaccctggtgatgctggaaacagttcctcggagtggagaggtttacacctgccaagtggagcacccaagcctgacgagccctctcacagtggaatggagagcacggtctgaatctgcacagagcaagatgctgagtggagtcgggggctttgtgctgggcctgctcttccttggggccgggctgttcatctacttcaggaatcagaaaggacactctggacttcagccaacaggattcctgagctgaagtgaagatgaccacattcaaggaagaaccttctgccccagctttgcaggatgaaacacttccccgcttggctctcattcttccacaagagagacctttctccggacctggttgctactggttcagcaactctgcagaaaatgtcctcccttgtggctgcctcagctccgtacctttggcctgaagtcccagcattaatggcagcccctcatcttccaagttttgtgctcccctttacctaatgcttcctgcctcccatgcatctgtactcctgcttgtgccacaaacacattacattattaaatgtttctcaaacatggagttaaaa

SEQ ID NO: 453369 - DNA, 2188 bp, Homo sapiens
gaggggggccatagttctccctgattgagacttgcctgctgctgtgaccactggtcttgtcctcttctccagcatggtgtgtctgaagctccctggaggctcctgtatggcagcgctgacagtgacattgacggtgctgagctccccactggctttggctggggacacccaacgtaagtgcacattgtgactgcagagctactatggggtgggggcaaaaataggaagttttgttaacattgtgcccaggctatgtctcttatgaaattgtgacactttcttcagagattgcccatctttatcagatggatcccaaattatttccaccacaaaaggcgcttggctacttgtcctgtccatgagatttgtgtaaagggcctacacacaggtcatttcttctcaaatctccaccaataaaacctatgcatcacatgtcctcagggtctttagaggatttagaaataagtatgctaaaataatttccccatacagcacttccctttattatgttgacttatgtcagacaaaaggaggtttttactgaaaattttgtgggagtcaagggaattcaaagggtctctcctagacgatccagtgttatgtcctccacaggacctttggtgttggcccctcttcctcatatgtgaggatggatccagtggcctccccattatctcctttcttttctttctgaactccaatgtttataaagcctgtacccctgttgcctatgtaggttctctgacaaaagttatacttagtgctctttctttcttatggggaaaaatccgtggaactgaagctgagatctttagtacgtggagtcaccttacagatatagagcatttatgcggtattcattggtgcctaaagaactttaggcatcctctggaaaaccggcccagaactccacacttctgacgtttctcattcctgtctaagctcttgtgtgtttggtttttggccatcacgttcactgctctttaagctcccccagcggagtggagaggtctgttttcctttgtttggattcctagaggcagcgcagaccaggcacaaggtcagcactaaggaagggttcacgggatgaacacggtgggtgctgttgaaggaaccggtaaagcgtgtgggatgagaggagcagagagtgtctttcagcacgtttcttggagcaggctaagtgtgagtgtcatttcctcaatgggacggagcgagtgtggaacctgatcagatacatctataaccaagaggagtacgcgcgctacaacagtgacctgggggagtaccaggcggtgacggagctggggcggcctgacgctgagtactggaacagccagaaggacctcctggagcggaggcgggccgcggtggacacctactgcagacacaactacggggttgtgtgagagcttcacagtgcagcggcgagtcgagcctaaggtgactgtgtatccttcaaagacccagcccctgcagcaccacaacctcctggtctgctctgtgaatggtttctatccaggcagcattgaagtcaggtggttccggaacggccaggaagagaaggctggggtggtgtccacaggcctgatccagaatggagactggaccttccagaccctggtgatgctggaaacagttcctcggagtggagaggtttacacctgccaagtggagcacccaagcctgacgagccctctcacagtggaatggagagcacggtctgaatctgcacagagcaagatgctgagtggagtcgggggctttgtgctgggcctgctcttccttggggccgggctgttcatctacttcaggaatcagaaaggacactctggacttcagccaacaggattcctgagctgaagtgaagatgaccacattcaaggaagaaccttctgccccagctttgcaggatgaaacacttccccgcttggctctcattcttccacaagagagacctttctccggacctggttgctactggttcagcaactctgcagaaaatgtcctcccttgtggctgcctcagctccgtacctttggcctgaagtcccagcattaatggcagcccctcatcttccaagttttgtgctcccctttacctaatgcttcctgcctcccatgcatctgtactcctgcttgtgccacaaacacattacattattaaatgtttctcaaacatggagttaaaa

SEQ ID NO: 453370 - DNA, 1203 bp, Homo sapiens
gaggggggccatagttctccctgattgagacttgcctgctgctgtgaccactggtcttgtcctcttctccagcatggtgtgtctgaagctccctggaggctcctgtatggcagcgctgacagtgacattgacggtgctgagctccccactggctttggctggggacacccaaccacgtttcttggagcaggctaagtgtgagtgtcatttcctcaatgggacggagcgagtgtggaacctgatcagatacatctataaccaagaggagtacgcgcgctacaacagtgacctgggggagtaccaggcggtgacggagctggggcggcctgacgctgagtactggaacagccagaaggacctcctggagcggaggcgggccgcggtggacacctactgcagacacaactacggggttgtgtgagagcttcacagtgcagcggcgagtcgagcctaaggtgactgtgtatccttcaaagacccagcccctgcagcaccacaacctcctggtctgctctgtgaatggtttctatccaggcagcattgaagtcaggtggttccggaacggccaggaagagaaggctggggtggtgtccacaggcctgatccagaatggagactggaccttccagaccctggtgatgctggaaacagttcctcggagtggagaggtttacacctgccaagtggagcacccaagcctgacgagccctctcacagtggaatggagagcacggtctgaatctgcacagagcaagatgctgagtggagtcgggggctttgtgctgggcctgctcttccttggggccgggctgttcatctacttcaggaatcagaaaggacactctggacttcagccaacaggattcctgagctgaagtgaagatgaccacattcaaggaagaaccttctgccccagctttgcaggatgaaacacttccccgcttggctctcattcttccacaagagagacctttctccggacctggttgctactggttcagcaactctgcagaaaatgtcctcccttgtggctgcctcagctccgtacctttggcctgaagtcccagcattaatggcagcccctcatcttccaagttttgtgctcccctttacctaatgcttcctgcctcccatgcatctgtactcctgcttgtgccacaaacacattacattattaaatgtttctcaaacatggagttaaaa

SEQ ID NO: 453371 - DNA, 1550 bp, Homo sapiens
gagaccaaagcgggtaaggttgcagcctcgaaactggggcagaaggtgtctgccgtgaatgtggtcatcttcactgtcagctcaggaatcctgttggctgaagtccagagtgtccttgctgattcctgaagtagaatggaacagcccggcccctaggaaggagcagggccaagcaacgaagcccccggactcccactcagcatcttggctctgggcagattcagacccgtgctcttccatgtccactgtggagagggctcatcaggctttgggtgctccacttggcaaggtgtaaacctctccaacttccgaggaactgtttccagcatcaccagggtctggaaggtccagtactcggcgctagcccgccccagctccgtcaccgcccggtactcccctggtcctgtcctgttctccagcatggtgtgtctgaagttccctggaggctcctgcatggcagctctgacagtgacactgatggtgctgagctccccactggctttggctggggacacccgaccacgtttcttggagcaggctaagtgtgagtgtcatttcctcaatgggacggagcgagtgtggaacctgatcagatacatctataaccaagaggagtacgcgcgctacaacagtgacctgggggagtaccaggcggtgacggagctggggcggcctgacgctgagtactggaacagccagaaggacctcctggagcggaggcgggccgcggtggacacctactgcagacacaactacggggttgtgtgagagcttcacagtgcagcggcgagtcgagcctaaggtgactgtgtatccttcaaagacccagcccctgcagcaccacaacctcctggtctgctctgtgaatggtttctatccaggcagcattgaagtcaggtggttccggaacggccaggaagagaaggctggggtggtgtccacaggcctgatccagaatggagactggaccttccagaccctggtgatgctggaaacagttcctcggagtggagaggtttacacctgccaagtggagcacccaagcctgacgagccctctcacagtggaatggagagcacggtctgaatctgcacagagcaagatgctgagtggagtcgggggctttgtgctgggcctgctcttccttggggccgggctgttcatctacttcaggaatcagaaaggacactctggacttcagccaacaggattcctgagctgaagtgaagatgaccacattcaaggaagaaccttctgccccagctttgcaggatgaaacacttccccgcttggctctcattcttccacaagagagacctttctccggacctggttgctactggttcagcaactctgcagaaaatgtcctcccttgtggctgcctcagctccgtacctttggcctgaagtcccagcattaatggcagcccctcatcttccaagttttgtgctcccctttacctaatgcttcctgcctcccatgcatctgtactcctgcttgtgccacaaacacattacattattaaatgtttctcaaacatggagttaaaa

SEQ ID NO: 453372 - DNA, 1206 bp, Homo sapiens
ggtggagaggggtcatagttctccctgagtgagactcacctgctcctctggcccctggtcctgtcctgttctccagcatggtgtgtctgaagttccctggaggctcctgcatggcagctctgacagtgacactgatggtgctgagctccccactggctttggctggggacacccgaccacgtttcttggagcaggttaaacatgagtgtcatttcttcaacgggacggagcgggtgcggttcctggacagatacttctataaccaagaggagtacgtgcgcttcgacagcgacgtgggggagtaccgggcggtgacggagctggggcggcctgacgccgagtactggaacagccagaaggacctcctggagcagaggcgggccgcggtggacacctactgcagacacaactacggggttgtggagagcttcacagtgcagcggcgagtcgagcctaaggtgactgtgtatccttcaaagacccagcccctgcagcaccacaacctcctggtctgctctgtgaatggtttctatccaggcagcattgaagtcaggtggttccggaacggccaggaagagaaggctggggtggtgtccacaggcctgatccagaatggagactggaccttccagaccctggtgatgctggaaacagttcctcggagtggagaggtttacacctgccaagtggagcacccaagcctgacgagccctctcacagtggaatggagagcacggtctgaatctgcacagagcaagatgctgagtggagtcgggggctttgtgctgggcctgctcttccttggggccgggctgttcatctacttcaggaatcagaaaggacactctggacttcagccaacaggattcctgagctgaagtgaagatgaccacattcaaggaagaaccttctgccccagctttgcaggatgaaacacttccccgcttggctctcattcttccacaagagagacctttctccggacctggttgctactggttcagcaactctgcagaaaatgtcctcccttgtggctgcctcagctccgtacctttggcctgaagtcccagcattaatggcagcccctcatcttccaagttttgtgctcccctttacctaatgcttcctgcctcccatgcatctgtactcctgcttgtgccacaaacacattacattattaaatgtttctcaaacatggagttaaaa

SEQ ID NO: 453373 - DNA, 1355 bp, Homo sapiens
tgtcacggttacaaaggatgataaataggtgccaagtggagcactcaagtgtgatgagccccctcacagtggaatggagtgagaagctttctgacctcataaactgaaggctatcttcagtcattgttttatatattttacgtgcattaatcctcatataaccccaagaggtaaattagtataattatccttcattgtaggtgacaaagttgagacacagaagaatcaaaaaactcttccaggatcaaccagtaaaaggcagaccttggatttcgaaccaggcaacatggctcagatatcagttttaattactacactctgtactgtcaaagatttgtaaacactttgacaatgcatgccgatttaaaactatgaagaaacaaacacaatttttcacaacatctctcaaatctaatgggtcctcactatcaagattaaattccaggctgatgacactgtaaggccacatggccagctgtgctggaggcctggtcaaggtcagagcctgggtttgcagagaagcagacaaacagccaaataaggagacttactctgtcttcatgactcattcccactaccttttttttctcctagtctcgagcctaaggtgactgtgtatccttcaaagacccagcccctgcagcaccacaacctcctggtctgctctgtgaatggtttctatccaggcagcattgaagtcaggtggttccggaacggccaggaagagaaggctggggtggtgtccacaggcctgatccagaatggagactggaccttccagaccctggtgatgctggaaacagttcctcggagtggagaggtttacacctgccaagtggagcacccaagcctgacgagccctctcacagtggaatggagagcacggtctgaatctgcacagagcaagatgctgagtggagtcgggggctttgtgctgggcctgctcttccttggggccgggctgttcatctacttcaggaatcagaaaggacactctggacttcagccaacaggattcctgagctgaagtgaagatgaccacattcaaggaagaaccttctgccccagctttgcaggatgaaacacttccccgcttggctctcattcttccacaagagagacctttctccggacctggttgctactggttcagcaactctgcagaaaatgtcctcccttgtggctgcctcagctccgtacctttggcctgaagtcccagcattaatggcagcccctcatcttccaagttttgtgctcccctttacctaatgcttcctgcctcccatgcatctgtactcctgcttgtgccacaaacacattacattattaaatgtttctcaaacatggagttaaaa

SEQ ID NO: 453374 - DNA, 1967 bp, Homo sapiens
gaggggggccatagttctccctgattgagacttgcctgctgctgtgaccactggtcttgtcctcttctccagcatggtgtgtctgaagctccctggaggctcctgtatggcagcgctgacagtgacattgacggtgctgagctccccactggctttggctggggacacccaacgtaagtgcacattgtgactgcagagctactatggggtgggggcaaaaataggaagttttgttaacattgtgcccaggctatgtctcttatgaaattgtgacactttcttcagagattgcccatctttatcagatggatcccaaattatttccaccacaaaaggcgcttggctacttgtcctgtccatgagatttgtgtaaagggcctacacacaggtcatttcttctcaaatctccaccaataaaacctatgcatcacatgtcctcagggtctttagaggatttagaaataagtatgctaaaataatttccccatacagcacttccctttattatgttgacttatgtcagacaaaaggaggtttttactgaaaattttgtgggagtcaagggaattcaaagggtctctcctagacgatccagtgttatgtcctccacaggacctttggtgttggcccctcttcctcatatgtgaggatggatccagtggcctccccattatctcctttcttttctttctgaactccaatgtttataaagcctgtacccctgttgcctatgtaggttctctgacaaaagttatacttagtgctctttctttcttatggggaaaaatccgtggaactgaagctgagatctttagtacgtggagtcaccttacagatatagagcatttatgcggtattcattggtgcctaaagaactttaggcatcctctggaaaaccggcccagcacgtttcttggagcaggctaagtgtgagtgtcatttcctcaatgggacggagcgagtgtggaacctgatcagatacatctataaccaagaggagtacgcgcgctacaacagtgacctgggggagtaccaggcggtgacggagctggggcggcctgacgctgagtactggaacagccagaaggacctcctggagcggaggcgggccgcggtggacacctactgcagacacaactacggggttgtgtgagagcttcacagtgcagcggcgagtcgagcctaaggtgactgtgtatccttcaaagacccagcccctgcagcaccacaacctcctggtctgctctgtgaatggtttctatccaggcagcattgaagtcaggtggttccggaacggccaggaagagaaggctggggtggtgtccacaggcctgatccagaatggagactggaccttccagaccctggtgatgctggaaacagttcctcggagtggagaggtttacacctgccaagtggagcacccaagcctgacgagccctctcacagtggaatggagagcacggtctgaatctgcacagagcaagatgctgagtggagtcgggggctttgtgctgggcctgctcttccttggggccgggctgttcatctacttcaggaatcagaaaggacactctggacttcagccaacaggattcctgagctgaagtgaagatgaccacattcaaggaagaaccttctgccccagctttgcaggatgaaacacttccccgcttggctctcattcttccacaagagagacctttctccggacctggttgctactggttcagcaactctgcagaaaatgtcctcccttgtggctgcctcagctccgtacctttggcctgaagtcccagcattaatggcagcccctcatcttccaagttttgtgctcccctttacctaatgcttcctgcctcccatgcatctgtactcctgcttgtgccacaaacacattacattattaaatgtttctcaaacatggagttaaaaaaaaattatctggtccatttggctgcaaggac

SEQ ID NO: 453375 - DNA, 1205 bp, Homo sapiens
ggtggagaggggtcatagttctccctgagtgagactcacctgctcctctggcccctggtcctgtcctgttctccagcatggtgtgtctgaagttccctggaggctcctgcatggcagctctgacagtgacactgatggtgctgagctccccactggctttggctggggacacccgaccacgtttcttggagcaggttaaacatgagtgtcatttcttcaacgggacggagcgggtgcggttcctggacagatacttctataaccaagaggagtacgtgcgcttcgacagcgacgtgggggagtaccgggcggtgacggagctggggcggcctgacgccgagtactggaacagccagaaggacctcctggagcagaggcgggccgcggtggacacctactgcagacacaactacggggttgtggagagcttcacagtgcagcggcgagtctatcctaaggtgactgtgtatcctgcaaagacccagcccctgcagcaccacaacctcctggtctgctctgtgaatggtttctatccaggcagcattgaagtcaggtggttccggaacggccaggaagagaaggctggggtggtgtccacaggcctgatccagaatggagactggaccttccagaccctggtgatgctggaaacagttcctcggagtggagaggtttacacctgccaagtggagcacccaagcctgacgagccctctcacagtggaatggagagcacggtctgaatctgcacagagcaagatgctgagtggagtcgggggctttgtgctgggcctgctcttccttggggccgggctgttcatctacttcaggaatcagaaaggacactctggacttcagccaacaggattcctgagctgaagtgaagatgaccacattcaaggaagaaccttctgccccagctttgcaggatgaaacacttccccgcttggctctcattcttccacaagagagacctttctccggacctggttgctactggttcagcagctctgcagaaaatgtcctcccttgtggctgcctcagctcgtacctttggcctgaagtcccagcattaatggcagcccctcatcttccaagttttgtgctcccctttacctaatgcttcctgcctcccatgcatctgtactcctgctgtgccacaaacacattacattattaaatgtttctcaaacatggagttaaaaa

SEQ ID NO: 453376 - DNA, 982 bp, Homo sapiens
  misc_feature (971)..(972): n is a, c, g, or t
  misc_feature (977)..(978): n is a, c, g, or t
  misc_feature (980)..(980): n is a, c, g, or t
ggtggagaggggtcatagttctccctgagtgagactcacctgctcctctggcccctggtcctgtcctgttctccagcatggtgtgtctgaagttccctggaggctcctgcatggcagctctgacagtgacactgatggtgctgagctccccactggctttggctggggacacccgaccacgtttcttggagcaggttaaacatgagtgtcatttcttcaacgggacggagcgggtgcggttcctggacagatacttctataaccaagaggagtacgtgcgcttcgacagcgacgtgggggagtaccgggcggtgacggagctggggcggcctgacgccgagtactggaacagccagaaggacctcctggagcagaggcgggccgcggtggacacctactgcagacacaactacggggttgtggagagcttcacagtgcagcggcgagtctatcctaaggtgactgtgtatcctgcaaagacccagcccctgcagcaccacaacctcctggtctgctctgtgaatggtttctatccaggcagcattgaagtcaggtggttccggaacggccaggaagagaaggctggggtggtgtccacaggcctgatccagaatggagactggaccttccagaccctggtgatgctggaaacagttcctcggagtggagaggtttacacctgccaagtggagcacccaagcctgacgagccctctcacagtggaatggagagcacggtctgaatctgcacagagcaagatgctgagtggagtcgggggctttgtgctgggcctgctcttccttggggccgggctgttcatctacttcaggaatcagaaaggacactctggacttcagccaacaggtaataccttttcatcctctttaagaaacagatttggaggccaggcgcagtgtcacgcctgtaatcccagcactttgggaggccgaggcgggcgaatcatgaggtcnngagtnngnga

SEQ ID NO: 453377 - DNA, 1169 bp, Homo sapiens
ggtggagaggggtcatagttctccctgagtgagactcacctgctcctctggcccctggtcctgtcctgttctccagcatggtgtgtctgaagttccctggaggctcctgcatggcagctctgacagtgacactgatggtgctgagctccccactggctttggctggggacacccgaccacgtttcttggagcaggttaaacatgagtgtcatttcttcaacgggacggagcgggtgcggttcctggacagatacttctataaccaagaggagtacgtgcgcttcgacagcgacgtgggggagtaccgggcggtgacggagctggggcggcctgacgccgagtactggaacagccagaaggacctcctggagcagaggcgggccgcggtggacacctactgcagacacaactacggggttgtggagagcttcacagtgcagcggcgagtctatcctaaggtgactgtgtatcctgcaaagacccagcccctgcagcaccacaacctcctggtctgctctgtgaatggtttctatccaggcagcattgaagtcaggtggttccggaacggccaggaagagaaggctggggtggtgtccacaggcctgatccagaatggaaacagttcctcggagtggagaggtttacacctgccaagtggagcacccaagcctgacgagccctctcacagtggaatggagagcacggtctgaatctgcacagagcaagatgctgagtggagtcgggggctttgtgctgggcctgctcttccttggggccgggctgttcatctacttcaggaatcagaaaggacactctggacttcagccaacaggattcctgagctgaagtgaagatgaccacattcaaggaagaaccttctgccccagctttgcaggatgaaacacttccccgcttggctctcattcttccacaagagagacctttctccggacctggttgctactggttcagcaactctgcagaaaatgtcctcccttgtggctgcctcagctcctgttcttggcctgaagcctcacagctttgatggcagtgcctcatcttcaacttttgtgcttccctttacctaaactgtcctgcctcccgtgcatctgtactccccttgtgccacacattacattattaaatgtttctcaaacatggagttaaaa

SEQ ID NO: 453378 - DNA, 897 bp, Homo sapiens
ggtggagaggggtcatagttctccctgagtgagactcacctgctcctctggcccctggtcctgtcctgttctccagcatggtgtgtctgaagttccctggaggctcctgcatggcagctctgacagtgacactgatggtgctgagctccccactggctttggctggggacacccgaccacgtttcttggagcaggttaaacatgagtgtcatttcttcaacgggacggagcgggtgcggttcctggacagatacttctataaccaagaggagtacgtgcgcttcgacagcgacgtgggggagtaccgggcggtgacggagctggggcggcctgacgccgagtactggaacagccagaaggacctcctggagcagaggcgggccgcggtggacacctactgcagacacaactacggggttgtggagagcttcacagtgcagcggcgagtctatcctaaggtgactgtgtatcctgcaaagacccagcccctgcagcaccacaacctcctggtctgctctgtgaatggtttctatccaggcagcattgaagtcaggtggttccggaacggccaggaagagaaggctggggtggtgtccacaggcctgatccagaatggagactggaccttccagaccctggtgatgctggaaacagttcctcggagtggagaggtttacacctgccaagtggagcacccaagcctgacgagccctctcacagtggaatggagacactctggacttcagccaacaggactcctgagctgaagtgaagatgaccacattcaaggaggaaccttcttccccagctttgcaggatgaaaagctttcccacctggctgttattcttccataagagagggctttctcaggatctggttgctactggttcagcaac

SEQ ID NO: 453379 - DNA, 1173 bp, Homo sapiens
ggtggagaggggtcatagttctccctgagtgagactcacctgctcctctggcccctggtcctgtcctgttctccagcatggtgtgtctgaagttccctggaggctcctgcatggcagctctgacagtgacactgatggtgctgagctccccactggctttggctggggacacccgaccacgtttcttggagcaggttaaacatgagtgtcatttcttcaacgggacggagcgggtgcggttcctggacagatacttctataaccaagaggagtacgtgcgcttcgacagcgacgtgggggagtaccgggcggtgacggagctggggcggcctgacgccgagtactggaacagccagaaggacctcctggagcagaggcgggccgcggtggacacctactgcagacacaactacggggttgtggagagcttcacagtgcagcggcgagtctatcctaaggtgactgtgtatcctgcaaagacccagcccctgcagcaccacaacctcctggtctgctctgtgaatggtttctatccaggcagcattgaagtcaggtggttccggaacggccaggaagagaaggctggggtggtgtccacaggcctgatccagaatggaaacagttcctcggagtggagaggtttacacctgccaagtggagcacccaagcctgacgagccctctcacagtggaatggagagcacggtctgaatctgcacagagcaagatgctgagtggagtcgggggctttgtgctgggcctgctcttccttggggccgggctgttcatctacttcaggaatcagaaaggacactctggacttcagccaacaggattcctgagctgaagtgaagatgaccacattcaaggaagaaccttctgccccagctttgcaggatgaaacacttccccgcttggctctcattcttccacaagagagacctttctccggacctggttgctactggttcagcagctctgcagaaaatgtcctcccttgtggctgcctcagctcgtacctttggcctgaagtcccagcattaatggcagcccctcatcttccaagttttgtgctcccctttacctaatgcttcctgcctcccatgcatctgtactcctgctgtgccacaaacacattacattattaaatgtttctcaaacatggagttaaaaa

SEQ ID NO: 453380 - DNA, 1115 bp, Homo sapiens
ggtggagaggggtcatagttctccctgagtgagactcacctgctcctctggcccctggtcctgtcctgttctccagcatggtgtgtctgaagttccctggaggctcctgcatggcagctctgacagtgacactgatggtgctgagctccccactggctttggctggggacacccgaccacgtttcttggagcaggttaaacatgagtgtcatttcttcaacgggacggagcgggtgcggttcctggacagatacttctataaccaagaggagtacgtgcgcttcgacagcgacgtgggggagtaccgggcggtgacggagctggggcggcctgacgccgagtactggaacagccagaaggacctcctggagcagaggcgggccgcggtggacacctactgcagacacaactacggggttgtggagagcttcacagtgcagcggcgaggcagcattgaagtcaggtggttccggaacggccaggaagagaaggctggggtggtgtccacaggcctgatccagaatggagactggaccttccagaccctggtgatgctggaaacagttcctcggagtggagaggtttacacctgccaagtggagcacccaagcctgacgagccctctcacagtggaatggagagcacggtctgaatctgcacagagcaagatgctgagtggagtcgggggctttgtgctgggcctgctcttccttggggccgggctgttcatctacttcaggaatcagaaaggacactctggacttcagccaacaggattcctgagctgaagtgaagatgaccacattcaaggaagaaccttctgccccagctttgcaggatgaaacacttccccgcttggctctcattcttccacaagagagacctttctccggacctggttgctactggttcagcagctctgcagaaaatgtcctcccttgtggctgcctcagctcgtacctttggcctgaagtcccagcattaatggcagcccctcatcttccaagttttgtgctcccctttacctaatgcttcctgcctcccatgcatctgtactcctgctgtgccacaaacacattacattattaaatgtttctcaaacatggagttaaaaa

SEQ ID NO: 453381 - DNA, 566 bp, Homo sapiens
ggtggagaggggtcatagttctccctgagtgagactcacctgctcctctggcccctggtcctgtcctgttctccagcatggtgtgtctgaagttccctggaggctcctgcatggcagctctgacagtgacactgatggtgctgagctccccactggctttggctggggacacccgaccacgtttcttggagcaggttaaacatgagtgtcatttcttcaacgggacggagcgggtgcggttcctggacagatacttctataaccaagaggagtacgtgcgcttcgacagcgacgtgggggagtaccgggcggtgacggagctggggcggcctgacgccgagtactggaacagccagaaggacctcctggagcagaggcgggccgcggtggacacctactgcagacacaactacggggttgtggagagcttcacagtgcagcggcgagtcgagcctaaggtgactgtgtatccttcaaagacccagcccctgcagcaccacaacctcctggtctgcagtaggtgtccacctcggcccgcctccgctccaggaggtcctggctgttcc

SEQ ID NO: 453382 - DNA, 279 bp, Homo sapiens
gaggatcatggatactcatggcgatctctgatagtcgaccctgaatgtgatgccacagatgggtcatctgggcgctcggctgacagagtgccgtgaccgggaggatctccgtgtagctccgtacctttggcctgaagtcccagcattaatggcagcccctcatcttccaagttttgtgctcccctttacctaatgcttcctgcctcccatgcatctgtactcctgcttgtgccacaaacacattacattattaaatgtttctcaaacatggagttaaaa

SEQ ID NO: 453383 - DNA, 476 bp, Homo sapiens
tgcgggtggggccggttaaggttcccagcgcccgcaccccgcccagggagtccgggttggtggcgtcgctgtcagtgtcttctcaggaggccgcccgtgtgaccggatcgttcgtgtccccacagcacgtttcttggagcaggctaagtgtgagtgtcatttcctcaatgggacggagcgagtgtggaacctgatcagatacatctataaccaagaggagtacgcgcgctacaacagtgacctgggggagtaccaggcggtgacggagctggggcggcctgacgctgagtactggaacagccagaaggacctcctggagcggaggcgggccgcggtggacacctactgcagacacaactacggggttgtgtgagagcttcacagtgcagcggcgaggtgagcatggtggagggcggggcctgggtccctgtgagcggggaatctgtgtatgtgtgtgtgtgtgtgtgtgtgtgaga

SEQ ID NO: 453384 - DNA, 1544 bp, Homo sapiens
gagaccaaagcgggtaaggttgcagcctcgaaactggggcagaaggtgtctgccgtgaatgtggtcatcttcactgtcagctcaggaatcctgttggctgaagtccagagtgtccttgctgattcctgaagtagaatggaacagcccggcccctaggaaggagcagggccaagcaacgaagcccccggactcccactcagcatcttggctctgggcagattcagacccgtgctcttccatgtccactgtggagagggctcatcaggctttgggtgctccacttggcaaggtgtaaacctctccaacttccgaggaactgtttccagcatcaccagggtctggaaggtccagtactcggcgctagcccgccccagctccgtcaccgcccggtactcccctggtcctgtcctgttctccagcatggtgtgtctgaagttccctggaggctcctgcatggcagctctgacagtgacactgatggtgctgagctccccactggctttggctggggacacccgaccacgtttcttggagcaggttaaacatgagtgtcatttcttcaacgggacggagcgggtgcggttcctggacagatacttctataaccaagaggagtacgtgcgcttcgacagcgacgtgggggagtaccgggcggtgacggagctggggcggcctgacgccgagtactggaacagccagaaggacctcctggagcagaggcgggccgcggtggacacctactgcagacacaactacggggttgtggagagcttcacagtgcagcggcgagtctatcctaaggtgactgtgtatcctgcaaagacccagcccctgcagcaccacaacctcctggtctgctctgtgaatggtttctatccaggcagcattgaagtcaggtggttccggaacggccaggaagagaaggctggggtggtgtccacaggcctgatccagaatggagactggaccttccagaccctggtgatgctggaaacagttcctcggagtggagaggtttacacctgccaagtggagcacccaagcctgacgagccctctcacagtggaatggagagcacggtctgaatctgcacagagcaagatgctgagtggagtcgggggctttgtgctgggcctgctcttccttggggccgggctgttcatctacttcaggaatcagaaaggacactctggacttcagccaacaggattcctgagctgaagtgaagatgaccacattcaaggaagaaccttctgccccagctttgcaggatgaaacacttccccgcttggctctcattcttccacaagagagacctttctccggacctggttgctactggttcagcaactctgcagaaaatgtcctcccttgtggctgcctcagctcctgttcttggcctgaagcctcacagctttgatggcagtgcctcatcttcaacttttgtgcttccctttacctaaactgtcctgcctcccgtgcatctgtactccccttgtgccacacattacattattaaatgtttctcaaacatggagttaaaa

SEQ ID NO: 453385 - DNA, 855 bp, Homo sapiens
tacccagttcgacggagactctcaccaaccccgcggtggacacctactgcagacacaactacggggttgtggagagcttcacagtgcagcggcgagtcgagcctaaggtgactgtgtatccttcaaagacccagcccctgcagcaccacaacctcctggtctgctctgtgaatggtttctatccaggcagcattgaagtcaggtggttccggaacggccaggaagagaaggctggggtggtgtccacaggcctgatccagaatggagactggaccttccagaccctggtgatgctggaaacagttcctcggagtggagaggtttacacctgccaagtggagcacccaagcctgacgagccctctcacagtggaatggagagcacggtctgaatctgcacagagcaagatgctgagtggagtcgggggctttgtgctgggcctgctcttccttggggccgggctgttcatctacttcaggaatcagaaaggacactctggacttcagccaacaggattcctgagctgaagtgaagatgaccacattcaaggaagaaccttctgccccagctttgcaggatgaaacacttccccgcttggctctcattcttccacaagagagacctttctccggacctggttgctactggttcagcaactctgcagaaaatgtcctcccttgtggctgcctcagctccgtacctttggcctgaagtcccagcattaatggcagcccctcatcttccaagttttgtgctcccctttacctaatgcttcctgcctcccatgcatctgtactcctgcttgtgccacaaacacattacattattaaatgtttctcaaacatggagttaaaa

SEQ ID NO: 453386 - DNA, 1251 bp, Homo sapiens
gagaccaaagcgggtaaggttgcagcctcgaaactggggcagaaggtgtctgccgtgaatgtggtcatcttcactgtcagctcaggaatcctgttggctgaagtccagagtgtccttgctgattcctgaagtagaatggaacagcccggcccctaggaaggagcagggccaagcaacgaagcccccggactcccactcagcatcttggctctgggcagattcagacccgtgctcttccatgtccactgtggagagggctcatcaggctttgggtgctccacttggcaaggtgtaaacctctccaacttccgaggaactgtttccagcatcaccagggtctggaaggtccagtactcggcgctagcccgccccagctccgtcaccgcccggtactcccctggtcctgtcctgttctccagcatggtgtgtctgaagttccctggaggctcctgcatggcagctctgacagtgacactgatggtgctgagctccccactggctttggctggggacacccgaccacgtttcttggagcaggctaagtgtgagtgtcatttcctcaatgggacggagcgagtgtggaacctgatcagatacatctataaccaagaggagtacgcgcgctacaacagtgacctgggggagtaccaggcggtgacggagctgggaccttccagaccctggtgatgctggaaacagttcctcggagtggagaggtttacacctgccaagtggagcacccaagcctgacgagccctctcacagtggaatggagagcacggtctgaatctgcacagagcaagatgctgagtggagtcgggggctttgtgctgggcctgctcttccttggggccgggctgttcatctacttcaggaatcagaaaggacactctggacttcagccaacaggattcctgagctgaagtgaagatgaccacattcaaggaagaaccttctgccccagctttgcaggatgaaacacttccccgcttggctctcattcttccacaagagagacctttctccggacctggttgctactggttcagcaactctgcagaaaatgtcctcccttgtggctgcctcagctccgtacctttggcctgaagtcccagcattaatggcagcccctcatcttccaagttttgtgctcccctttacctaatgcttcctgcctcccatgcatctgtactcctgcttgtgccacaaacacattacattattaaatgtttctcaaacatggagttaaaa

SEQ ID NO: 453387 - DNA, 1397 bp, Homo sapiens
ggtggagaggggtcatagttctccctgagtgagactcacctgctcctctggcccctggtcctgtcctgttctccagcatggtgtgtctgaagttccctggaggctcctgcatggcagctctgacagtgacactgatggtgctgagctccccactggctttggctggggacacccgaccacgtttcttggagcaggttaaacatgagtgtcatttcttcaacgggacggagcgggtgcggttcctggacagatacttctataaccaagaggagtacgtgcgcttcgacagcgacgtgggggagtaccgggcggtgacggagctggggcggcctgacgccgagtactggaacagccagaaggacctcctggagcagaggcgggccgcggtggacacctactgcagacacaactacggggttgtggagagcttcacagtgcagcggcgagtctatcctaaggtgactgtgtatcctgcaaagacccagcccctgcagcaccacaacctcctggtctgctctgtgaatggtttctatccaggcagcattgaagtcaggtggttccggaacggccaggaagagaaggctggggtggtgtccacaggcctgatccagaatggagactggaccttccagaccctggtgatgctggaaacagttcctcggagtggagaggtttacacctgccaagtggagcacccaagcctgacgagccctctcacagtggaatggagagcacggtctgaatctgcacagagcaagatgctgagtggagtcgggggctttgtgctgggcctgctcttccttggggccgggctgttcatctacttcaggaatcagaaaggacactctggacttcagccaacaggattcctgagctgaagtgaagatgaccacattcaaggaagaaccttctgccccagctttgcaggatgaaacacttccccgcttggctctcattcttccacaagagagacctttctccggacctggttgctactggttcagcaactctgcagaaaatgtcctcccttgtggctgcctcagctcctgttcttggcctgaagcctcacagctttgatggcagtgcctcatcttcaacttttgtgcttccctttacctaaactgtcctgcctcccgtgcatctgtactccccttgtgccacacattacattattaaatgtttctcaaacatggagttaaaaaaaaaacaaaaaaaaaaaaaaaaaaaaacaaaagacaactgagggacatatagaggggggcgcgaaacaaggcacaacaaaggggcccgggcgacaagagggactccacgaaccgagttctgcggaacaaggggcaaacatcggcgggccccacaaagggagcagccgaaaatagcgaagacgcggtaaccgggta

SEQ ID NO: 453388 - DNA, 434 bp, Homo sapiens
gtgacgtttggtctgagctgacctttcctcacaatcgtgaatttgggctgtgaggatcaggccttgtcagaacccgagatgagaggagagagatttctggttcagtaagggtgagagccaggctccagactatagtgaattttccgaggagatatgtgtgggtcctgaataccatcccaagtgtccttataagagagaggcaaaagaggcaatagagacacagaaaagaaagccatgtgaagatggagcagagagatatatggccacaagccaaggaatgctgacagctgccagaagctgaaagaaggcaaggaatggactctcccctacagcctccagaggcaatgcagccctgccaacactttgattttagacttctggcctatagaactgagaaagaataaatttctgttcttttcagctaaaaagtttgt

SEQ ID NO: 453389 - DNA, 5327 bp, Homo sapiens
acgctgaactttaggagccagtctaaggcctaggcgcagacgcactgagcctaagcagccggtgatggcggcagcggctgtggtggctgcggcgggtccgggcccatgaggcgacgaaggaggcgggacggcttttacccagccccggacttccgagacagggaagctgaggacatggcaggagtgtttgacatagacctggaccagccagaggacgcgggctctgaggatgagctggaggaggggggtcagttaaatgaaagcatggaccatgggggagttggaccatatgaacttggcatggaacattgtgagaaatttgaaatctcagaaactagtgtgaacagagggccagaaaaaatcagaccagaatgttttgagctacttcgggtacttggtaaagggggctatggaaaggtttttcaagtacgaaaagtaacaggagcaaatactgggaaaatatttgccatgaaggtgcttaaaaaggcaatgatagtaagaaatgctaaagatacagctcatacaaaagcagaacggaatattctggaggaagtaaagcatcccttcatcgtggatttaatttatgcctttcagactggtggaaaactctacctcatccttgagtatctcagtggaggagaactatttatgcagttagaaagagagggaatatttatggaagacactgcctgcttttacttggcagaaatctccatggctttggggcatttacatcaaaaggggatcatctacagagacctgaagccggagaatatcatgcttaatcaccaaggtcatgtgaaactaacagactttggactatgcaaagaatctattcatgatggaacagtcacacacacattttgtggaacaatagaatacatggcccctgaaatcttgatgagaagtggccacaatcgtgctgtggattggtggagtttgggagcattaatgtatgacatgctgactggagcacccccattcactggggagaatagaaagaaaacaattgacaaaatcctcaaatgtaaactcaatttgcctccctacctcacacaagaagccagagatctgcttaaaaagctgctgaaaagaaatgctgcttctcgtctgggagctggtcctggggacgctggagaagttcaagctcatccattctttagacacattaactgggaagaacttctggctcgaaaggtggagcccccctttaaacctctgttgcaatctgaagaggatgtaagtcagtttgattccaagtttacacgtcagacacctgtcgacagcccagatgactcaactctcagtgaaagtgccaatcaggtctttctgggttttacatatgtggctccatctgtacttgaaagtgtgaaagaaaagttttcctttgaaccaaaaatccgatcacctcgaagatttattggcagcccacgaacacctgtcagcccagtcaaattttctcctggggatttctggggaagaggtgcttcggccagcacagcaaatcctcagacacctgtggaatacccaatggaaacaagtggcatagagcagatggatgtgacaatgagtggggaagcatcggcaccacttccaatacgacagccgaactctgggccatacaaaaaacaagcttttcccatgatctccaaacggccagagcacctgcgtatgaatctatgacagagcaatgcttttaatgaatttaaggcaaaaaaggtggagagggagatgtgtgagcatcctgcaaggtgaaacaagactcaaaatgacagtttcagagagtcaatgtcattacatagaacacttcagacacaggaaaaataaacgtggattttaaaaaatcaatcaatggtgcaaaaaaaaacttaaagcaaaatagtattgctgaactcttaggcacatcaattaattgattcctcgcgacatcttctcaaccttatcaaggattttcatgttgatgactcgaaactgacagtattaagggtaggatgttgcttctgaatcactgttgagttctgattgtgttgaagaagggttatcctttcattaggcaaagtacaaaattgcctataatacttgcaactaaggacaaattagcatgcaagcttggtcaaactttttccagcaaaatggaagcaaagacaaaagaaacttaccaattgatgttttacgtgcaaacaacctgaatcttttttttatataaatatatatttttcaaatagatttttgattcagctcattatgaaaaacatcccaaactttaaaatgcgaaattattggttggtgtgaagaaagccagacaacttctgtttcttctcttggtgaaataataaaatgcaaatgaatcattgttaaccacagctgtggctcgtttgagggattggggtggacctggggtttattttcagtaacccagctgcaatacctgtctgtaatatgagaaaaaaaaaatgaatctatttaatcatttctacttgcagtactgctatgtgctaagcttaactggaagccttggaatgggcataagttgtatgtcctacatttcatcattgtcccgggcctgcattgcactggaaaaaaaaatcgccacctgttcttacaccagtatttggttcaagacaccaaatgtcttcagcccatggctgaagaacaacagaagagagtcaggataaaaaatacatactgtggtcggcaaggtgagggagatagggatatccaggggaagagggtgttgctgtggcccactctctgtctaatctctttacagcaaattggtaagattttcagttttacttctttctactgtttctgctgtctaccttccttatatttttttcctcaacagttttaaaaagaaaaaaaggtctatttttttttctcctatacttgggctacattttttgattgtaaaaatatttgatggccttttgatgaatgtcttccacagtaaagaaaacttagtggcttaatttaggaaacatgttaacaggacactatgtttttgaaattgtaacaaaatctacataaatgatttacaggttaaaagaataaaaataaaggtaactttacctttcttaaatatttcctgccttaaagagagcatttccatgactttagctggtgaaagggtttaatatctgcagagctttataaaaatatatttcagtgcatactggtataatagatgatcatgcagttgcagttgagttgtatcaccttttttgtttgtcttttataatgtcttcagtctgagtgtgcaaagtcaatttgtaatattttgcaaccctaggatttttttaaatagatgctgcttgctatgttttcaaacctttttgagccataggatccaagccataaaattctttatgcatgttgaattcagtcagaaaagagcaaggctttgctttttgaaattgcaactcaaatgagatgggatgaaatcctatgacagtaagcaaaaacagaaccatgaaaaatgattggacatacaccttttcaattgtggcaataattgaaagaatcgataaaagttcatctttggacagaaagcctttaaaaaaaaaatcactccctcttccccctcctcccttattgcagcagcctactgagaactttgactgttgctggtaaattagaagctacaataataattaagggcagaaattatacttaaaaagtgcagatccttgttctttgacaatttgtgatgtctgaaaaaacagaacccgaaaagctatggtgatatgtacaggcattatttcagactgtaaatggcttgtgatactcttgatacttgttttcaaatatgtttactaactgtagtgttgactgcctgaccaaattccagtgaaacttatacaccaaaatattcttcctaggtcctatttgctagtaacatgagcactgtgattggctggctataaccaccccagttaaaccattttcataattagtagtgccagcaatagtggcaaacactgcaacttttctgcataaaaagcattaattgcacagctaccatccacacaaatacatagtttttctgacttcacatttattaagtgaaatttatttcccatgctgtggaaagtttattgagaacttgtttcataaatggatatccctactatgactgtgaaaacatgtcaagtgtcacattagtgtcacagacagaaagcacacacctatgcaatatggcttatctatatttatttgtaaaaatccaagcatagtttaaaatatgatgtcgatattactagtcttgagtttctaagagggttctttatgttataccaggtaagtgtataaaagagattaagtgcttttttttcatcacttgattattttctttaaaatcagctattacaggatatttttttattttatacatgctgttttttaattaaaatataatcactgaagtttactaatttgattttataaggtttgtagcattacagaataactaaactgggatttataaaccagctgtgattaacaatgtaaagtattaattattgaactttgaaccagatttttaggaaaattatgttctttttccccctttatggtcttaactaatttgaatccttcaagaaggatttttccatactattttttaagatagaagataatttgtgggcaggggtggaggatgcatgtatgatactccataaattcaacattctttactataggtaatgaatgattataaacaagatgcatcttagatagtattaatatactgagccttggattatatatttaatataggacctattttgaatattcagttaatcatatggttcctagcttacaagggctagatctaagattattcccatgagaaatgttgaatttatgaagaatagattttaaggctttgaaaatggttaatttctcaaaaacatcaatgtccaaacatctaccttttttcataggagtagacactagcaagctggacaaactatcacaaaagtatttgtcacacataacctgtggtctgttgctgattaatacagtactttttcttgtgtgattcttaacattatagcacaagtattatctcagtggattatccggaataacatctgaaagatgggttcatctatgtttgtgtttgctctttaaactattgtttctcctatcccaagttcgctttgcatctatcagtaaataaaattcttcagctgccttattaggagtgctatgagggtaacacctgttctgcttttcatcttgtatttagttgactgtattatttgatttcggattgaatgaatgtaaatagaaattaaatgcaaatttgaatgaaaataaaaaaa

SEQ ID NO: 453390 - DNA, 5251 bp, Homo sapiens
accatgatacacagcagaaggaggggggaaaaacacgtagatattgcccttcggcttaaaatccagccccggacttccgagacagggaagctgaggacatggcaggagtgtttgacatagacctggaccagccagaggacgcgggctctgaggatgagctggaggaggggggtcagttaaatgaaagcatggaccatgggggagttggaccatatgaacttggcatggaacattgtgagaaatttgaaatctcagaaactagtgtgaacagagggccagaaaaaatcagaccagaatgttttgagctacttcgggtacttggtaaagggggctatggaaaggtttttcaagtacgaaaagtaacaggagcaaatactgggaaaatatttgccatgaaggtgcttaaaaaggcaatgatagtaagaaatgctaaagatacagctcatacaaaagcagaacggaatattctggaggaagtaaagcatcccttcatcgtggatttaatttatgcctttcagactggtggaaaactctacctcatccttgagtatctcagtggaggagaactatttatgcagttagaaagagagggaatatttatggaagacactgcctgcttttacttggcagaaatctccatggctttggggcatttacatcaaaaggggatcatctacagagacctgaagccggagaatatcatgcttaatcaccaaggtcatgtgaaactaacagactttggactatgcaaagaatctattcatgatggaacagtcacacacacattttgtggaacaatagaatacatggcccctgaaatcttgatgagaagtggccacaatcgtgctgtggattggtggagtttgggagcattaatgtatgacatgctgactggagcacccccattcactggggagaatagaaagaaaacaattgacaaaatcctcaaatgtaaactcaatttgcctccctacctcacacaagaagccagagatctgcttaaaaagctgctgaaaagaaatgctgcttctcgtctgggagctggtcctggggacgctggagaagttcaagctcatccattctttagacacattaactgggaagaacttctggctcgaaaggtggagcccccctttaaacctctgttgcaatctgaagaggatgtaagtcagtttgattccaagtttacacgtcagacacctgtcgacagcccagatgactcaactctcagtgaaagtgccaatcaggtctttctgggttttacatatgtggctccatctgtacttgaaagtgtgaaagaaaagttttcctttgaaccaaaaatccgatcacctcgaagatttattggcagcccacgaacacctgtcagcccagtcaaattttctcctggggatttctggggaagaggtgcttcggccagcacagcaaatcctcagacacctgtggaatacccaatggaaacaagtggcatagagcagatggatgtgacaatgagtggggaagcatcggcaccacttccaatacgacagccgaactctgggccatacaaaaaacaagcttttcccatgatctccaaacggccagagcacctgcgtatgaatctatgacagagcaatgcttttaatgaatttaaggcaaaaaaggtggagagggagatgtgtgagcatcctgcaaggtgaaacaagactcaaaatgacagtttcagagagtcaatgtcattacatagaacacttcagacacaggaaaaataaacgtggattttaaaaaatcaatcaatggtgcaaaaaaaaacttaaagcaaaatagtattgctgaactcttaggcacatcaattaattgattcctcgcgacatcttctcaaccttatcaaggattttcatgttgatgactcgaaactgacagtattaagggtaggatgttgcttctgaatcactgttgagttctgattgtgttgaagaagggttatcctttcattaggcaaagtacaaaattgcctataatacttgcaactaaggacaaattagcatgcaagcttggtcaaactttttccagcaaaatggaagcaaagacaaaagaaacttaccaattgatgttttacgtgcaaacaacctgaatcttttttttatataaatatatatttttcaaatagatttttgattcagctcattatgaaaaacatcccaaactttaaaatgcgaaattattggttggtgtgaagaaagccagacaacttctgtttcttctcttggtgaaataataaaatgcaaatgaatcattgttaaccacagctgtggctcgtttgagggattggggtggacctggggtttattttcagtaacccagctgcaatacctgtctgtaatatgagaaaaaaaaaatgaatctatttaatcatttctacttgcagtactgctatgtgctaagcttaactggaagccttggaatgggcataagttgtatgtcctacatttcatcattgtcccgggcctgcattgcactggaaaaaaaaatcgccacctgttcttacaccagtatttggttcaagacaccaaatgtcttcagcccatggctgaagaacaacagaagagagtcaggataaaaaatacatactgtggtcggcaaggtgagggagatagggatatccaggggaagagggtgttgctgtggcccactctctgtctaatctctttacagcaaattggtaagattttcagttttacttctttctactgtttctgctgtctaccttccttatatttttttcctcaacagttttaaaaagaaaaaaaggtctatttttttttctcctatacttgggctacattttttgattgtaaaaatatttgatggccttttgatgaatgtcttccacagtaaagaaaacttagtggcttaatttaggaaacatgttaacaggacactatgtttttgaaattgtaacaaaatctacataaatgatttacaggttaaaagaataaaaataaaggtaactttacctttcttaaatatttcctgccttaaagagagcatttccatgactttagctggtgaaagggtttaatatctgcagagctttataaaaatatatttcagtgcatactggtataatagatgatcatgcagttgcagttgagttgtatcaccttttttgtttgtcttttataatgtcttcagtctgagtgtgcaaagtcaatttgtaatattttgcaaccctaggatttttttaaatagatgctgcttgctatgttttcaaacctttttgagccataggatccaagccataaaattctttatgcatgttgaattcagtcagaaaagagcaaggctttgctttttgaaattgcaactcaaatgagatgggatgaaatcctatgacagtaagcaaaaacagaaccatgaaaaatgattggacatacaccttttcaattgtggcaataattgaaagaatcgataaaagttcatctttggacagaaagcctttaaaaaaaaaatcactccctcttccccctcctcccttattgcagcagcctactgagaactttgactgttgctggtaaattagaagctacaataataattaagggcagaaattatacttaaaaagtgcagatccttgttctttgacaatttgtgatgtctgaaaaaacagaacccgaaaagctatggtgatatgtacaggcattatttcagactgtaaatggcttgtgatactcttgatacttgttttcaaatatgtttactaactgtagtgttgactgcctgaccaaattccagtgaaacttatacaccaaaatattcttcctaggtcctatttgctagtaacatgagcactgtgattggctggctataaccaccccagttaaaccattttcataattagtagtgccagcaatagtggcaaacactgcaacttttctgcataaaaagcattaattgcacagctaccatccacacaaatacatagtttttctgacttcacatttattaagtgaaatttatttcccatgctgtggaaagtttattgagaacttgtttcataaatggatatccctactatgactgtgaaaacatgtcaagtgtcacattagtgtcacagacagaaagcacacacctatgcaatatggcttatctatatttatttgtaaaaatccaagcatagtttaaaatatgatgtcgatattactagtcttgagtttctaagagggttctttatgttataccaggtaagtgtataaaagagattaagtgcttttttttcatcacttgattattttctttaaaatcagctattacaggatatttttttattttatacatgctgttttttaattaaaatataatcactgaagtttactaatttgattttataaggtttgtagcattacagaataactaaactgggatttataaaccagctgtgattaacaatgtaaagtattaattattgaactttgaaccagatttttaggaaaattatgttctttttccccctttatggtcttaactaatttgaatccttcaagaaggatttttccatactattttttaagatagaagataatttgtgggcaggggtggaggatgcatgtatgatactccataaattcaacattctttactataggtaatgaatgattataaacaagatgcatcttagatagtattaatatactgagccttggattatatatttaatataggacctattttgaatattcagttaatcatatggttcctagcttacaagggctagatctaagattattcccatgagaaatgttgaatttatgaagaatagattttaaggctttgaaaatggttaatttctcaaaaacatcaatgtccaaacatctaccttttttcataggagtagacactagcaagctggacaaactatcacaaaagtatttgtcacacataacctgtggtctgttgctgattaatacagtactttttcttgtgtgattcttaacattatagcacaagtattatctcagtggattatccggaataacatctgaaagatgggttcatctatgtttgtgtttgctctttaaactattgtttctcctatcccaagttcgctttgcatctatcagtaaataaaattcttcagctgccttattaggagtgctatgagggtaacacctgttctgcttttcatcttgtatttagttgactgtattatttgatttcggattgaatgaatgtaaatagaaattaaatgcaaatttgaatgaaaataaaaaaa

SEQ ID NO: 453391 - DNA, 4660 bp, Homo sapiens
aagacactgcctggcttgagtggaacgctcttcacaccagttgttcctaacagaaccattctcattgcggctttctttccttgaattgcttttacttggcagaaatctccatggctttggggcatttacatcaaaaggggatcatctacagagacctgaagccggagaatatcatgcttaatcaccaaggtcatgtgaaactaacagactttggactatgcaaagaatctattcatgatggaacagtcacacacacattttgtggaacaatagaatacatggcccctgaaatcttgatgagaagtggccacaatcgtgctgtggattggtggagtttgggagcattaatgtatgacatgctgactggagcacccccattcactggggagaatagaaagaaaacaattgacaaaatcctcaaatgtaaactcaatttgcctccctacctcacacaagaagccagagatctgcttaaaaaggctcatccattctttagacacattaactgggaagaacttctggctcgaaaggtggagcccccctttaaacctctgttgcaatctgaagaggatgtaagtcagtttgattccaagtttacacgtcagacacctgtcgacagcccagatgactcaactctcagtgaaagtgccaatcaggtctttctgggttttacatatgtggctccatctgtacttgaaagtgtgaaagaaaagttttcctttgaaccaaaaatccgatcacctcgaagatttattggcagcccacgaacacctgtcagcccagtcaaattttctcctggggatttctggggaagaggtgcttcggccagcacagcaaatcctcagacacctgtggaatacccaatggaaacaagtggcatagagcagatggatgtgacaatgagtggggaagcatcggcaccacttccaatacgacagccgaactctgggccatacaaaaaacaagcttttcccatgatctccaaacggccagagcacctgcgtatgaatctatgacagagcaatgcttttaatgaatttaaggcaaaaaaggtggagagggagatgtgtgagcatcctgcaaggtgaaacaagactcaaaatgacagtttcagagagtcaatgtcattacatagaacacttcagacacaggaaaaataaacgtggattttaaaaaatcaatcaatggtgcaaaaaaaaacttaaagcaaaatagtattgctgaactcttaggcacatcaattaattgattcctcgcgacatcttctcaaccttatcaaggattttcatgttgatgactcgaaactgacagtattaagggtaggatgttgcttctgaatcactgttgagttctgattgtgttgaagaagggttatcctttcattaggcaaagtacaaaattgcctataatacttgcaactaaggacaaattagcatgcaagcttggtcaaactttttccagcaaaatggaagcaaagacaaaagaaacttaccaattgatgttttacgtgcaaacaacctgaatcttttttttatataaatatatatttttcaaatagatttttgattcagctcattatgaaaaacatcccaaactttaaaatgcgaaattattggttggtgtgaagaaagccagacaacttctgtttcttctcttggtgaaataataaaatgcaaatgaatcattgttaaccacagctgtggctcgtttgagggattggggtggacctggggtttattttcagtaacccagctgcaatacctgtctgtaatatgagaaaaaaaaaatgaatctatttaatcatttctacttgcagtactgctatgtgctaagcttaactggaagccttggaatgggcataagttgtatgtcctacatttcatcattgtcccgggcctgcattgcactggaaaaaaaaatcgccacctgttcttacaccagtatttggttcaagacaccaaatgtcttcagcccatggctgaagaacaacagaagagagtcaggataaaaaatacatactgtggtcggcaaggtgagggagatagggatatccaggggaagagggtgttgctgtggcccactctctgtctaatctctttacagcaaattggtaagattttcagttttacttctttctactgtttctgctgtctaccttccttatatttttttcctcaacagttttaaaaagaaaaaaaggtctatttttttttctcctatacttgggctacattttttgattgtaaaaatatttgatggccttttgatgaatgtcttccacagtaaagaaaacttagtggcttaatttaggaaacatgttaacaggacactatgtttttgaaattgtaacaaaatctacataaatgatttacaggttaaaagaataaaaataaaggtaactttacctttcttaaatatttcctgccttaaagagagcatttccatgactttagctggtgaaagggtttaatatctgcagagctttataaaaatatatttcagtgcatactggtataatagatgatcatgcagttgcagttgagttgtatcaccttttttgtttgtcttttataatgtcttcagtctgagtgtgcaaagtcaatttgtaatattttgcaaccctaggatttttttaaatagatgctgcttgctatgttttcaaacctttttgagccataggatccaagccataaaattctttatgcatgttgaattcagtcagaaaagagcaaggctttgctttttgaaattgcaactcaaatgagatgggatgaaatcctatgacagtaagcaaaaacagaaccatgaaaaatgattggacatacaccttttcaattgtggcaataattgaaagaatcgataaaagttcatctttggacagaaagcctttaaaaaaaaaatcactccctcttccccctcctcccttattgcagcagcctactgagaactttgactgttgctggtaaattagaagctacaataataattaagggcagaaattatacttaaaaagtgcagatccttgttctttgacaatttgtgatgtctgaaaaaacagaacccgaaaagctatggtgatatgtacaggcattatttcagactgtaaatggcttgtgatactcttgatacttgttttcaaatatgtttactaactgtagtgttgactgcctgaccaaattccagtgaaacttatacaccaaaatattcttcctaggtcctatttgctagtaacatgagcactgtgattggctggctataaccaccccagttaaaccattttcataattagtagtgccagcaatagtggcaaacactgcaacttttctgcataaaaagcattaattgcacagctaccatccacacaaatacatagtttttctgacttcacatttattaagtgaaatttatttcccatgctgtggaaagtttattgagaacttgtttcataaatggatatccctactatgactgtgaaaacatgtcaagtgtcacattagtgtcacagacagaaagcacacacctatgcaatatggcttatctatatttatttgtaaaaatccaagcatagtttaaaatatgatgtcgatattactagtcttgagtttctaagagggttctttatgttataccaggtaagtgtataaaagagattaagtgcttttttttcatcacttgattattttctttaaaatcagctattacaggatatttttttattttatacatgctgttttttaattaaaatataatcactgaagtttactaatttgattttataaggtttgtagcattacagaataactaaactgggatttataaaccagctgtgattaacaatgtaaagtattaattattgaactttgaaccagatttttaggaaaattatgttctttttccccctttatggtcttaactaatttgaatccttcaagaaggatttttccatactattttttaagatagaagataatttgtgggcaggggtggaggatgcatgtatgatactccataaattcaacattctttactataggtaatgaatgattataaacaagatgcatcttagatagtattaatatactgagccttggattatatatttaatataggacctattttgaatattcagttaatcatatggttcctagcttacaagggctagatctaagattattcccatgagaaatgttgaatttatgaagaatagattttaaggctttgaaaatggttaatttctcaaaaacatcaatgtccaaacatctaccttttttcataggagtagacactagcaagctggacaaactatcacaaaagtatttgtcacacataacctgtggtctgttgctgattaatacagtactttttcttgtgtgattcttaacattatagcacaagtattatctcagtggattatccggaataacatctgaaagatgggttcatctatgtttgtgtttgctctttaaactattgtttctcctatcccaagttcgctttgcatctatcagtaaataaaattcttcagctgccttattaggagtgctatgagggtaacacctgttctgcttttcatcttgtatttagttgactgtattatttgatttcggattgaatgaatgtaaatagaaattaaatgcaaatttgaatgaaaataaaaaaa

SEQ ID NO: 453392 - DNA, 2281 bp, Homo sapiens
accatgatacacagcagaaggaggggggaaaaacacgtagatattgcccttcggcttaaaatccagccccggacttccgagacagggaagctgaggacatggcaggagtgtttgacatagacctggaccagccagaggacgcgggctctgaggatgagctggaggaggggggtcagttaaatgaaagcatggaccatgggggagttggaccatatgaacttggcatggaacattgtgagaaatttgaaatctcagaaactagtgtgaacagagggccagaaaaaatcagaccagaatgttttgagctacttcgggtacttggtaaagggggctatggaaaggtttttcaagtacgaaaagtaacaggagcaaatactgggaaaatatttgccatgaaggtgcttaaaaaggcaatgatagtaagaaatgctaaagatacagctcatacaaaagcagaacggaatattctggaggaagtaaagcatcccttcatcgtggatttaatttatgcctttcagactggtggaaaactctacctcatccttgagtatctcagtggaggagaactatttatgcagttagaaagagagggaatatttatggaagacactgcctgcttttacttggcagaaatctccatggctttggggcatttacatcaaaaggggatcatctacagagacctgaagccggagaatatcatgcttaatcaccaaggtcatgtgaaactaacagactttggactatgcaaagaatctattcatgatggaacagtcacacacacattttgtggaacaatagaatacatggcccctgaaatcttgatgagaagtggccacaatcgtgctgtggattggtggagtttgggagcattaatgtatgacatgctgactggagcacccccattcactggggagaatagaaagaaaacaattgacaaaatcctcaaatgtaaactcaatttgcctccctacctcacacaagaagccagagatctgcttaaaaagctgctgaaaagaaatgctgcttctcgtctgggagctggtcctggggacgctggagaagttcaagctcatccattctttagacacattaactgggaagaacttctggctcgaaaggtggagcccccctttaaacctctgttgcaatctgaagaggatgtaagtcagtttgattccaagtttacacgtcagacacctgtcgacagcccagatgactcaactctcagtgaaagtgccaatcaggtctttctgggttttacatatgtggctccatctgtacttgaaagtgtgaaagaaaagttttcctttgaaccaaaaatccgatcacctcgaagatttattggcagcccacgaacacctgtcagcccagtcaaattttctcctggggatttctggggaagaggtgcttcggccagcacagcaaatcctcagacacctgtggaatacccaatggaaacaagtggcatagagcagatggatgtgacaatgagtggggaagcatcggcaccacttccaatacgacagccgaactctgggccatacaaaaaacaagcttttcccatgatctccaaacggccagagcacctgcgtatgaatctatgacagagcaatgcttttaatgaatttaaggcaaaaaaggtggagagggagatgtgtgagcatcctgcaaggtgaaacaagactcaaaatgacagtttcagagagtcaatgtcattacatagaacacttcagacacaggaaaaataaacgtggattttaaaaaatcaatcaatggtgcaaaaaaaaacttaaagcaaaatagtattgctgaactcttaggcacatcaattaattgattcctcgcgacatcttctcaaccttatcaaggattttcatgttgatgactcgaaactgacagtattaagggtaggatgttgcttctgaatcactgttgagttctgattgtgttgaagaagggttatcctttcattaggcaaagtacaaaattgcctataatacttgcaactaaggacaaattagcatgcaagcttggtcaaactttttccagcaaaatggaagcaaagacaaaagaaacttaccaattgatgttttacgtgcaaacaacctgaatcttttttttatataaatatatatttttcaaatagatttttgattcagctcattatgaaaaacatcccaaactttaaaatgcgaaattattggttggtgtgaagaaagccagacaacttctgtttcttctcttggtgaaataataaaatgcaaatgaatcattgtta

SEQ ID NO: 453393 - DNA, 402 bp, Homo sapiens
gtgacgtttggtctgagctgacctttcctcacaatcgtgaatttgggctgtgaggatcaggccttgtcagaacccgagatgagaggagagagatttctggttcagtaagggtgagagccaggctccagactatagtgaattttccgaggagatatgtgtgggtcctgaataccatcccaagtgtccttataagagagaggcaaaagaggcaatagagacacagaaaagaaagccatgtgaagatggagcagagagatatatggcctgacagctgccagaagctgaaagaaggcaaggaatggactctcccctacagcctccagaggcaatgcagccctgccaacactggcctatagaactgagaaagaataaatttctgttcttttcagctaaaaagtttgt

SEQ ID NO: 453394 - DNA, 675 bp, Homo sapiens
ggcaggcctgtgaaatagatgttgaatagataatgcccttattttataaatggagaaattgaagcataaaatcacatagctcacttatcacacagaaagttaatggtggaaacacaggcttccttccaggacactgctacttcctctgtcctgttgcttaaaaactgcacgtctgccggccacagtggtgcatgcctgtagcctaagctactcaggaggctgaggtgggaggatcatttgagctaaggattattaatagaatctagccttgacaacatagttgagaccctgtctgtaaaacaaaataaaggtctttagcagttagcccatttcacagcatacatttctgatctccatgtataactaatttaggaaatggataatattattcaaaatttgtttcttatatgctaatatttttctctccctgctaatatttttcacttgtcttctactcttagcccccattcactggggagaatagaaagaaaacaattgacaaaatcctcaaatgtaaactcaatttgcctccctacctcacacaagaagccagagatctgcttaaaaagtaaggttcttaaatggtcactgacactacaagattcaatgactaggatttaactagatagaatttaatgtatattttgaataaagagtcatatataaatattgaac

SEQ ID NO: 453395 - DNA, 5346 bp, Homo sapiens
acgctgaactttaggagccagtctaaggcctaggcgcagacgcactgagcctaagcagccggtgatggcggcagcggctgtggtggctgcggcgggtccgggcccatgaggcgacgaaggaggcgggacggcttttacccagccccggacttccgagacagggaagctgaggacatggcaggagtgtttgacatagacctggaccagccagaggacgcgggctctgaggatgagctggaggaggggggtcagttaaatgaaagcatggaccatgggggagttggaccatatgaacttggcatggaacattgtgagaaatttgaaatctcagaaactagtgtgaacagagggccagaaaaaatcagaccagaatgttttgagctacttcgggtacttggtaaagggggctatggaaaggtttttcaagtacgaaaagtaacaggagcaaatactgggaaaatatttgccatgaaggtgcttaaaaagatgatctcttttcctttaggcaatgatagtaagaaatgctaaagatacagctcatacaaaagcagaacggaatattctggaggaagtaaagcatcccttcatcgtggatttaatttatgcctttcagactggtggaaaactctacctcatccttgagtatctcagtggaggagaactatttatgcagttagaaagagagggaatatttatggaagacactgcctgcttttacttggcagaaatctccatggctttggggcatttacatcaaaaggggatcatctacagagacctgaagccggagaatatcatgcttaatcaccaaggtcatgtgaaactaacagactttggactatgcaaagaatctattcatgatggaacagtcacacacacattttgtggaacaatagaatacatggcccctgaaatcttgatgagaagtggccacaatcgtgctgtggattggtggagtttgggagcattaatgtatgacatgctgactggagcacccccattcactggggagaatagaaagaaaacaattgacaaaatcctcaaatgtaaactcaatttgcctccctacctcacacaagaagccagagatctgcttaaaaagctgctgaaaagaaatgctgcttctcgtctgggagctggtcctggggacgctggagaagttcaagctcatccattctttagacacattaactgggaagaacttctggctcgaaaggtggagcccccctttaaacctctgttgcaatctgaagaggatgtaagtcagtttgattccaagtttacacgtcagacacctgtcgacagcccagatgactcaactctcagtgaaagtgccaatcaggtctttctgggttttacatatgtggctccatctgtacttgaaagtgtgaaagaaaagttttcctttgaaccaaaaatccgatcacctcgaagatttattggcagcccacgaacacctgtcagcccagtcaaattttctcctggggatttctggggaagaggtgcttcggccagcacagcaaatcctcagacacctgtggaatacccaatggaaacaagtggcatagagcagatggatgtgacaatgagtggggaagcatcggcaccacttccaatacgacagccgaactctgggccatacaaaaaacaagcttttcccatgatctccaaacggccagagcacctgcgtatgaatctatgacagagcaatgcttttaatgaatttaaggcaaaaaaggtggagagggagatgtgtgagcatcctgcaaggtgaaacaagactcaaaatgacagtttcagagagtcaatgtcattacatagaacacttcagacacaggaaaaataaacgtggattttaaaaaatcaatcaatggtgcaaaaaaaaacttaaagcaaaatagtattgctgaactcttaggcacatcaattaattgattcctcgcgacatcttctcaaccttatcaaggattttcatgttgatgactcgaaactgacagtattaagggtaggatgttgcttctgaatcactgttgagttctgattgtgttgaagaagggttatcctttcattaggcaaagtacaaaattgcctataatacttgcaactaaggacaaattagcatgcaagcttggtcaaactttttccagcaaaatggaagcaaagacaaaagaaacttaccaattgatgttttacgtgcaaacaacctgaatcttttttttatataaatatatatttttcaaatagatttttgattcagctcattatgaaaaacatcccaaactttaaaatgcgaaattattggttggtgtgaagaaagccagacaacttctgtttcttctcttggtgaaataataaaatgcaaatgaatcattgttaaccacagctgtggctcgtttgagggattggggtggacctggggtttattttcagtaacccagctgcaatacctgtctgtaatatgagaaaaaaaaaatgaatctatttaatcatttctacttgcagtactgctatgtgctaagcttaactggaagccttggaatgggcataagttgtatgtcctacatttcatcattgtcccgggcctgcattgcactggaaaaaaaaatcgccacctgttcttacaccagtatttggttcaagacaccaaatgtcttcagcccatggctgaagaacaacagaagagagtcaggataaaaaatacatactgtggtcggcaaggtgagggagatagggatatccaggggaagagggtgttgctgtggcccactctctgtctaatctctttacagcaaattggtaagattttcagttttacttctttctactgtttctgctgtctaccttccttatatttttttcctcaacagttttaaaaagaaaaaaaggtctatttttttttctcctatacttgggctacattttttgattgtaaaaatatttgatggccttttgatgaatgtcttccacagtaaagaaaacttagtggcttaatttaggaaacatgttaacaggacactatgtttttgaaattgtaacaaaatctacataaatgatttacaggttaaaagaataaaaataaaggtaactttacctttcttaaatatttcctgccttaaagagagcatttccatgactttagctggtgaaagggtttaatatctgcagagctttataaaaatatatttcagtgcatactggtataatagatgatcatgcagttgcagttgagttgtatcaccttttttgtttgtcttttataatgtcttcagtctgagtgtgcaaagtcaatttgtaatattttgcaaccctaggatttttttaaatagatgctgcttgctatgttttcaaacctttttgagccataggatccaagccataaaattctttatgcatgttgaattcagtcagaaaagagcaaggctttgctttttgaaattgcaactcaaatgagatgggatgaaatcctatgacagtaagcaaaaacagaaccatgaaaaatgattggacatacaccttttcaattgtggcaataattgaaagaatcgataaaagttcatctttggacagaaagcctttaaaaaaaaaatcactccctcttccccctcctcccttattgcagcagcctactgagaactttgactgttgctggtaaattagaagctacaataataattaagggcagaaattatacttaaaaagtgcagatccttgttctttgacaatttgtgatgtctgaaaaaacagaacccgaaaagctatggtgatatgtacaggcattatttcagactgtaaatggcttgtgatactcttgatacttgttttcaaatatgtttactaactgtagtgttgactgcctgaccaaattccagtgaaacttatacaccaaaatattcttcctaggtcctatttgctagtaacatgagcactgtgattggctggctataaccaccccagttaaaccattttcataattagtagtgccagcaatagtggcaaacactgcaacttttctgcataaaaagcattaattgcacagctaccatccacacaaatacatagtttttctgacttcacatttattaagtgaaatttatttcccatgctgtggaaagtttattgagaacttgtttcataaatggatatccctactatgactgtgaaaacatgtcaagtgtcacattagtgtcacagacagaaagcacacacctatgcaatatggcttatctatatttatttgtaaaaatccaagcatagtttaaaatatgatgtcgatattactagtcttgagtttctaagagggttctttatgttataccaggtaagtgtataaaagagattaagtgcttttttttcatcacttgattattttctttaaaatcagctattacaggatatttttttattttatacatgctgttttttaattaaaatataatcactgaagtttactaatttgattttataaggtttgtagcattacagaataactaaactgggatttataaaccagctgtgattaacaatgtaaagtattaattattgaactttgaaccagatttttaggaaaattatgttctttttccccctttatggtcttaactaatttgaatccttcaagaaggatttttccatactattttttaagatagaagataatttgtgggcaggggtggaggatgcatgtatgatactccataaattcaacattctttactataggtaatgaatgattataaacaagatgcatcttagatagtattaatatactgagccttggattatatatttaatataggacctattttgaatattcagttaatcatatggttcctagcttacaagggctagatctaagattattcccatgagaaatgttgaatttatgaagaatagattttaaggctttgaaaatggttaatttctcaaaaacatcaatgtccaaacatctaccttttttcataggagtagacactagcaagctggacaaactatcacaaaagtatttgtcacacataacctgtggtctgttgctgattaatacagtactttttcttgtgtgattcttaacattatagcacaagtattatctcagtggattatccggaataacatctgaaagatgggttcatctatgtttgtgtttgctctttaaactattgtttctcctatcccaagttcgctttgcatctatcagtaaataaaattcttcagctgccttattaggagtgctatgagggtaacacctgttctgcttttcatcttgtatttagttgactgtattatttgatttcggattgaatgaatgtaaatagaaattaaatgcaaatttgaatgaaaataaaaaaa

SEQ ID NO: 453396 - DNA, 5290 bp, Homo sapiens
acgctgaactttaggagccagtctaaggcctaggcgcagacgcactgagcctaagcagccggtgatggcggcagcggctgtggtggctgcggcgggtccgggcccatgaggcgacgaaggaggcgggacggcttttacccagccccggacttccgagacagggaagctgaggacatggcaggagtgtttgacatagacctggaccagccagaggacgcgggctctgaggatgagctggaggaggggggtcagttaaatgaaagcatggaccatgggggagttggaccatatgaacttggcatggaacattgtgagaaatttgaaatctcagaaactagtgtgaacagagggccagaaaaaatcagaccagaatgttttgagctacttcgggtacttggtaaagggggctatggaaaggtttttcaagtacgaaaagtaacaggagcaaatactgggaaaatatttgccatgaaggtgcttaaaaaggcaatgatagtaagaaatgctaaagatacagctcatacaaaagcagaacggaatattctggaggaagtaaagcatcccttcatcgtggatttaatttatgcctttcagactggtggaaaactctacctcatccttgagtatctcagtggaggagaactatttatgcagttagaaagagagggaatatttatggaagacactgcctgcttttacttggcagaaatctccatggctttggggcatttacatcaaaaggggatcatctacagagacctgaagccggagaatatcatgcttaatcaccaaggtcatgtgaaactaacagactttggactatgcaaagaatctattcatgatggaacagtcacacacacattttgtggaacaatagaatacatggcccctgaaatcttgatgagaagtggccacaatcgtgctgtggattggtggagtttgggagcattaatgtatgacatgctgactggagcacccccattcactggggagaatagaaagaaaacaattgacaaaatcctcaaatgtaaactcaatttgcctccctacctcacacaagaagccagagatctgcttaaaaagctgctgaaaagaaatgctgcttctcgtctgggagctggtcctggggacgctggagaagttcaagctcatccattctttagacacattaactgggaagaacttctggctcgaaaggtggagcccccctttaaacctctgttgcaatctgaagaggatgtaagtcagtttgattccaagtttacacgtcagacacctgtcgacagcccagatgactcaactctcagtgaaagtgccaatcaggtctttctgggttttacatatgtggctccatctgtacttgaaagtgtgaaagaaaagttttcctttgaaccaaaaatccgatcacctcgaagatttattggcagcccacgaacacctgtcagctcttccttgtcttaaagcccagtcaaattttctcctggggatttctggggaagaggtgcttcggccagcacagcaaatcctcagacacctgtggaatacccaatggaaacaagtggcatagagcagatggatgtgacaatgagtggggaagcatcggcaccacttccaatacgacagccgaactctgggccatacaaaaaacaagcttttcccatgatctccaaacggccagagcacctgcgtatgaatctatgacagagcaatgcttttaatgaatttaaggcaatgacagtttcagagagtcaatgtcattacatagaacacttcagacacaggaaaaataaacgtggattttaaaaaatcaatcaatggtgcaaaaaaaaacttaaagcaaaatagtattgctgaactcttaggcacatcaattaattgattcctcgcgacatcttctcaaccttatcaaggattttcatgttgatgactcgaaactgacagtattaagggtaggatgttgcttctgaatcactgttgagttctgattgtgttgaagaagggttatcctttcattaggcaaagtacaaaattgcctataatacttgcaactaaggacaaattagcatgcaagcttggtcaaactttttccagcaaaatggaagcaaagacaaaagaaacttaccaattgatgttttacgtgcaaacaacctgaatcttttttttatataaatatatatttttcaaatagatttttgattcagctcattatgaaaaacatcccaaactttaaaatgcgaaattattggttggtgtgaagaaagccagacaacttctgtttcttctcttggtgaaataataaaatgcaaatgaatcattgttaaccacagctgtggctcgtttgagggattggggtggacctggggtttattttcagtaacccagctgcaatacctgtctgtaatatgagaaaaaaaaaatgaatctatttaatcatttctacttgcagtactgctatgtgctaagcttaactggaagccttggaatgggcataagttgtatgtcctacatttcatcattgtcccgggcctgcattgcactggaaaaaaaaatcgccacctgttcttacaccagtatttggttcaagacaccaaatgtcttcagcccatggctgaagaacaacagaagagagtcaggataaaaaatacatactgtggtcggcaaggtgagggagatagggatatccaggggaagagggtgttgctgtggcccactctctgtctaatctctttacagcaaattggtaagattttcagttttacttctttctactgtttctgctgtctaccttccttatatttttttcctcaacagttttaaaaagaaaaaaaggtctatttttttttctcctatacttgggctacattttttgattgtaaaaatatttgatggccttttgatgaatgtcttccacagtaaagaaaacttagtggcttaatttaggaaacatgttaacaggacactatgtttttgaaattgtaacaaaatctacataaatgatttacaggttaaaagaataaaaataaaggtaactttacctttcttaaatatttcctgccttaaagagagcatttccatgactttagctggtgaaagggtttaatatctgcagagctttataaaaatatatttcagtgcatactggtataatagatgatcatgcagttgcagttgagttgtatcaccttttttgtttgtcttttataatgtcttcagtctgagtgtgcaaagtcaatttgtaatattttgcaaccctaggatttttttaaatagatgctgcttgctatgttttcaaacctttttgagccataggatccaagccataaaattctttatgcatgttgaattcagtcagaaaagagcaaggctttgctttttgaaattgcaactcaaatgagatgggatgaaatcctatgacagtaagcaaaaacagaaccatgaaaaatgattggacatacaccttttcaattgtggcaataattgaaagaatcgataaaagttcatctttggacagaaagcctttaaaaaaaaaatcactccctcttccccctcctcccttattgcagcagcctactgagaactttgactgttgctggtaaattagaagctacaataataattaagggcagaaattatacttaaaaagtgcagatccttgttctttgacaatttgtgatgtctgaaaaaacagaacccgaaaagctatggtgatatgtacaggcattatttcagactgtaaatggcttgtgatactcttgatacttgttttcaaatatgtttactaactgtagtgttgactgcctgaccaaattccagtgaaacttatacaccaaaatattcttcctaggtcctatttgctagtaacatgagcactgtgattggctggctataaccaccccagttaaaccattttcataattagtagtgccagcaatagtggcaaacactgcaacttttctgcataaaaagcattaattgcacagctaccatccacacaaatacatagtttttctgacttcacatttattaagtgaaatttatttcccatgctgtggaaagtttattgagaacttgtttcataaatggatatccctactatgactgtgaaaacatgtcaagtgtcacattagtgtcacagacagaaagcacacacctatgcaatatggcttatctatatttatttgtaaaaatccaagcatagtttaaaatatgatgtcgatattactagtcttgagtttctaagagggttctttatgttataccaggtaagtgtataaaagagattaagtgcttttttttcatcacttgattattttctttaaaatcagctattacaggatatttttttattttatacatgctgttttttaattaaaatataatcactgaagtttactaatttgattttataaggtttgtagcattacagaataactaaactgggatttataaaccagctgtgattaacaatgtaaagtattaattattgaactttgaaccagatttttaggaaaattatgttctttttccccctttatggtcttaactaatttgaatccttcaagaaggatttttccatactattttttaagatagaagataatttgtgggcaggggtggaggatgcatgtatgatactccataaattcaacattctttactataggtaatgaatgattataaacaagatgcatcttagatagtattaatatactgagccttggattatatatttaatataggacctattttgaatattcagttaatcatatggttcctagcttacaagggctagatctaagattattcccatgagaaatgttgaatttatgaagaatagattttaaggctttgaaaatggttaatttctcaaaaacatcaatgtccaaacatctaccttttttcataggagtagacactagcaagctggacaaactatcacaaaagtatttgtcacacataacctgtggtctgttgctgattaatacagtactttttcttgtgtgattcttaacattatagcacaagtattatctcagtggattatccggaataacatctgaaagatgggttcatctatgtttgtgtttgctctttaaactattgtttctcctatcccaagttcgctttgcatctatcagtaaataaaattcttcagctgccttattaggagtgctatgagggtaacacctgttctgcttttcatcttgtatttagttgactgtattatttgatttcggattgaatgaatgtaaatagaaattaaatgcaaatttgaatgaaaataaaaaaa

SEQ ID NO: 453397 - DNA, 1596 bp, Homo sapiens
acgctgaactttaggagccagtctaaggcctaggcgcagacgcactgagcctaagcagccggtgatggcggcagcggctgtggtggctgcggcgggtccgggcccatgaggcgacgaaggaggcgggacggcttttacccagccccggacttccgagacagggaagctgaggacatggcaggagtgtttgacatagacctggaccagccagaggacgcgggctctgaggatgagctggaggaggggggtcagttaaatgaaagcatggaccatgggggagttggaccatatgaacttggcatggaacattgtgagaaatttgaaatctcagaaactagtgtgaacagagggccagaaaaaatcagaccagaatgttttgagctacttcgggtacttggtaaagggggctatggaaaggtttttcaagtacgaaaagtaacaggagcaaatactgggaaaatatttgccatgaaggtgcttaaaaaggcaatgatagtaagaaatgctaaagatacagctcatacaaaagcagaacggaatattctggaggaagtaaagcatcccttcatcgtggatttaatttatgcctttcagactggtggaaaactctacctcatccttgagtatctcagtggaggagaactatttatgcagttagaaagagagggaatatttatggaagacactgcctgcttttacttggcagaaatctccatggctttggggcatttacatcaaaaggggatcatctacagagacctgaagccggagaatatcatgcttaatcaccaaggtcatgtgaaactaacagactttggactatgcaaagaatctattcatgatggaacagtcacacacacattttgtggaacaatagaatacatggcccctgaaatcttgatgagaagtggccacaatcgtgctgtggattggtggagtttgggagcattaatgtatgacatgctgactggagcagtaggtgcacagttaaaagctgcatgtattattggtctgtgctgagtcactatagcaagagacctgtcctgtgctttctgaacatgttaccagtggagttttcaaagcccaaagatttgttattagcagtttaacactaataatgctgtatgattatatgggatcccatactttccgaaacattttcttttaaatgatctatgtcatggcaggcctgtgaaatagatgttgaatagataatgcccttattttataaatggagaaattgaagcataaaatcacatagctcacttatcacacagaaagttaatggtggaaacacaggcttccttccaggacactgctacttcctctgtcctgttgcttaaaaactgcacgtctgccggccacagtggtgcatgcctgtagcctaagctactcaggaggctgaggtgggaggatcatttgagctaaggattattaatagaatctagccttgacaacatagttgagaccctgtctgtaaaacaaaataaaggtctttagcagttagcccatttcacagcatacatttctgatctccatgtataactaatttaggaaatggataatattattcaaaatttgtttcttatatgctaa

SEQ ID NO: 453398 - DNA, 996 bp, Homo sapiens
ttaatagtgcctgcccccactactgcaagggtgactgccacgagggccagcgcttgttcattcatgtggaacctcatctgtacaaatgtaagagctcttagccgtgcagggaatgttctttctcctgagtggtagtgtgcatttctagccagtggagggcctcatgtggtctcatgatatgcctgagacactgaagcgtgtggcacagtggctagcgcaggactctggagtcagatctggacctgaatgcgtcgcctacctgttgctagctgtgacctgacatcttggagcccctctctgatcacctgtggagttctagcacgtccttctgcaggttgtgtgtgtgagagactgagatgatgggtgcgagtgcctggcatgtatacacactcactgtctccttgggctcacagggtcctgatccggttccccatgcagaggaacttggtggtgatccccaagtctgtgacaccagaacgcattgctgagaactttaaggtctttgactttgaactgagcagccaggatatgaccaccttactcagctacaacaggaactggagggtctgtgccttgttgagctgtacctcccacaaggattaccccttccatgaagagttttgaagctgtggttgcctgctcgtccccaagtgacctatacctgtgtttcttgcctcatttttttccttgcaaatgtagtatggcctgtgtcactcagcagtgggacagcaacctgtagagtggccagcgagggcgtgtctagcttgatgttggatctcaagagccctgtcagtagagtagaagtctcttccagtttgctttgcccttctttctaccctgctggggaaagtacaacctgaatacccttttctgaccaaagagaagcaaaatctaccaggtcaaaatagtgccactaacggttgagttttgactgcttggaactggaatcctttcagcaagacttctctttgcctcaaataaaaagtgcttttgtga

SEQ ID NO: 453399 - DNA, 662 bp, Homo sapiens
gcaggctcttcttccagaaactgcgaggatccgagcgcactgtttgtgcaccacaagatggaagagaagaggcgaaaatagtcctgatccggttccccatgcagaggaacttggtggtgatccccaagtctgtgacaccagaacgcattgctgagaactttaaggtctttgactttgaactgagcagccaggatatgaccaccttactcagctacaacaggaactggagggtctgtgccttgttgagctgtacctcccacaaggattaccccttccatgaagagttttgaagctgtggttgcctgctcgtccccaagtgacctatacctgtgtttcttgcctcatttttttccttgcaaatgtagtatggcctgtgtcactcagcagtgggacagcaacctgtagagtggccagcgagggcgtgtctagcttgatgttggatctcaagagccctgtcagtagagtagaagtctcttccagtttgctttgcccttctttctaccctgctggggaaagtacaacctgaatacccttttctgaccaaagagaagcaaaatctaccaggtcaaaatagtgccactaacggttgagttttgactgcttggaactggaatcctttcagcaagacttctctttgcctcaaataaaaagtgcttttgtga

SEQ ID NO: 453400 - DNA, 553 bp, Homo sapiens
tgcacactcagaactagcttgttgcctctgaggttctattttatttcttcagtgagacacatcatttctctgttgggagttgggtatagtcaaaatcacctcttcaaaaagcaactgttttctcctttctcctgacagctgtacctcccacaaggattaccccttccatgaagagttttgaagctgtggttgcctgctcgtccccaagtgacctatacctgtgtttcttgcctcatttttttccttgcaaatgtagtatggcctgtgtcactcagcagtgggacagcaacctgtagagtggccagcgagggcgtgtctagcttgatgttggatctcaagagccctgtcagtagagtagaagtctcttccagtttgctttgcccttctttctaccctgctggggaaagtacaacctgaatacccttttctgaccaaagagaagcaaaatctaccaggtcaaaatagtgccactaacggttgagttttgactgcttggaactggaatcctttcagcaagacttctctttgcctcaaataaaaagtgcttttgtga

SEQ ID NO: 453401 - DNA, 861 bp, Homo sapiens
ccttgctgtgcagactctgcattctgcggggctcacgttctttctcctttcagtcccctccagggcaggtgactgaggccgtgaaggtggccattgacgtcgggtaccgccacatcgactgtgcccatgtgtaccagaatgagaatgaggtgggggtggccattcaggagaagctcagggagcaggtggtgaagcgtgaggagctcttcatcgtcagcaagctgtggtgcacgtaccatgagaagggcctggtgaaaggagcctgccagaagacactcagcgacctgaagctggactacctggacctctaccttattcactggccgactggctttaagcctgggaaggaatttttcccattggatgagtcgggcaatgtggttcccagtgacaccaacattctggacacgtgggcggccatggaagagctggtggatgaagggctggtgaaagctattggcatctccaacttcaaccatctccaggtggagatgatcttaaacaaacctggcttgaagtataagcctgcagttaaccagattgagtgccacccatatctcactcaggagaagttaatccagtactgccagtccaaaggcatcgtggtgaccgcctacagccccctcggctctcctgacaggccctgggccaagcccgaggacccttctctcctggaggatcccaggatcaaggcgatcgcagccaagcacaataaaactacagcccagcaggtacagccacttcaggtgttgctgaccgtccacaactgcctgcattcctgacagtcctgttagccaagaggaggaagtgactgagcctgttacaccctcacaggaagtatggttaggggtcctcaagtac

SEQ ID NO: 453402 - DNA, 411 bp, Homo sapiens
tttttttcaaaagaaaaaaaaatagggttttattaactaccacactgttataatacactttaaacgtacaataaggtagcctttaaatttgagggggtcttaagaataacaaatgaacagaattccaaatttttgaaataggtgaactgctgcagttacaggtatacatttaggaaaactgtatagctcttacaagaccagcaatgtaactttattttgtacatttttgaattgaaaatataaacaataattaaaaaataaaaagaaagacctgaatacccttttctgaccaaagagaagcaaaatctaccaggtcaaaatagtgccactaacggttgagttttgactgcttggaactggaatcctttcagcaagacttctctttgcctcaaataaaaagtgcttttgtga

SEQ ID NO: 453403 - DNA, 1720 bp, Homo sapiens
actggggttggacaacaaaggcattcttctgggctcttaatgaaaccaaaacttatttctagtctatgtatttatgggatgcctgttattttcgctaaagcattcgctttcccaccagatacagcagctgaggaactcctttctgccacgcggggcgcgggcgagcgttgggggcggaaagaatccgctgccactaggaccaggcggaagaagcatccccgccgacccttggggaaggccgccgcggcacccccagcgcaaccaatcagaaggctccttcgcgcagcggcgcgccaaccgcaggcgccctttctgccgacctcacgggctatttaaaggtacgcgccgcggccaaggccgcaccgtactgggcgggggtctggggagcgcagcagccatggcaagccgtctcctgctcaacaacggcgccaagatgcccatcctggggttgggtacctggaagtcccctccagggcaggtgactgaggccgtgaaggtggccattgacgtcgggtaccgccacatcgactgtgcccatgtgtaccagaatgagaatgaggtgggggtggccattcaggagaagctcagggagcaggtggtgaagcgtgaggagctcttcatcgtcagcaagctgtggtgcacgtaccatgagaagggcctggtgaaaggagcctgccagaagacactcagcgacctgaagctggactacctggacctctaccttattcactggccgactggctttaagcctgggaaggaatttttcccattggatgagtcgggcaatgtggttcccagtgacaccaacattctggacacgtgggcggccatggaagagctggtggatgaagggctggtgaaagctattggcatctccaacttcaaccatctccaggtggagatgatcttaaacaaacctggcttgaagtataagcctgcagttaaccagattgagtgccacccatatctcactcaggagaagttaatccagtactgccagtccaaaggcatcgtggtgaccgcctacagccccctcggctctcctgacaggccctgggccaagcccgaggacccttctctcctggaggatcccaggatcaaggcgatcgcagccaagcacaataaaactacagcccaggtcctgatccggttccccatgcagaggaacttggtggtgatccccaagtctgtgacaccagaacgcattgctgagaactttaaggtctttgactttgaactgagcagccaggatatgaccaccttactcagctacaacaggaactggagggtctgtgccttgttgagctgtacctcccacaaggattaccccttccatgaagagttttgaagctgtggttgcctgctcgtccccaagtgacctatacctgtgtttcttgcctcatttttttccttgcaaatgtagtatggcctgtgtcactcagcagtgggacagcaacctgtagagtggccagcgagggcgtgtctagcttgatgttggatctcaagagccctgtcagtagagtagaagtctcttccagtttgctttgcccttctttctaccctgctggggaaagtacaacctgaatacccttttctgaccaaagagaagcaaaatctaccaggtcaaaatagtgccactaacggttgagttttgactgcttggaactggaatcctttcagcaagacttctctttgcctcaaataaaaagtgcttttgtga

SEQ ID NO: 453404 - DNA, 1567 bp, Homo sapiens
aaacatagctttcttcccgtaaaaactatctgaaagtaaagttgtatgtaagctgaaaaaaaaaaaaaaaaaaaaaaaaaaaaaaaaaaaaaaaaaaaaaaaaaaagggtacgcgccgcggccaaggccgcaccgtactgggcgggggtctggggagcgcagcagccatggcaagccgtctcctgctcaacaacggcgccaagatgcccatcctggggttgggtacctggaagtcccctccagggcaggtgactgaggccgtgaaggtggccattgacgtcgggtaccgccacatcgactgtgcccatgtgtaccagaatgagaatgaggtgggggtggccattcaggagaagctcagggagcaggtggtgaagcgtgaggagctcttcatcgtcagcaagctgtggtgcacgtaccatgagaagggcctggtgaaaggagcctgccagaagacactcagcgacctgaagctggactacctggacctctaccttattcactggccgactggctttaagcctgggaaggaatttttcccattggatgagtcgggcaatgtggttcccagtgacaccaacattctggacacgtgggcggccatggaagagctggtggatgaagggctggtgaaagctattggcatctccaacttcaaccatctccaggtggagatgatcttaaacaaacctggcttgaagtataagcctgcagttaaccagattgagtgccacccatatctcactcaggagaagttaatccagtactgccagtccaaaggcatcgtggtgaccgcctacagccccctcggctctcctgacaggccctgggccaagcccgaggacccttctctcctggaggatcccaggatcaaggcgatcgcagccaagcacaataaaactacagcccaggtcctgatccggttccccatgcagaggaacttggtggtgatccccaagtctgtgacaccagaacgcattgctgagaactttaaggtctttgactttgaactgagcagccaggatatgaccaccttactcagctacaacaggaactggagggtctgtgccttgttgagctgtacctcccacaaggattaccccttccatgaagagttttgaagctgtggttgcctgctcgtccccaagtgacctatacctgtgtttcttgcctcatttttttccttgcaaatgtagtatggcctgtgtcactcagcagtgggacagcaacctgtagagtggccagcgagggcgtgtctagcttgatgttggatctcaagagccctgtcagtagagtagaagtctcttccagtttgctttgcccttctttctaccctgctggggaaagtacaacctgaatacccttttctgaccaaagagaagcaaaatctaccaggtcaaaatagtgccactaacggttgagttttgactgcttggaactggaatcctttcagcaagacttctctttgcctcaaataaaaagtgcttttgtgaaaaaaaaaacaaaaacttcctggagaccattgcctgaaggatggccggggatcaatcatgacagctttgcgagcgct

SEQ ID NO: 453405 - DNA, 2004 bp, Homo sapiens
aaacatagctttcttcccgtaaaaactatctgaaagtaaagttgtatgtaagctgaaaaaaaaaaaaaaaaaaaaaaaaaaaaaaaaaaaaaaaaaaaaaaaaaaagggtacgcgccgcggccaaggccgcaccgtactgggcgggggtctggggagcgcagcagccatggcaagccgtctcctgctcaacaacggcgccaagatgcccatcctggggttgggtacctggaagtcccctccagggcaggtgactgaggccgtgaaggtggccattgacgtcgggtaccgccacatcgactgtgcccatgtgtaccagaatgagaatgaggtgggggtggccattcaggagaagctcagggagcaggtggtgaagcgtgaggagctcttcatcgtcagcaagctgtggtgcacgtaccatgagaagggcctggtgaaaggagcctgccagaagacactcagcgacctgaagctggactacctggacctctaccttattcactggccgactggctttaagcctgggaaggaatttttcccattggatgagtcgggcaatgtggttcccagtgacaccaacattctggacacgtgggcggccatggaagagctggtggatgaagggctggtgaaagctattggcatctccaacttcaaccatctccaggtggagatgatcttaaacaaacctggcttgaagtataagcctgcagttaaccagattgagtgccacccatatctcactcaggagaagttaatccagtactgccagtccaaaggcatcgtggtgaccgcctacagccccctcggctctcctgacaggccctgggccaagcccgaggacccttctctcctggaggatcccaggatcaaggcgatcgcagccaagcacaataaaactacagcccaggtcctgatccggttccccatgcagaggaacttggtggtgatccccaagtctgtgacaccagaacgcattgctgagaactttaaggtctttgactttgaactgagcagccaggatatgaccaccttactcagctacaacaggaactggagggtctgtgccttgttgagctgtacctcccacaaggattaccccttccatgaagagttttgaagctgtggttgcctgctcgtccccaagtgacctatacctgtgtttcttgcctcatttttttccttgcaaatgtagtatggcctgtgtcactcagcagtgggacagcaacctgtagagtggccagcgagggcgtgtctagcttgatgttggatctcaagagccctgtcagtagagtagaagtctcttccagtttgctttgcccttctttctaccctgctggggaaagtacaacctgaatacccttttctgaccaaagagaagcaaaatctaccaggtcaaaatagtgccactaacggttgagttttgactgcttggaactggaatcctttcagcaagacttctctttgcctcaaataaaaagtgcttttgtgaaaaaaaaaaaaaaaaaaaaaaaaaaaaaaaaaaaaaaaaaaaaaaaaaaaaaaaaaaacttaaaaaaagccaacagaaccctctaaaaacaaatagaaataaaaacagaaagtccaaaaaggaacagttctttcgaacacaaagaaaaaaccttataaaaaaatttggggccccctcggcccaaggggttttaaaattggcaaagtttttgtatgggggccaaattaggacccatttgggcaattccccctttagggggggggtttaaaaataaagggcgggggttttacaacggggggttggggaaaaaccggggggttccccaatataatgccttggagcaaccccccttttgcagggggggatatggaaaaggggcccccacagtcgttttccaaaatttgccaacctaatggggaagggaattgaaccctattttttggtaaaatcgggggatatttttggaaaacgccttttttaacccaagggccagtggggaaacccttttaaaaaa

SEQ ID NO: 453406 - DNA, 1988 bp, Homo sapiens
aaacatagctttcttcccgtaaaaactatctgaaagtaaagttgtatgtaagctgaaaaaaaaaaaaaaaaaaaaaaaaaaaaaaaaaaaaaaaaaaaaaaaaaaagggtacgcgccgcggccaaggccgcaccgtactgggcgggggtctggggagcgcagcagccatggcaagccgtctcctgctcaacaacggcgccaagatgcccatcctggggttgggtacctggaagtcccctccagggcaggtgactgaggccgtgaaggtggccattgacgtcgggtaccgccacatcgactgtgcccatgtgtaccagaatgagaatgaggtgggggtggccattcaggagaagctcagggagcaggtggtgaagcgtgaggagctcttcatcgtcagcaagctgtggtgcacgtaccatgagaagggcctggtgaaaggagcctgccagaagacactcagcgacctgaagctggactacctggacctctaccttattcactggccgactggctttaagcctgggaaggaatttttcccattggatgagtcgggcaatgtggttcccagtgacaccaacattctggacacgtgggcggccatggaagagctggtggatgaagggctggtgaaagctattggcatctccaacttcaaccatctccaggtggagatgatcttaaacaaacctggcttgaagtataagcctgcagttaaccagattgagtgccacccatatctcactcaggagaagttaatccagtactgccagtccaaaggcatcgtggtgaccgcctacagccccctcggctctcctgacaggccctgggccaagcccgaggacccttctctcctggaggatcccaggatcaaggcgatcgcagccaagcacaataaaactacagcccaggtcctgatccggttccccatgcagaggaacttggtggtgatccccaagtctgtgacaccagaacgcattgctgagaactttaaggtctttgactttgaactgagcagccaggatatgaccaccttactcagctacaacaggaactggagggtctgtgccttgttgagctgtacctcccacaaggattaccccttccatgaagagttttgaagctgtggttgcctgctcgtccccaagtgacctatacctgtgtttcttgcctcatttttttccttgcaaatgtagtatggcctgtgtcactcagcagtgggacagcaacctgtagagtggccagcgagggcgtgtctagcttgatgttggatctcaagagccctgtcagtagagtagaagtctcttccagtttgctttgcccttctttctaccctgctggggaaagtacaacctgaatacccttttctgaccaaagagaagcaaaatctaccaggtcaaaatagtgccactaacggttgagttttgactgcttggaactggaatcctttcagcaagacttctctttgcctcaaataaaaagtgcttttgtgaaaaaaaaaatgaaaaaaccctaaaaatacccaaacttatacaccttaaaaaacaaacccctttcaccagctaacattaataacgaaaaggcccaaaccaaacacccttccaaaatatttttcttcctaaatgcctaaatgaatattttaattttttttttccccccattgccccaataatttttgtttaaagaactttttttttggcggcccggttgaagcgcctttttggcattttccccttaaaggagggggtataaaaagactgggggggggtgttcacagggcgaggagggaaaaccccgggggcgcccatctaaaggctgggagaaaaaccccttttggggaggggggaaataagagagggcgcccccataggctttccaaaatgggggccctaaggggtaatggatataccaggggtttttttgttaaaccccgggaaatttttggaaaccccttttttaacacagggcgcaaaggggagcctttttataaa

SEQ ID NO: 453407 - DNA, 1828 bp, Homo sapiens
aaacatagctttcttcccgtaaaaactatctgaaagtaaagttgtatgtaagctgaaaaaaaaaaaaaaaaaaaaaaaaaaaaaaaaaaaaaaaaaaaaaaaaaaagggtacgcgccgcggccaaggccgcaccgtactgggcgggggtctggggagcgcagcagccatggcaagccgtctcctgctcaacaacggcgccaagatgcccatcctggggttgggtacctggaagtcccctccagggcaggtgactgaggccgtgaaggtggccattgacgtcgggtaccgccacatcgactgtgcccatgtgtaccagaatgagaatgaggtgggggtggccattcaggagaagctcagggagcaggtggtgaagcgtgaggagctcttcatcgtcagcaagctgtggtgcacgtaccatgagaagggcctggtgaaaggagcctgccagaagacactcagcgacctgaagctggactacctggacctctaccttattcactggccgactggctttaagcctgggaaggaatttttcccattggatgagtcgggcaatgtggttcccagtgacaccaacattctggacacgtgggcggccatggaagagctggtggatgaagggctggtgaaagctattggcatctccaacttcaaccatctccaggtggagatgatcttaaacaaacctggcttgaagtataagcctgcagttaaccagattgagtgccacccatatctcactcaggagaagttaatccagtactgccagtccaaaggcatcgtggtgaccgcctacagccccctcggctctcctgacaggccctgggccaagcccgaggacccttctctcctggaggatcccaggatcaaggcgatcgcagccaagcacaataaaactacagcccaggtcctgatccggttccccatgcagaggaacttggtggtgatccccaagtctgtgacaccagaacgcattgctgagaactttaaggtctttgactttgaactgagcagccaggatatgaccaccttactcagctacaacaggaactggagggtctgtgccttgttgagctgtacctcccacaaggattaccccttccatgaagagttttgaagctgtggttgcctgctcgtccccaagtgacctatacctgtgtttcttgcctcatttttttccttgcaaatgtagtatggcctgtgtcactcagcagtgggacagcaacctgtagagtggccagcgagggcgtgtctagcttgatgttggatctcaagagccctgtcagtagagtagaagtctcttccagtttgctttgcccttctttctaccctgctggggaaagtacaacctgaatacccttttctgaccaaagagaagcaaaatctaccaggtcaaaatagtgccactaacggttgagttttgactgcttggaactggaatcctttcagcaagacttctctttgcctcaaataaaaagtgcttttgtgagtgtacaaaacaacaaaaacccacccaacaacacaaaaaaaatttttgggcaggaggaatgtgcccattgaaaaaccctttttcagaaacccattgatgatagtggcgcggcggccccatagtatgttaactgttaaccctttggtccatacggtgtgttaccatgaagaaaaactctgtggccacatgcaatacacgtggtgggagctttcccccccagttaaaaaaacggcccggtgcgacaaccacgacagcgttttctgaaaaaactcccaagagtggactccgagacgagtatacggggacctaaaaccaggacgtgccaagcaacatccact

SEQ ID NO: 453408 - DNA, 1413 bp, Homo sapiens
ctggctaccgcccccggagattacgggaatatcgctacagaaccacagctgtcagacgtatcacacgcagtccgggggagcgcagcagccatggcaagccgtctcctgctcaacaacggcgccaagatgcccatcctggggttgggtacctggaagtcccctccagggcaggtgactgaggccgtgaaggtggccattgacgtcgggtaccgccacatcgactgtgcccatgtgtaccagaatgagaatgaggtgggggtggccattcaggagaagctcagggagcaggtggtgaagcgtgaggagctcttcatcgtcagcaagctgtggtgcacgtaccatgagaagggcctggtgaaaggagcctgccagaagacactcagcgacctgaagctggactacctggacctctaccttattcactggccgactggctttaagcctgggaaggaatttttcccattggatgagtcgggcaatgtggttcccagtgacaccaacattctggacacgtgggcggccatggaagagctggtggatgaagggctggtgaaagctattggcatctccaacttcaaccatctccaggtggagatgatcttaaacaaacctggcttgaagtataagcctgcagttaaccagattgagtgccacccatatctcactcaggagaagttaatccagtactgccagtccaaaggcatcgtggtgaccgcctacagccccctcggctctcctgacaggccctgggccaagcccgaggacccttctctcctggaggatcccaggatcaaggcgatcgcagccaagcacaataaaactacagcccaggtcctgatccggttccccatgcagaggaacttggtggtgatccccaagtctgtgacaccagaacgcattgctgagaactttaaggtctttgactttgaactgagcagccaggatatgaccaccttactcagctacaacaggaactggagggtctgtgccttgttgagctgtacctcccacaaggattaccccttccatgaagagttttgaagctgtggttgcctgctcgtccccaagtgacctatacctgtgtttcttgcctcatttttttccttgcaaatgtagtatggcctgtgtcactcagcagtgggacagcaacctgtagagtggccagcgagggcgtgtctagcttgatgttggatctcaagagccctgtcagtagagtagaagtctcttccagtttgctttgcccttctttctaccctgctggggaaagtacaacctgaatacccttttctgaccaaagagaagcaaaatctaccaggtcaaaatagtgccactaacggttgagttttgactgcttggaactggaatcctttcagcaagacttctctttgcctcaaataaaaagtgcttttgtga

SEQ ID NO: 453409 - DNA, 1694 bp, Homo sapiens
aaacatagctttcttcccgtaaaaactatctgaaagtaaagttgtatgtaagctgaaaaaaaaaaaaaaaaaaaaaaaaaaaaaaaaaaaaaaaaaaaaaaaaaaagggtacgcgccgcggccaaggccgcaccgtactgggcgggggtctggggagcgcagcagccatggcaagccgtctcctgctcaacaacggcgccaagatgcccatcctggggttgggtacctggaagtcccctccagggcaggtgactgaggccgtgaaggtggccattgacgtcgggtaccgccacatcgactgtgcccatgtgtaccagaatgagaatgaggtgggggtggccattcaggagaagctcagggagcaggtggtgaagcgtgaggagctcttcatcgtcagcaagctgtggtgcacgtaccatgagaagggcctggtgaaaggagcctgccagaagacactcagcgacctgaagctggactacctggacctctaccttattcactggccgactggctttaagcctgggaaggaatttttcccattggatgagtcgggcaatgtggttcccagtgacaccaacattctggacacgtgggcggccatggaagagctggtggatgaagggctggtgaaagctattggcatctccaacttcaaccatctccaggtggagatgatcttaaacaaacctggcttgaagtataagcctgcagttaaccagattgagtgccacccatatctcactcaggagaagttaatccagtactgccagtccaaaggcatcgtggtgaccgcctacagccccctcggctctcctgacaggccctgggccaagcccgaggacccttctctcctggaggatcccaggatcaaggcgatcgcagccaagcacaataaaactacagcccaggtcctgatccggttccccatgcagaggaacttggtggtgatccccaagtctgtgacaccagaacgcattgctgagaactttaaggtctttgactttgaactgagcagccaggatatgaccaccttactcagctacaacaggaactggagggtctgtgccttgttgagctgtacctcccacaaggattaccccttccatgaagagttttgaagctgtggttgcctgctcgtccccaagtgatcctcacacctcagcctcccaagcagcctgagagctacgaagtgttgcacagaggcactggcccacgggtagcagtgaggagtgaggcagagcaagagagaaaagcgggaggaccgaaggcgacggcaacaaggaacaagaaagcgagcgcgggggagaagaaagcgagaagccacgaggcggaccaggacgagaggaagagagcgaagagggagggaccagaagcagaaagagcgcgaagagaagccagcaagagagaagagggggcccacaggacacagcggaggcggagaaggagaagagggcaagacaagacgcggaactacaagaagagaagagacaacgacagcaggaagagaaaaaaggaaagcaggccagcggacaaaggcaagcgagagaaaacaggacactgaggagaaagcgaggggaggacacaagaaaaacgaagagcagcgcgaagggaagagacagaggagaagagaaaaagcgaaccagcagccgaggcacagagcacggacgagagaggaagcaggaagacgcagcggg

SEQ ID NO: 453410 - DNA, 1451 bp, Homo sapiens
aaacatagctttcttcccgtaaaaactatctgaaagtaaagttgtatgtaagctgaaaaaaaaaaaaaaaaaaaaaaaaaaaaaaaaaaaaaaaaaaaaaaaaaaagggtacgcgccgcggccaaggccgcaccgtactgggcgggggtctggggagcgcagcagccatggcaagccgtctcctgctcaacaacggcgccaagatgcccatcctggggttgggtacctggaagtcccctccagggcaggtgactgaggccgtgaaggtggccattgacgtcgggtaccgccacatcgactgtgcccatgtgtaccagaatgagaatgaggtgggggtggccattcaggagaagctcagggagcaggtggtgaagcgtgaggagctcttcatcgtcagcaagctgtggtgcacgtaccatgagaagggcctggtgaaaggagcctgccagaagacactcagcgacctgaagctggactacctggacctctaccttattcactggccgactggctttaagcctgggaaggaatttttcccattggatgagtcgggcaatgtggttcccagtgacaccaacattctggacacgtgggcggccatggaagagctggtggatgaagggctggtgaaagctattggcatctccaacttcaaccatctccaggtggagatgatcttaaacaaacctggcttgaagtataagcctgcagttaaccagattgagtgccacccatatctcactcaggagaagttaatccagtactgccagtccaaaggcatcgtggtgaccgcctacagccccctcggctctcctgacaggccctgggccaagcccgaggacccttctctcctggaggatcccaggatcaaggcgatcgcagccaagcacaataaaactacagcccagatccccaagtctgtgacaccagaacgcattgctgagaactttaaggtctttgactttgaactgagcagccaggatatgaccaccttactcagctacaacaggaactggagggtctgtgccttgttgagctgtacctcccacaaggattaccccttccatgaagagttttgaagctgtggttgcctgctcgtccccaagtgacctatacctgtgtttcttgcctcatttttttccttgcaaatgtagtatggcctgtgtcactcagcagtgggacagcaacctgtagagtggccagcgagggcgtgtctagcttgatgttggatctcaagagccctgtcagtagagtagaagtctcttccagtttgctttgcccttctttctaccctgctggggaaagtacaacctgaatacccttttctgaccaaagagaagcaaaatctaccaggtcaaaatagtgccactaacggttgagttttgactgcttggaactggaatcctttcagcaagacttctctttgcctcaaataaaaagtgcttttgtga

SEQ ID NO: 453411 - DNA, 1185 bp, Homo sapiens
caaatgggttttggggagaggagactgctctgtctttccagccaggaagctgccttgtggctggcaatgatgacatgtgccctctcgctggcttagctgtggtgcacgtaccatgagaagggcctggtgaaaggagcctgccagaagacactcagcgacctgaagctggactacctggacctctaccttattcactggccgactggctttaagcctgggaaggaatttttcccattggatgagtcgggcaatgtggttcccagtgacaccaacattctggacacgtgggcggccatggaagagctggtggatgaagggctggtgaaagctattggcatctccaacttcaaccatctccaggtggagatgatcttaaacaaacctggcttgaagtataagcctgcagttaaccagattgagtgccacccatatctcactcaggagaagttaatccagtactgccagtccaaaggcatcgtggtgaccgcctacagccccctcggctctcctgacaggccctgggccaagcccgaggacccttctctcctggaggatcccaggatcaaggcgatcgcagccaagcacaataaaactacagcccaggtcctgatccggttccccatgcagaggaacttggtggtgatccccaagtctgtgacaccagaacgcattgctgagaactttaaggtctttgactttgaactgagcagccaggatatgaccaccttactcagctacaacaggaactggagggtctgtgccttgttgagctgtacctcccacaaggattaccccttccatgaagagttttgaagctgtggttgcctgctcgtccccaagtgacctatacctgtgtttcttgcctcatttttttccttgcaaatgtagtatggcctgtgtcactcagcagtgggacagcaacctgtagagtggccagcgagggcgtgtctagcttgatgttggatctcaagagccctgtcagtagagtagaagtctcttccagtttgctttgcccttctttctaccctgctggggaaagtacaacctgaatacccttttctgaccaaagagaagcaaaatctaccaggtcaaaatagtgccactaacggttgagttttgactgcttggaactggaatcctttcagcaagacttctctttgcctcaaataaaaagtgcttttgtga

SEQ ID NO: 453412 - DNA, 2005 bp, Homo sapiens
aaacatagctttcttcccgtaaaaactatctgaaagtaaagttgtatgtaagctgaaaaaaaaaaaaaaaaaaaaaaaaaaaaaaaaaaaaaaaaaaaaaaaaaaagggtacgcgccgcggccaaggccgcaccgtactgggcgggggtctggggagcgcagcagccatggcaagccgtctcctgctcaacaacggcgccaagatgcccatcctggggttgggtacctggaagtcccctccagggcaggtgactgaggccgtgaaggtggccattgacgtcgggtaccgccacatcgactgtgcccatgtgtaccagaatgagaatgaggtgggggtggccattcaggagaagctcagggagcaggtggtgaagcgtgaggagctcttcatcgtcagcaagctgtggtgcacgtaccatgagaagggcctggtgaaaggagcctgccagaagacactcagcgacctgaagctggactacctggacctctaccttattcactggccgactggctttaagcctgggaaggaatttttcccattggatgagtcgggcaatgtggttcccagtgacaccaacattctggacacgtgggcggccatggaagagctggtggatgaagggctggtgaaagctattggcatctccaacttcaaccatctccaggtggagatgatcttaaacaaacctggcttgaagtataagcctgcagttaaccagattgagtgccacccatatctcactcaggagaagttaatccagtactgccagtccaaaggcatcgtggtgaccgcctacagccccctcggctctcctgacaggccctgggccaagcccgaggacccttctctcctggaggatcccaggatcaaggcgatcgcagccaagcacaataaaactacagcccagcaggtacagccacttcaggtgttgctgaccgtccacaactgtcaggaatgcaggcagtgtggaccgggcagcaacagctgaccgggatcgcgcagagcccgggagccacgaggagcgacagcgaccagtccgaccctgcttaacaccccgtccatcacgcgcaagctactggccaagaggagcgtaacgaaccaaagaataccaccgcacgccggccacacacggcgcacccagcacctacgcaggcgcttctcacgacatcactcactggccaatgcgcgaccgcatacaccacagtacactctaggcgctcgtgacccccccaagcatacaccagccacacgagcgctgcaacccatgacccaaccgaacagggagcacacgaccgccgctaagcattcccatttcccacgtgcctgggcagcgtcaccacgaaaaccaatgaccagcccaccaacagctaaaacgctagcggatcacactcagacaacgctaagtccaccgcggcacaccactgcctacacgtgtcaccaaccccactgcacagctgcagccaccgacggaccgccccatacacctgctaaccgaccaccgaggcaagcgcaaacagcgcggcccccacacacactggccagcggctcgagcacaaagaggaatagacaactgcgcacccagtcaacacgcacacacactggcaacaacgacccgacagagagcgaacaccacgacccgagacctatcgtcctgccgagccccacccaccacaggccagcaccctagcggcaccggacggcagcaccacacgaacacaggcagtaccacccacccgccaccacacaggctcagacccaagcactatggcgacccctcggcccaacacgcatccgcacaccctacacccccggacaccgacacctacacccagaaccggcagagcaccacgcccccggccaaccactgcagctgcccaccgagtagaccactcatagcagccaacagccacctacaccccgcgccacagccatacggagcgacgcgacacagacaacgtcgactcaatcacgccgcccacaacgcacgcacccgacgacaacccg

SEQ ID NO: 453413 - DNA, 1355 bp, Homo sapiens
actggggttggacaacaaaggcattcttctgggctcttaatgaaaccaaaacttatttctagtctatgtatttatgggatgcctgttattttcgctaaagcattcgctttcccaccagatacagcagctgaggaactcctttctgccacgcggggcgcgggcgagcgttgggggcggaaagaatccgctgccactaggaccaggcggaagaagcatccccgccgacccttggggaaggccgccgcggcacccccagcgcaaccaatcagaaggctccttcgcgcagcggcgcgccaaccgcaggcgccctttctgccgacctcacgggctatttaaaggtacgcgccgcggccaaggccgcaccgtactgggcgggggtctggggagcgcagcagccatggcaagccgtctcctgctcaacaacggcgccaagatgcccatcctggggttgggtacctggaagtcccctccagggcaggtgactgaggccgtgaaggtggccattgacgtcgggtaccgccacatcgactgtgcccatgtgtaccagaatgagaatgaggtgggggtggccattcaggagaagctcagggagcaggtggtgaagcgtgaggagctcttcatcgtcagcaagctgtggtgcacgtaccatgagaagggcctggtgaaaggagcctgccagaagacactcagcgacctgaagctggactacctggacctctaccttattcactggccgactggctttaagcctgggaaggaatttttcccattggatgagtcgggcaatgtggttcccagtgacaccaacattctggacacgtgggcggccatggaagagctggtggatgaagggctggtgaaagctattggcatctccaacttcaaccatctccaggtggagatgatcttaaacaaacctggcttgaagtataagcctgcagttaaccagattgagtgccacccatatctcactcaggagaagttaatccagtactgccagtccaaaggcatcgtggtgaccgcctacagccccctcggctctcctgacaggccctgggccaagcccgaggacccttctctcctggaggatcccaggatcaaggcgatcgcagccaagcacaataaaactacagcccagaagagccctgtcagtagagtagaagtctcttccagtttgctttgcccttctttctaccctgctggggaaagtacaacctgaatacccttttctgaccaaagagaagcaaaatctaccaggtcaaaatagtgccactaacggttgagttttgactgcttggaactggaatcctttcagcaagacttctctttgcctcaaataaaaagtgcttttgtga

SEQ ID NO: 453414 - DNA, 1295 bp, Homo sapiens
aaacatagctttcttcccgtaaaaactatctgaaagtaaagttgtatgtaagctgaaaaaaaaaaaaaaaaaaaaaaaaaaaaaaaaaaaaaaaaaaaaaaaaaaagggtacgcgccgcggccaaggccgcaccgtactgggcgggggtctggggagcgcagcagccatggcaagccgtctcctgctcaacaacggcgccaagatgcccatcctggggttgggtacctggaagtcccctccagggcaggtgactgaggccgtgaaggtggccattgacgtcgggtaccgccacatcgactgtgcccatgtgtaccagaatgagaatgaggtgggggtggccattcaggagaagctcagggagcaggtggtgaagcgtgaggagctcttcatcgtcagcaaggccatggaagagctggtggatgaagggctggtgaaagctattggcatctccaacttcaaccatctccaggtggagatgatcttaaacaaacctggcttgaagtataagcctgcagttaaccagattgagtgccacccatatctcactcaggagaagttaatccagtactgccagtccaaaggcatcgtggtgaccgcctacagccccctcggctctcctgacaggccctgggccaagcccgaggacccttctctcctggaggatcccaggatcaaggcgatcgcagccaagcacaataaaactacagcccaggtcctgatccggttccccatgcagaggaacttggtggtgatccccaagtctgtgacaccagaacgcattgctgagaactttaaggtctttgactttgaactgagcagccaggatatgaccaccttactcagctacaacaggaactggagggtctgtgccttgttgagctgtacctcccacaaggattaccccttccatgaagagttttgaagctgtggttgcctgctcgtccccaagtgacctatacctgtgtttcttgcctcatttttttccttgcaaatgtagtatggcctgtgtcactcagcagtgggacagcaacctgtagagtggccagcgagggcgtgtctagcttgatgttggatctcaagagccctgtcagtagagtagaagtctcttccagtttgctttgcccttctttctaccctgctggggaaagtacaacctgaatacccttttctgaccaaagagaagcaaaatctaccaggtcaaaatagtgccactaacggttgagttttgactgcttggaactggaatcctttcagcaagacttctctttgcctcaaataaaaagtgcttttgtga

SEQ ID NO: 453415 - DNA, 1191 bp, Homo sapiens
aaacatagctttcttcccgtaaaaactatctgaaagtaaagttgtatgtaagctgaaaaaaaaaaaaaaaaaaaaaaaaaaaaaaaaaaaaaaaaaaaaaaaaaaagggtacgcgccgcggccaaggccgcaccgtactgggcgggggtctggggagcgcagcagccatggcaagccgtctcctgctcaacaacggcgccaagatgcccatcctggggttgggtacctggaagtcccctccagggcaggtgactgaggccgtgaaggtggccattgacgtcgggtaccgccacatcgactgtgcccatgtgtaccagaatgagaatgaggtgggggtggccattcaggagaagctcagggagcagggtggagatgatcttaaacaaacctggcttgaagtataagcctgcagttaaccagattgagtgccacccatatctcactcaggagaagttaatccagtactgccagtccaaaggcatcgtggtgaccgcctacagccccctcggctctcctgacaggccctgggccaagcccgaggacccttctctcctggaggatcccaggatcaaggcgatcgcagccaagcacaataaaactacagcccaggtcctgatccggttccccatgcagaggaacttggtggtgatccccaagtctgtgacaccagaacgcattgctgagaactttaaggtctttgactttgaactgagcagccaggatatgaccaccttactcagctacaacaggaactggagggtctgtgccttgttgagctgtacctcccacaaggattaccccttccatgaagagttttgaagctgtggttgcctgctcgtccccaagtgacctatacctgtgtttcttgcctcatttttttccttgcaaatgtagtatggcctgtgtcactcagcagtgggacagcaacctgtagagtggccagcgagggcgtgtctagcttgatgttggatctcaagagccctgtcagtagagtagaagtctcttccagtttgctttgcccttctttctaccctgctggggaaagtacaacctgaatacccttttctgaccaaagagaagcaaaatctaccaggtcaaaatagtgccactaacggttgagttttgactgcttggaactggaatcctttcagcaagacttctctttgcctcaaataaaaagtgcttttgtga

SEQ ID NO: 453416 - DNA, 721 bp, Homo sapiens
ccttgtaagaggtctctgtgacctggtcatcctgcctgcctttggaaagttaggatccagtacgcagtggaaatgccctctcctggaggatcccaggatcaaggcgatcgcagccaagcacaataaaactacagcccaggtcctgatccggttccccatgcagaggaacttggtggtgatccccaagtctgtgacaccagaacgcattgctgagaactttaaggtctttgactttgaactgagcagccaggatatgaccaccttactcagctacaacaggaactggagggtctgtgccttgttgagctgtacctcccacaaggattaccccttccatgaagagttttgaagctgtggttgcctgctcgtccccaagtgacctatacctgtgtttcttgcctcatttttttccttgcaaatgtagtatggcctgtgtcactcagcagtgggacagcaacctgtagagtggccagcgagggcgtgtctagcttgatgttggatctcaagagccctgtcagtagagtagaagtctcttccagtttgctttgcccttctttctaccctgctggggaaagtacaacctgaatacccttttctgaccaaagagaagcaaaatctaccaggtcaaaatagtgccactaacggttgagttttgactgcttggaactggaatcctttcagcaagacttctctttgcctcaaataaaaagtgcttttgtga

SEQ ID NO: 453417 - DNA, 1360 bp, Homo sapiens
  misc_feature (1065)..(1065): n is a, c, g, or t
actggggttggacaacaaaggcattcttctgggctcttaatgaaaccaaaacttatttctagtctatgtatttatgggatgcctgttattttcgctaaagcattcgctttcccaccagatacagcagctgaggaactcctttctgccacgcggggcgcgggcgagcgttgggggcggaaagaatccgctgccactaggaccaggcggaagaagcatccccgccgacccttggggaaggccgccgcggcacccccagcgcaaccaatcagaaggctccttcgcgcagcggcgcgccaaccgcaggcgccctttctgccgacctcacgggctatttaaaggtacgcgccgcggccaaggccgcaccgtactgggcgggggtctggggagcgcagcagccatggcaagccgtctcctgctcaacaacggcgccaagatgcccatcctggggttgggtacctggaagtcccctccagggcaggtgactgaggccgtgaaggtggccattgacgtcgggtaccgccacatcgactgtgcccatgtgtaccagaatgagaatgaggtgggggtggccattcaggagaagctcagggagcaggtggtgaagcgtgaggagctcttcatcgtcagcaagctgtggtgcacgtaccatgagaagggcctggtgaaaggagcctgccagaagacactcagcgacctgaagctggactacctggacctctaccttattcactggccgactggctttaagcctgggaaggaatttttcccattggatgagtcgggcaatgtggttcccagtgacaccaacattctggacacgtgggcggccatggaagagctggtggatgaagggctggtgaaagctattggcatctccaacttcaaccatctccaggtggagatgatcttaaacaaacctggcttgaagtataagcctgcagttaaccagattgagtgccacccatatctcactcaggagaagttaatccagtactgccagtccaaaggcatcgtggtgaccgcctacagccccctcggctctcctgacaggccctgggccaagcncgaggaccctttactcgtgggagcgattccgagggatcaaggagacatcgaaggcagaagcacgcagtaagagtaaccgcacgagggttcctgcatcgcggtaccccaatgccacgaggacaacttcgggggaggagcccacaaggttgagacaaccagaacggcattgctcagaaacttaaagggcattagacaatggaactgaagagcacagagtatacgcacattacgtaaggtatatagaggaactggaggggctgggcatagatgaagagtacacgccgcaaggaatacc

SEQ ID NO: 453418 - DNA, 861 bp, Homo sapiens
gcacgctgcgacatctgtcaccccattgatcgccagggttgattcggctgatctggctggctaggcgggtgtccccttcctccctcaccgctccatgtgcgtccctcccgaagctgcgcgctcggtcgaagaggacgaccatccccgatagaggaggaccggtcttcggtcaagggtatacgagtagctgcgctcccctgctagaacctccaaacaagctctcctgacaggccctgggccaagcccgaggacccttctctcctggaggatcccaggatcaaggcgatcgcagccaagcacaataaaactacagcccagatccccaagtctgtgacaccagaacgcattgctgagaactttaaggtctttgactttgaactgagcagccaggatatgaccaccttactcagctacaacaggaactggagggtctgtgccttgttgagctgtacctcccacaaggattaccccttccatgaagagttttgaagctgtggttgcctgctcgtccccaagtgacctatacctgtgtttcttgcctcatttttttccttgcaaatgtagtatggcctgtgtcactcagcagtgggacagcaacctgtagagtggccagcgagggcgtgtctagcttgatgttggatctcaagagccctgtcagtagagtagaagtctcttccagtttgctttgcccttctttctaccctgctggggaaagtacaacctgaatacccttttctgaccaaagagaagcaaaatctaccaggtcaaaatagtgccactaacggttgagttttgactgcttggaactggaatcctttcagcaagacttctctttgcctcaaataaaaagtgcttttgtga

SEQ ID NO: 453419 - DNA, 890 bp, Homo sapiens
  misc_feature (583)..(583): n is a, c, g, or t
  misc_feature (595)..(596): n is a, c, g, or t
  misc_feature (605)..(605): n is a, c, g, or t
  misc_feature (616)..(616): n is a, c, g, or t
  misc_feature (624)..(625): n is a, c, g, or t
  misc_feature (627)..(627): n is a, c, g, or t
  misc_feature (630)..(630): n is a, c, g, or t
tgcacactcagaactagcttgttgcctctgaggttctattttatttcttcagtgagacacatcatttctctgttgggagttgggtatagtcaaaatcacctcttcaaaaagcaactgttttctcctttctcctgacagctgtacctcccacaaggattaccccttccatgaagagttttgaagctgtggttgcctgctcgtccccaagtgacctatacctgtgtttcttgcctcatttttttccttgcaaatgtagtatggcctgtgtcactcagcagtgggacagcaacctgtagagtggccagcgagggcgtgtctagcttgatgttggatctcaagagccctgtcagtagagtagaagtctcttccagtttgctttgcccttctttctaccctgctggggaaagtacaacctgaatacccttttctgaccaaagagaagcaaaatctaccaggtcaaaatagtgccactaacggttgagttttgactgcttggaactggaatcctttcagcaagacttctctttgcctcaaataaaaagtgcttttgtgaaaaaaaaaaaaaaaaaaaaaaaaaaaaatnttggggggggcnntgggcctgngaaaaggtttnaaagaccnntnggntgggggcgcgggggccccatgagggaacagggaacatggggccaaaaggcgggcccacaaggagaaacccggggcacacgaccaaaggcgcgggggttcttccccaaattaaaaaacgcgccggggggaacacgagggggtgtctggacaaatcccaaggggggaggtcacaggaggggacaaacaggggagactcttaacaacagggggccccaaggggagccccgaatacaaaaaataccccggggctcgtggggagc

SEQ ID NO: 453420 - DNA, 1490 bp, Homo sapiens
aaacatagctttcttcccgtaaaaactatctgaaagtaaagttgtatgtaagctgaaaaaaaaaaaaaaaaaaaaaaaaaaaaaaaaaaaaaaaaaaaaaaaaaaagggtacgcgccgcggccaaggccgcaccgtactgggcgggggtctggggagcgcagcagccatggcaagccgtctcctgctcaacaacggcgccaagatgcccatcctggggttgggtacctggaagtcccctccagggcaggtgactgaggccgtgaaggtggccattgacgtcgggtaccgccacatcgactgtgcccatgtgtaccagaatgagaatgaggtgggggtggccattcaggagaagctcagggagcaggtggtgaagcgtgaggagctcttcatcgtcagcaagctgtggtgcacgtaccatgagaagggcctggtgaaaggagcctgccagaagacactcagcgacctgaagctggactacctggacctctaccttattcactggccgactggctttaagcctgggaaggaatttttcccattggatgagtcgggcaatgtggttcccagtgacaccaacattctggacacgtgggcggccatggaagagctggtggatgaagggctggtgaaagctattggcatctccaacttcaaccatctccaggtggagatgatcttaaacaaacctggcttgaagtataagcctgcagttaaccagattgagtgccacccatatctcactcaggagaagttaatccagtactgccagtccaaaggcatcgtggtgaccgcctacagccccctcggctctcctgacaggccctgggccaagcccgaggacccttctctcctggaggatcccaggatcaaggcgatcgcagccaagcacaataaaactacagcccaggtcctgatccggttccccatgcagaggaacttggtggtgatccccaagtctgtgacaccagaacgcattgctgagaactttaaggtctttgactttgaactgagcagccaggatatgaccaccttactcagctacaacaggaactggagggtctgtgccttgttgagctgtacctcccacaaggattaccccttccatgaagagttttgaagctgtggttgcctgctcgtccccaagtgacctatacctgtgtttcttgcctcatttttttccttgcaaatgtagtatggcctgtgtcactcagcagtgggacagcaacctgtagagtggccagcgagggcgtgtctagcttgatgttggatctcaagagccctgtcagtagagtagaagtctcttccagtttgctttgcccttctttctaccctgctggggaaagtacaacctgaatacccttttctgaccaaagagaagcaaaatctaccaggtcaaaatagtgccactaacggttgagttttgactgcttggaactggaatcctttcagcaagacttctctttgcctcaaataaaaagtgcttttgtga

SEQ ID NO: 453421 - DNA, 528 bp, Homo sapiens
catgcctgtagtcccagctactcgggaggtgcttggtcaacaaagcaagacatcatctcttaaaacaaacaaacaaacaaattaccaaggagcctgccagaagacactcagcgacctgaagctggactacctggacctctaccttattcactggccgactggctttaagcctgggaaggaatttttcccattggatgagtcgggcaatgtggttcccagtgacaccaacattctggacacgtgggcgggtaagacagcccctggttggaccttgttttcgtgactggttccctcttcttcttagaagcaatctgcctgccatttctcacattgcattttgttattctgtccctgttgtttgctctctcttttttttttttgagttggggtctccctctgttgcccaggctggagtgcagtggcacaatctcggctcactgcaagctccacctcctgggttcacgccattctcctgcctcagcctcctgagtagctgggactacaggtgcccgccaccacgcccggcta

SEQ ID NO: 453422 - DNA, 1434 bp, Homo sapiens
gataagggaaaaggacagcccctcgaggcgatttaaacatcggcacgagggggtacgcgccgcggccaaggccgcaccgtactgggcgggggtctggggagcgcagcagccatggcaagccgtctcctgctcaacaacggcgccaagatgcccatcctggggttgggtacctggaagtcccctccagggcaggtgactgaggccgtgaaggtggccattgacgtcgggtaccgccacatcgactgtgcccatgtgtaccagaatgagaatgaggtgggggtggccattcaggagaagctcagggagcaggtggtgaagcgtgaggagctcttcatcgtcagcaagctgtggtgcacgtaccatgagaagggcctggtgaaaggagcctgccagaagacactcagcgacctgaagctggactacctggacctctaccttattcactggccgactggctttaagcctgggaaggaatttttcccattggatgagtcgggcaatgtggttcccagtgacaccaacattctggacacgtgggcggccatggaagagctggtggatgaagggctggtgaaagctattggcatctccaacttcaaccatctccaggtggagatgatcttaaacaaacctggcttgaagtataagcctgcagttaaccagattgagtgccacccatatctcactcaggagaagttaatccagtactgccagtccaaaggcatcgtggtgaccgcctacagccccctcggctctcctgacaggccctgggccaagcccgaggacccttctctcctggaggatcccaggatcaaggcgatcgcagccaagcacaataaaactacagcccaggtcctgatccggttccccatgcagaggaacttggtggtgatccccaagtctgtgacaccagaacgcattgctgagaactttaaggtctttgactttgaactgagcagccaggatatgaccaccttactcagctacaacaggaactggagggtctgtgccttgttgagctgtacctcccacaaggattaccccttccatgaagagttttgaagctgtggttgcctgctcgtccccaagtgacctatacctgtgtttcttgcctcatttttttccttgcaaatgtagtatggcctgtgtcactcagcagtgggacagcaacctgtagagtggccagcgagggcgtgtctagcttgatgttggatctcaagagccctgtcagtagagtagaagtctcttccagtttgctttgcccttctttctaccctgctggggaaagtacaacctgaatacccttttctgaccaaagagaagcaaaatctaccaggtcaaaatagtgccactaacggttgagttttgactgcttggaactggaatcctttcagcaagacttctctttgcctcaaataaaaagtgcttttgtga

SEQ ID NO: 453423 - DNA, 1827 bp, Homo sapiens
  misc_feature (1520)..(1520): n is a, c, g, or t
  misc_feature (1532)..(1533): n is a, c, g, or t
  misc_feature (1542)..(1542): n is a, c, g, or t
  misc_feature (1553)..(1553): n is a, c, g, or t
  misc_feature (1561)..(1562): n is a, c, g, or t
  misc_feature (1564)..(1564): n is a, c, g, or t
  misc_feature (1567)..(1567): n is a, c, g, or t
aaacatagctttcttcccgtaaaaactatctgaaagtaaagttgtatgtaagctgaaaaaaaaaaaaaaaaaaaaaaaaaaaaaaaaaaaaaaaaaaaaaaaaaaagggtacgcgccgcggccaaggccgcaccgtactgggcgggggtctggggagcgcagcagccatggcaagccgtctcctgctcaacaacggcgccaagatgcccatcctggggttgggtacctggaagtcccctccagggcaggtgactgaggccgtgaaggtggccattgacgtcgggtaccgccacatcgactgtgcccatgtgtaccagaatgagaatgaggtgggggtggccattcaggagaagctcagggagcaggtggtgaagcgtgaggagctcttcatcgtcagcaagctgtggtgcacgtaccatgagaagggcctggtgaaaggagcctgccagaagacactcagcgacctgaagctggactacctggacctctaccttattcactggccgactggctttaagcctgggaaggaatttttcccattggatgagtcgggcaatgtggttcccagtgacaccaacattctggacacgtgggcggccatggaagagctggtggatgaagggctggtgaaagctattggcatctccaacttcaaccatctccaggtggagatgatcttaaacaaacctggcttgaagtataagcctgcagttaaccagattgagtgccacccatatctcactcaggagaagttaatccagtactgccagtccaaaggcatcgtggtgaccgcctacagccccctcggctctcctgacaggccctgggccaagcccgaggacccttctctcctggaggatcccaggatcaaggcgatcgcagccaagcacaataaaactacagcccaggtcctgatccggttccccatgcagaggaacttggtggtgatccccaagtctgtgacaccagaacgcattgctgagaactttaaggtctttgactttgaactgagcagccaggatatgaccaccttactcagctacaacaggaactggagggtctgtgccttgttgagctgtacctcccacaaggattaccccttccatgaagagttttgaagctgtggttgcctgctcgtccccaagtgacctatacctgtgtttcttgcctcatttttttccttgcaaatgtagtatggcctgtgtcactcagcagtgggacagcaacctgtagagtggccagcgagggcgtgtctagcttgatgttggatctcaagagccctgtcagtagagtagaagtctcttccagtttgctttgcccttctttctaccctgctggggaaagtacaacctgaatacccttttctgaccaaagagaagcaaaatctaccaggtcaaaatagtgccactaacggttgagttttgactgcttggaactggaatcctttcagcaagacttctctttgcctcaaataaaaagtgcttttgtgaaaaaaaaaaaaaaaaaaaaaaaaaaaaatnttggggggggcnntgggcctgngaaaaggtttnaaagaccnntnggntgggggcgcgggggccccatgagggaacagggaacatggggccaaaaggcgggcccacaaggagaaacccggggcacacgaccaaaggcgcgggggttcttccccaaattaaaaaacgcgccggggggaacacgagggggtgtctggacaaatcccaaggggggaggtcacaggaggggacaaacaggggagactcttaacaacagggggccccaaggggagccccgaatacaaaaaataccccggggctcgtggggagc

SEQ ID NO: 453424 - DNA, 1976 bp, Homo sapiens
aaacatagctttcttcccgtaaaaactatctgaaagtaaagttgtatgtaagctgaaaaaaaaaaaaaaaaaaaaaaaaaaaaaaaaaaaaaaaaaaaaaaaaaaagggtacgcgccgcggccaaggccgcaccgtactgggcgggggtctggggagcgcagcagccatggcaagccgtctcctgctcaacaacggcgccaagatgcccatcctggggttgggtacctggaagtcccctccagggcaggtgactgaggccgtgaaggtggccattgacgtcgggtaccgccacatcgactgtgcccatgtgtaccagaatgagaatgaggtgggggtggccattcaggagaagctcagggagcaggtggtgaagcgtgaggagctcttcatcgtcagcaagctgtggtgcacgtaccatgagaagggcctggtgaaaggagcctgccagaagacactcagcgacctgaagctggactacctggacctctaccttattcactggccgactggctttaagcctgggaaggaatttttcccattggatgagtcgggcaatgtggttcccagtgacaccaacattctggacacgtgggcggccatggaagagctggtggatgaagggctggtgaaagctattggcatctccaacttcaaccatctccaggtggagatgatcttaaacaaacctggcttgaagtataagcctgcagttaaccagattgagtgccacccatatctcactcaggagaagttaatccagtactgccagtccaaaggcatcgtggtgaccgcctacagccccctcggctctcctgacaggccctgggccaagcccgaggacccttctctcctggaggatcccaggatcaaggcgatcgcagccaagcacaataaaactacagcccaggtcctgatccggttccccatgcagaggaacttggtggtgatccccaagtctgtgacaccagaacgcattgctgagaactttaaggtctttgactttgaactgagcagccaggatatgaccaccttactcagctacaacaggaactggagggtctgtgccttgttgagctgtacctcccacaaggattaccccttccatgaagagttttgaagctgtggttgcctgctcgtccccaagtgacctatacctgtgtttcttgcctcatttttttccttgcaaatgtagtatggcctgtgtcactcagcagtgggacagcaacctgtagagtggccagcgagggcgtgtctagcttgatgttggatctcaagagccctgtcagtagagtagaagtctcttccagtttgctttgcccttctttctaccctgctggggaaagtacaacctgaatacccttttctgaccaaagagaagcaaaatctaccaggtcaaaatagtgccactaacggttgagttttgactgcttggaactggaatcctttcagcaagacttctctttgcctcaaataaaaagtgcttttgtgaaaaaaaaaaaaaaaaaaaaaaaaaaaaaaacttaaaaaaagccaacagaaccctctaaaaacaaatagaaataaaaacagaaagtccaaaaaggaacagttctttcgaacacaaagaaaaaaccttataaaaaaatttggggccccctcggcccaaggggttttaaaattggcaaagtttttgtatgggggccaaattaggacccatttgggcaattccccctttagggggggggtttaaaaataaagggcgggggttttacaacggggggttggggaaaaaccggggggttccccaatataatgccttggagcaaccccccttttgcagggggggatatggaaaaggggcccccacagtcgttttccaaaatttgccaacctaatggggaagggaattgaaccctattttttggtaaaatcgggggatatttttggaaaacgccttttttaacccaagggccagtggggaaacccttttaaaaaa

SEQ ID NO: 453425 - DNA, 1605 bp, Homo sapiens
aaacatagctttcttcccgtaaaaactatctgaaagtaaagttgtatgtaagctgaaaaaaaaaaaaaaaaaaaaaaaaaaaaaaaaaaaaaaaaaaaaaaaaaaagggtacgcgccgcggccaaggccgcaccgtactgggcgggggtctggggagcgcagcagccatggcaagccgtctcctgctcaacaacggcgccaagatgcccatcctggggttgggtacctggaagtcccctccagggcaggtgactgaggccgtgaaggtggccattgacgtcgggtaccgccacatcgactgtgcccatgtgtaccagaatgagaatgaggtgggggtggccattcaggagaagctcagggagcaggtggtgaagcgtgaggagctcttcatcgtcagcaagctgtggtgcacgtaccatgagaagggcctggtgaaaggagcctgccagaagacactcagcgacctgaagctggactacctggacctctaccttattcactggccgactggctttaagcctgggaaggaatttttcccattggatgagtcgggcaatgtggttcccagtgacaccaacattctggacacgtgggcggccatggaagagctggtggatgaagggctggtgaaagctattggcatctccaacttcaaccatctccaggtggagatgatcttaaacaaacctggcttgaagtataagcctgcagttaaccagattgagtgccacccatatctcactcaggagaagttaatccagtactgccagtccaaaggcatcgtggtgaccgcctacagccccctcggctctcctgacaggccctgggccaagcccgaggacccttctctcctggaggatcccaggatcaaggcgatcgcagccaagcacaataaaactacagcccaggtcctgatccggttccccatgcagaggaacttggtggtgatccccaagtctgtgacaccagaacgcattgctgagaactttaaggtctttgactttgaactgagcagccaggatatgaccaccttactcagctacaacaggaactggagggtctgtgccttgttgagctgtacctcccacaaggattaccccttccatgaagagttttgaagctgtggttgcctgctcgtccccaagtgacctatacctgtgtttcttgcctcatttttttccttgcaaatgtagtatggcctgtgtcactcagcagtgggacagcaacctgtagagtggccagcgagggcgtgtctagcttgatgttggatctcaagagccctgtcagtagagtagaagtctcttccagtttgctttgcccttctttctaccctgctggggaaagtacaacctgaatacccttttctgaccaaagagaagcaaaatctaccaggtcaaaatagtgccactaacggttgagttttgactgcttggaactggaatcctttcagcaagacttctctttgcctcaaataaaaagtgcttttgtgaaaaaaaaaatcttataactgctacatactttactgaatatttgctagaattaaggctacctgccattgtctagtccgatgcaatcagtgtatgacccctggcggatgcccccaca

SEQ ID NO: 453426 - DNA, 1449 bp, Homo sapiens
aaacatagctttcttcccgtaaaaactatctgaaagtaaagttgtatgtaagctgaaaaaaaaaaaaaaaaaaaaaaaaaaaaaaaaaaaaaaaaaaaaaaaaaaagggtacgcgccgcggccaaggccgcaccgtactgggcgggggtctggggagcgcagcagccatggcaagccgtctcctgctcaacaacggcgccaagatgcccatcctggggttgggtacctggaagtcccctccagggcaggtgactgaggccgtgaaggtggccattgacgtcgggtaccgccacatcgactgtgcccatgtgtaccagaatgagaatgaggtgggggtggccattcaggagaagctcagggagcaggtggtgaagcgtgaggagctcttcatcgtcagcaagctgtggtgcacgtaccatgagaagggcctggtgaaaggagcctgccagaagacactcagcgacctgaagctggactacctggacctctaccttattcactggccgactggctttaagcctgggaaggaatttttcccattggatgagtcgggcaatgtggttcccagtgacaccaacattctggacacgtgggcggccatggaagagctggtggatgaagggctggtgaaagctattggcatctccaacttcaaccatctccaggtggagatgatcttaaacaaacctggcttgaagtataagcctgcagttaaccagattgagtgccacccatatctcactcaggagaagttaatccagtactgccagtccaaaggcatcgtggtgaccgcctacagccccctcggctctcctgacaggccctgggccaagcccgaggacccttctctcctggaggatcccaggatcaaggcgatcgcagccaagcacaataaaactacagcccaggtcctgatccggttccccatgcagaggaacttggtggtgatccccaagtctgtgacaccagaacgcattgctgagaactttaaggtctttgactttgaactgagcagccaggatatgaccaccttactcagctacaacaggaactggagggtctgtgccttgttgaggaagctgtggttgcctgctcgtccccaagtgacctatacctgtgtttcttgcctcatttttttccttgcaaatgtagtatggcctgtgtcactcagcagtgggacagcaacctgtagagtggccagcgagggcgtgtctagcttgatgttggatctcaagagccctgtcagtagagtagaagtctcttccagtttgctttgcccttctttctaccctgctggggaaagtacaacctgaatacccttttctgaccaaagagaagcaaaatctaccaggtcaaaatagtgccactaacggttgagttttgactgcttggaactggaatcctttcagcaagacttctctttgcctcaaataaaaagtgcttttgtga

SEQ ID NO: 453427 - DNA, 1594 bp, Homo sapiens
actggggttggacaacaaaggcattcttctgggctcttaatgaaaccaaaacttatttctagtctatgtatttatgggatgcctgttattttcgctaaagcattcgctttcccaccagatacagcagctgaggaactcctttctgccacgcggggcgcgggcgagcgttgggggcggaaagaatccgctgccactaggaccaggcggaagaagcatccccgccgacccttggggaaggccgccgcggcacccccagcgcaaccaatcagaaggctccttcgcgcagcggcgcgccaaccgcaggcgccctttctgccgacctcacgggctatttaaatcccctccagggcaggtgactgaggccgtgaaggtggccattgacgtcgggtaccgccacatcgactgtgcccatgtgtaccagaatgagaatgaggtgggggtggccattcaggagaagctcagggagcaggtggtgaagcgtgaggagctcttcatcgtcagcaagctgtggtgcacgtaccatgagaagggcctggtgaaaggagcctgccagaagacactcagcgacctgaagctggactacctggacctctaccttattcactggccgactggctttaagcctgggaaggaatttttcccattggatgagtcgggcaatgtggttcccagtgacaccaacattctggacacgtgggcggccatggaagagctggtggatgaagggctggtgaaagctattggcatctccaacttcaaccatctccaggtggagatgatcttaaacaaacctggcttgaagtataagcctgcagttaaccagattgagtgccacccatatctcactcaggagaagttaatccagtactgccagtccaaaggcatcgtggtgaccgcctacagccccctcggctctcctgacaggccctgggccaagcccgaggacccttctctcctggaggatcccaggatcaaggcgatcgcagccaagcacaataaaactacagcccaggtcctgatccggttccccatgcagaggaacttggtggtgatccccaagtctgtgacaccagaacgcattgctgagaactttaaggtctttgactttgaactgagcagccaggatatgaccaccttactcagctacaacaggaactggagggtctgtgccttgttgagctgtacctcccacaaggattaccccttccatgaagagttttgaagctgtggttgcctgctcgtccccaagtgacctatacctgtgtttcttgcctcatttttttccttgcaaatgtagtatggcctgtgtcactcagcagtgggacagcaacctgtagagtggccagcgagggcgtgtctagcttgatgttggatctcaagagccctgtcagtagagtagaagtctcttccagtttgctttgcccttctttctaccctgctggggaaagtacaacctgaatacccttttctgaccaaagagaagcaaaatctaccaggtcaaaatagtgccactaacggttgagttttgactgcttggaactggaatcctttcagcaagacttctctttgcctcaaataaaaagtgcttttgtga

SEQ ID NO: 453428 - DNA, 1125 bp, Homo sapiens
aaacatagctttcttcccgtaaaaactatctgaaagtaaagttgtatgtaagctgaaaaaaaaaaaaaaaaaaaaaaaaaaaaaaaaaaaaaaaaaaaaaaaaaaagggtacgcgccgcggccaaggccgcaccgtactgggcgggggtctggggagcgcagcagccatggcaagccgtctcctgctcaacaacggcgccaagatgcccatcctggggttgggtacctggaagtcccctccagggcaggtgactgaggccgtgaaggtggccattgacgtcgggtaccgccacatcgactgtgcccatgtgtaccagaatgagaatgaggtgggggtggccattcaggagaagctcagggagcaggtggtgaagcgtgaggagctcttcatcgtcagcaagctgtggtgcacgtaccatgagaagggcctggtgaaaggagcctgccagaagacactcagcgacctgaagctggactacctggacctctaccttattcactggccgactggctttaagcctgggaaggaatttttcccattggatgagtcgggcaatgtggttcccagtgacaccaacattctggacacgtgggcggccatggaagagctggtggatgaagggctggtgaaagctattggcatctccaacttcaaccatctccaggtggagatgatcttaaacaaacctggcttgaagtataagcctgcagttaaccagattgagtgccacccatatctcactcaggagaagttaatccagtactgccagtccaaaggcatcgtggtgaccgcctacagccccctcggctctcctgacaggccctgggccaagcccgaggacccttctctcctggaggatcccaggatcaaggcgatcgcagccaagcacaataaaactacagcccagaagagccctgtcagtagagtagaagtctcttccagtttgctttgcccttctttctaccctgctggggaaagtacaacctgaatacccttttctgaccaaagagaagcaaaatctaccaggtcaaaatagtgccactaacggttgagttttgactgcttggaactggaatcctttcagcaagacttctctttgcctcaaataaaaagtgcttttgtga

SEQ ID NO: 453429 - DNA, 1465 bp, Homo sapiens
aaacatagctttcttcccgtaaaaactatctgaaagtaaagttgtatgtaagctgaaaaaaaaaaaaaaaaaaaaaaaaaaaaaaaaaaaaaaaaaaaaaaaaaaagggtacgcgccgcggccaaggccgcaccgtactgggcgggggtctggggagcgcagcagccatggcaagccgtctcctgctcaacaacggcgccaagatgcccatcctggggttgggtacctggaagtcccctccagggcaggtgactgaggccgtgaaggtggccattgacgtcgggtaccgccacatcgactgtgcccatgtgtaccagaatgagaatgaggtgggggtggccattcaggagaagctcagggagcaggtggtgaagcgtgaggagctcttcatcgtcagcaagctgtggtgcacgtaccatgagaagggcctggtgaaaggagcctgccagaagacactcagcgacctgaagctggactacctggacctctaccttattcactggccgactggctttaagcctgggaaggaatttttcccattggatgagtcgggcaatgtggttcccagtgacaccaacattctggacacgtgggcggccatggaagagctggtggatgaagggctggtgaaagctattggcatctccaacttcaaccatctccaggtggagatgatcttaaacaaacctggcttgaagtataagcctgcagttaaccagaggagaagttaatccagtactgccagtccaaaggcatcgtggtgaccgcctacagccccctcggctctcctgacaggccctgggccaagcccgaggacccttctctcctggaggatcccaggatcaaggcgatcgcagccaagcacaataaaactacagcccaggtcctgatccggttccccatgcagaggaacttggtggtgatccccaagtctgtgacaccagaacgcattgctgagaactttaaggtctttgactttgaactgagcagccaggatatgaccaccttactcagctacaacaggaactggagggtctgtgccttgttgagctgtacctcccacaaggattaccccttccatgaagagttttgaagctgtggttgcctgctcgtccccaagtgacctatacctgtgtttcttgcctcatttttttccttgcaaatgtagtatggcctgtgtcactcagcagtgggacagcaacctgtagagtggccagcgagggcgtgtctagcttgatgttggatctcaagagccctgtcagtagagtagaagtctcttccagtttgctttgcccttctttctaccctgctggggaaagtacaacctgaatacccttttctgaccaaagagaagcaaaatctaccaggtcaaaatagtgccactaacggttgagttttgactgcttggaactggaatcctttcagcaagacttctctttgcctcaaataaaaagtgcttttgtga

SEQ ID NO: 453430 - DNA, 1367 bp, Homo sapiens
aaacatagctttcttcccgtaaaaactatctgaaagtaaagttgtatgtaagctgaaaaaaaaaaaaaaaaaaaaaaaaaaaaaaaaaaaaaaaaaaaaaaaaaaagggtacgcgccgcggccaaggccgcaccgtactgggcgggggtctggggagcgcagcagccatggcaagccgtctcctgctcaacaacggcgccaagatgcccatcctggggttgggtacctggaagtcccctccagggcaggtgactgaggccgtgaaggtggccattgacgtcgggtaccgccacatcgactgtgcccatgtgtaccagaatgagaatgaggtgggggtggccattcaggagaagctcagggagcaggtggtgaagcgtgaggagctcttcatcgtcagcaagctgtggtgcacgtaccatgagaagggcctggtgaaaggagcctgccagaagacactcagcgacctgaagctggactacctggacctctaccttattcactggccgactggctttaagcctgggaaggaatttttcccattggatgagtcgggcaatgtggttcccagtgacaccaacattctggacacgtgggcgattgagtgccacccatatctcactcaggagaagttaatccagtactgccagtccaaaggcatcgtggtgaccgcctacagccccctcggctctcctgacaggccctgggccaagcccgaggacccttctctcctggaggatcccaggatcaaggcgatcgcagccaagcacaataaaactacagcccaggtcctgatccggttccccatgcagaggaacttggtggtgatccccaagtctgtgacaccagaacgcattgctgagaactttaaggtctttgactttgaactgagcagccaggatatgaccaccttactcagctacaacaggaactggagggtctgtgccttgttgagctgtacctcccacaaggattaccccttccatgaagagttttgaagctgtggttgcctgctcgtccccaagtgacctatacctgtgtttcttgcctcatttttttccttgcaaatgtagtatggcctgtgtcactcagcagtgggacagcaacctgtagagtggccagcgagggcgtgtctagcttgatgttggatctcaagagccctgtcagtagagtagaagtctcttccagtttgctttgcccttctttctaccctgctggggaaagtacaacctgaatacccttttctgaccaaagagaagcaaaatctaccaggtcaaaatagtgccactaacggttgagttttgactgcttggaactggaatcctttcagcaagacttctctttgcctcaaataaaaagtgcttttgtga

SEQ ID NO: 453431 - DNA, 1194 bp, Homo sapiens
aaacatagctttcttcccgtaaaaactatctgaaagtaaagttgtatgtaagctgaaaaaaaaaaaaaaaaaaaaaaaaaaaaaaaaaaaaaaaaaaaaaaaaaaagggtacgcgccgcggccaaggccgcaccgtactgggcgggggtctggggagcgcagcagccatggcaagccgtctcctgctcaacaacggcgccaagatgcccatcctggggttgggtacctggaagtcccctccagggcaggtgactgaggccgtgaaggtggccattgacgtcgggtaccgccacatcgactgtgcccatgtgtaccagaatgagaatgaggtgggggtggccattcaggagaagctcagggagcaggctggtgaaagctattggcatctccaacttcaaccatctccaggtggagatgatcttaaacaaacctggcttgaagtataagcctgcagttaaccagattgagtgccacccatatctcactcaggagaagttaatccagtactgccagtccaaaggcatcgtggtgaccgcctacagccccctcggctctcctgacaggccctgggccaagcccgaggacccttctctcctggaggatcccaggatcaaggcgatcgcagccaagcacaataaaactacagcccagatccccaagtctgtgacaccagaacgcattgctgagaactttaaggtctttgactttgaactgagcagccaggatatgaccaccttactcagctacaacaggaactggagggtctgtgccttgttgagctgtacctcccacaaggattaccccttccatgaagagttttgaagctgtggttgcctgctcgtccccaagtgacctatacctgtgtttcttgcctcatttttttccttgcaaatgtagtatggcctgtgtcactcagcagtgggacagcaacctgtagagtggccagcgagggcgtgtctagcttgatgttggatctcaagagccctgtcagtagagtagaagtctcttccagtttgctttgcccttctttctaccctgctggggaaagtacaacctgaatacccttttctgaccaaagagaagcaaaatctaccaggtcaaaatagtgccactaacggttgagttttgactgcttggaactggaatcctttcagcaagacttctctttgcctcaaataaaaagtgcttttgtga

SEQ ID NO: 453432 - DNA, 877 bp, Homo sapiens
aaacatagctttcttcccgtaaaaactatctgaaagtaaagttgtatgtaagctgaaaaaaaaaaaaaaaaaaaaaaaaaaaaaaaaaaaaaaaaaaaaaaaaaaagggtacgcgccgcggccaaggccgcaccgtactgggcgggggtctggggagcgcagcagccatggcaagccgtctcctgctcaacaacggcgccaagatgcccatcctggggttgggtacctggaagtcccctccagggcaggtgactgaggccgtgaaggtggccattgacgtcgggtaccgccacatcgactgtgcccatgtgtaccagaatgagaatgaggtgggggtggccattcaggagaagctcagggagcaggtggtgaagcgtgaggagctcttcatcgtcagcaagctgtggtgcacgtaccatgagaagggcctggtgaaaggagcctgccagaagacactcagcgacctgaagctggactacctggacctctaccttattcactggccgactggctttaagcctgggaaggaatttttcccattggatgagtcgggcaatgtggttcccagtgacaccaacattctggacacgtgggcgggtaagacagcccctggttggaccttgttttcgtgactggttccctcttcttcttagaagcaatctgcctgccatttctcacattgcattttgttattctgtccctgttgtttgctctctcttttttttttttgagttggggtctccctctgttgcccaggctggagtgcagtggcacaatctcggctcactgcaagctccacctcctgggttcacgccattctcctgcctcagcctcctgagtagctgggactacaggtgcccgccaccacgcccggcta

SEQ ID NO: 453433 - DNA, 4816 bp, Homo sapiens
gcctggaggaggcagaggccaggagggagaggtcccaagagcctgtgaaatgggtctggcctggctcccagctgggcaggaacacaggacttcaggacactaaggaccctgtcatgcccatggccagcacccaccagtgctggtgcctgcctgtccagagctgaccagggagatggtgctggcccaggggctgctctccatggccctgctggccctgtgctgggagcgcagcctggcaggggcagaagaaaccatcccgctgcagaccctgcgctgctacaacgactacaccagccacatcacctgcaggtgggcagacacccaggatgcccagcggctcgtcaacgtgaccctcattcgccgggtgaatgaggacctcctggagccagtgtcctgtgacctcagtgatgacatgccctggtcagcctgcccccatccccgctgcgtgcccaggagatgtgtcattccctgccagagttttgtcgtcactgacgttgactacttctcattccaaccagacaggcctctgggcacccggctcaccgtcactctgacccagcatgtccagcctcctgagcccagggacctgcagatcagcaccgaccaggaccacttcctgctgacctggagtgtggcccttgggagtccccagagccactggttgtccccaggggatctggagtttgaggtggtctacaagcggcttcaggactcttgggaggacgcagccatcctcctctccaacacctcccaggccaccctggggccagagcacctcatgcccagcagcacctacgtggcccgagtacggacccgcctggccccaggttctcggctctcaggacgtcccagcaagtggagcccagaggtttgctgggactcccagccaggggatgaggcccagccccagaacctggagtgcttctttgacggggccgccgtgctcagctgctcctgggaggtgaggaaggaggtggccagctcggtctcctttggcctattctacaagcccagcccagatgcaggggaggaagagtgctccccagtgctgagggaggggctcggcagcctccacaccaggcaccactgccagattcccgtgcccgaccccgcgacccacggccaatacatcgtctctgttcagccaaggagggcagagaaacacataaagagctcagtgaacatccagatggcccctccatccctcaacgtgaccaaggatggagacagctacagcctgcgctgggaaacaatgaaaatgcgatacgaacacatagaccacacatttgagatccagtacaggaaagacacggccacgtggaaggacagcaagaccgagaccctccagaacgcccacagcatggccctgccagccctggagccctccaccaggtactgggccagggtgagggtcaggacctcccgcaccggctacaacgggatctggagcgagtggagtgaggcgcgctcctgggacaccgagtcggtgctgcctatgtgggtgctggccctcatcgtgatcttcctcaccatcgctgtgctcctggccctccgcttctgtggcatctacgggtacaggctgcgcagaaagtgggaggagaagatccccaaccccagcaagagccacctgttccagaacgggagcgcagagctttggcccccaggcagcatgtcggccttcactagcgggagtcccccacaccaggggccgtggggcagccgcttccctgagctggagggggtgttccctgtaggattcggggacagcgaggtgtcacctctcaccatagaggaccccaagcatgtctgtgatccaccatctgggcctgacacgactccagctgcctcagatctacccacagagcagccccccagcccccagccaggcccgcctgccgcctcccacacacctgagaaacaggcttccagctttgacttcaatgggccctacctggggccgccccacagccgctccctacctgacatcctgggccagccggagcccccacaggagggtgggagccagaagtccccacctccagggtccctggagtacctgtgtctgcctgctggggggcaggtgcaactggtccctctggcccaggcgatgggaccgggacaggccgtggaagtggagagaaggccgagccagggggctgcagggagtccctccctggagtccgggggaggccctgcccctcctgctcttgggccaagggtgggaggacaggaccaaaaggacagccctgtggctatacccatgagctctggggacactgaggaccctggagtggcctctggttatgtctcctctgcagacctggtattcaccccaaactcaggggcctcgtctgtctccctagttccctctctgggcctcccctcagaccagacccccagcttatgtcctgggctggccagtggaccccctggagccccaggccctgtgaagtcagggtttgagggctatgtggagctccctccaattgagggccggtcccccaggtcaccaaggaacaatcctgtcccccctgaggccaaaagccctgtcctgaacccaggggaacgcccggcagatgtgtccccaacatccccacagcccgagggcctccttgtcctgcagcaagtgggcgactattgcttcctccccggcctggggcccggccctctctcgctccggagtaaaccttcttccccgggacccggtcctgagatcaagaacctagaccaggcttttcaagtcaagaagcccccaggccaggctgtgccccaggtgcccgtcattcagctcttcaaagccctgaagcagcaggactacctgtctctgcccccttgggaggtcaacaagcctggggaggtgtgttgagacccccaggcctagacaggcaaggggatggagagggcttgccttccctcccgcctgaccttcctcagtcatttctgcaaagccaaggggcagcctcctgtcaaggtagctagaggcctgggaaaggagatagccttgctccggcccccttgaccttcagcaaatcacttctctccctgcgctcacacagacacacacacacacacgtacatgcacacatttttcctgtcaggttaacttatttgtaggttctgcattattagaactttctagatatactcattccatctccccctcatttttttaatcaggtttccttgcttttgccatttttcttccttcttttttcactgatttattatgagagtggggctgaggtctgagctgagccttatcagactgagatgcggctggttgtgttgaggacttgtgtgggctgcctgtccccggcagtcgctgatgcacatgacatgattctcatctgggtgcagaggtgggaggcaccaggtgggcacccgtgggggttagggcttggaagagtggcacaggactgggcacgctcagtgaggctcagggaattcagactagcctcgattgtcactccgagaaatgggcatggtattgggggtcgggggggcggtgcaagggacgcacatgagagactgtttgggagcttctggggagccctgctagttgtctcagtgatgtctgtgggacctccagtcccttgagaccccacgtcatgtagagaagttaacggcccaagtggtgggcaggctggcgggacctggggaacatcaggagaggagtccagagcccacgtctactgcggaaaagtcaggggaaactgccaaacaaaggaaaatgccccaaaggcatatatgctttagggcctttggtccaaatggcccgggtggccactcttccagatagaccaggcaactctccctcccaccggccacagatgaggggctgctgatctatgcctgggcctgcaccagggattatggttcttttaaatctttgcctttcagatacaggaaaaataatggcattaaattgctttaatttgcattattttagttatccagtttgcacatatttttataggtatcttaggcatcgattggtattttttaactgggccaagcccattaaggtctttcttctgttgggtgctatcattttctgattaagtctttttgactattgacatacagtctttcacagatggtggagtgtttttcccccaaatctgttgtttgtcttataatgttgtatatgaggttttatggtgtatgaatatgaatgcttctgtaatgtcaaacagatccctagtaaactccttcttcacttttactgtcagatttacaaaggtcctcccattgcaaagcagtgtttgtcctaatttatatattgtttttctagttcattttgtgtttccaacttttcatgtaaaattttaattatttttgaatgtgtggatgtgagactgaggtgccttttggtactgaaattctttttccatgtacctgaagtgttacttttgtgatataggaaatccttgtatatatactttattggtccctaggcttcctattttgttaccttgctttctctatggcatccaccattttgattgttctacttttatgatatgttttcataagtggttaagcaagtattctcgttacttttgctcttaaatccctattcattacagcaatgttggtggtcaaagaaaatgataaacaacttgaatgttcaatggtcctgaaatacataacaacattttagtacattgtaaagtagaatcctctgttcataatgaacaagatgaaccaatgtggattagaaagaagtccgagatattaattccaaaatatccagacattgttaaagggaaaaaattgcaataaaatatttgtaacataaaacaaagtgaaaccc

SEQ ID NO: 453434 - DNA, 3612 bp, Homo sapiens
gcctggaggaggcagaggccaggagggagaggtcccaagagcctgtgaaatgggtctggcctggctcccagctgggcaggaacacaggacttcaggacactaaggaccctgtcatgcccatggccagcacccaccagtgctggtgcctgcctgtccagagctgaccagggagatggtgctggcccaggggctgctctccatggccctgctggccctgtgctgggagcgcagcctggcaggggcagaagaaaccatcccgctgcagaccctgcgctgctacaacgactacaccagccacatcacctgcaggtgggcagacacccaggatgcccagcggctcgtcaacgtgaccctcattcgccgggtgaatgaggacctcctggagccagtgtcctgtgacctcagtgatgacatgccctggtcagcctgcccccatccccgctgcgtgcccaggagatgtgtcattccctgccagagttttgtcgtcactgacgttgactacttctcattccaaccagacaggcctctgggcacccggctcaccgtcactctgacccagcatgtccagcctcctgagcccagggacctgcagatcagcaccgaccaggaccacttcctgctgacctggagtgtggcccttgggagtccccagagccactggttgtccccaggggatctggagtttgaggtggtctacaagcggcttcaggactcttgggaggacgcagccatcctcctctccaacacctcccaggccaccctggggccagagcacctcatgcccagcagcacctacgtggcccgagtacggacccgcctggccccaggttctcggctctcaggacgtcccagcaagtggagcccagaggtttgctgggactcccagccaggggatgaggcccagccccagaacctggagtgcttctttgacggggccgccgtgctcagctgctcctgggaggtgaggaaggaggtggccagctcggtctcctttggcctattctacaagcccagcccagatgcaggggaggaagagtgctccccagtgctgagggaggggctcggcagcctccacaccaggcaccactgccagattcccgtgcccgaccccgcgacccacggccaatacatcgtctctgttcagccaaggagggcagagaaacacataaagagctcagtgaacatccagatggcccctccatccctcaacgtgaccaaggatggagacagctacagcctgcgctgggaaacaatgaaaatgcgatacgaacacatagaccacacatttgagatccagtacaggaaagacacggccacgtggaaggacagcaagaccgagaccctccagaacgcccacagcatggccctgccagccctggagccctccaccaggtactgggccagggtgagggtcaggacctcccgcaccggctacaacgggatctggagcgagtggagtgaggcgcgctcctgggacaccgagtcggtgctgcctatgtgggtgctggccctcatcgtgatcttcctcaccatcgctgtgctcctggccctccgcttctgtggcatctacgggtacaggctgcgcagaaagtgggaggagaagatccccaaccccagcaagagccacctgttccagaacgggagcgcagagctttggcccccaggcagcatgtcggccttcactagcgggagtcccccacaccaggggccgtggggcagccgcttccctgagctggagggggtgttccctgtaggattcggggacagcgaggtgtcacctctcaccatagaggaccccaagcatgtctgtgatccaccatctgggcctgacacgactccagctgcctcagatctacccacagagcagccccccagcccccagccaggcccgcctgccgcctcccacacacctgagaaacaggcttccagctttgacttcaatgggccctacctggggccgccccacagccgctccctacctgacatcctgggccagccggagcccccacaggagggtgggagccagaagtccccacctccagggtccctggagtacctgtgtctgcctgctggggggcaggtgcaactggtccctctggcccaggcgatgggaccgggacaggccgtggaagtggagagaaggccgagccagggggctgcagggagtccctccctggagtccgggggaggccctgcccctcctgctcttgggccaagggtgggaggacaggaccaaaaggacagccctgtggctatacccatgagctctggggacactgaggaccctggagtggcctctggttatgtctcctctgcagacctggtattcaccccaaactcaggggcctcgtctgtctccctagttccctctctgggcctcccctcagaccagacccccagcttatgtcctgggctggccagtggaccccctggagccccaggccctgtgaagtcagggtttgagggctatgtggagctccctccaattgagggccggtcccccaggtcaccaaggaacaatcctgtcccccctgaggccaaaagccctgtcctgaacccaggggaacgcccggcagatgtgtccccaacatccccacagcccgagggcctccttgtcctgcagcaagtgggcgactattgcttcctccccggcctggggcccggccctctctcgctccggagtaaaccttcttccccgggacccggtcctgagatcaagaacctagaccaggcttttcaagtcaagaagcccccaggccaggctgtgccccaggtgcccgtcattcagctcttcaaagccctgaagcagcaggactacctgtctctgcccccttgggaggtcaacaagcctggggaggtgtgttgagacccccaggcctagacaggcaaggggatggagagggcttgccttccctcccgcctgaccttcctcagtcatttctgcaaagccaaggggcagcctcctgtcaaggtagctagaggcctgggaaaggagatagccttgctccggcccccttgaccttcagcaaatcacttctctccctgcgctcacacagacacacacacacacacgtacatgcacacatttttcctgtcaggttaacttatttgtaggttctgcattattagaactttctagatatactcattccatctccccctcatttttttaatcaggtttccttgcttttgccatttttcttccttcttttttcactgatttattatgagagtggggctgaggtctgagctgagccttatcagactgagatgcggctggttgtgttgaggacttgtgtgggctgcctgtccccggcagtcgctgatgcacatgacatgattctcatctgggtgcagaggtgggaggcaccaggtgggcacccgtgggggttagggcttggaagagtggcacaggactgggcacgctcagtgaggctcagggaattcagactagcctcgattgtcactccgagaaatgggcatggtattgggggtcgggggggcggtgcaagggacgcacatgagagactgtttgggagcttctggggagccctatctgtgtttaagatattattggggggtttcttctatcttttaactctcttatctatt

SEQ ID NO: 453435 - DNA, 4171 bp, Homo sapiens
ggttctggaagttggcttccatctcagagaagacgcccagctttccccgttgaccgtggcttcaggactcttgggagacgcagccatcctcctctccaacacctcccaggccaccctggggccagagcacctcatgcccagcagcacctacgtggcccgagtacggacccgcctggccccaggttctcggctctcaggacgtcccagcaagtggagcccagaggtttgctgggactcccagccaggggatgaggcccagccccagaacctggagtgcttctttgacggggccgccgtgctcagctgctcctgggaggtgaggaaggaggtggccagctcggtctcctttggcctattctacaagcccagcccagatgcaggggaggaagagtgctccccagtgctgagggaggggctcggcagcctccacaccaggcaccactgccagattcccgtgcccgaccccgcgacccacggccaatacatcgtctctgttcagccaaggagggcagagaaacacataaagagctcagtgaacatccagatggcccctccatccctcaacgtgaccaaggatggagacagctacagcctgcgctgggaaacaatgaaaatgcgatacgaacacatagaccacacatttgagatccagtacaggaaagacacggccacgtggaaggacagcaagaccgagaccctccagaacgcccacagcatggccctgccagccctggagccctccaccaggtactgggccagggtgagggtcaggacctcccgcaccggctacaacgggatctggagcgagtggagtgaggcgcgctcctgggacaccgagtcggtgctgcctatgtgggtgctggccctcatcgtgatcttcctcaccatcgctgtgctcctggccctccgcttctgtggcatctacgggtacaggctgcgcagaaagtgggaggagaagatccccaaccccagcaagagccacctgttccagaacgggagcgcagagctttggcccccaggcagcatgtcggccttcactagcgggagtcccccacaccaggggccgtggggcagccgcttccctgagctggagggggtgttccctgtaggattcggggacagcgaggtgtcacctctcaccatagaggaccccaagcatgtctgtgatccaccatctgggcctgacacgactccagctgcctcagatctacccacagagcagccccccagcccccagccaggcccgcctgccgcctcccacacacctgagaaacaggcttccagctttgacttcaatgggccctacctggggccgccccacagccgctccctacctgacatcctgggccagccggagcccccacaggagggtgggagccagaagtccccacctccagggtccctggagtacctgtgtctgcctgctggggggcaggtgcaactggtccctctggcccaggcgatgggaccgggacaggccgtggaagtggagagaaggccgagccagggggctgcagggagtccctccctggagtccgggggaggccctgcccctcctgctcttgggccaagggtgggaggacaggaccaaaaggacagccctgtggctatacccatgagctctggggacactgaggaccctggagtggcctctggttatgtctcctctgcagacctggtattcaccccaaactcaggggcctcgtctgtctccctagttccctctctgggcctcccctcagaccagacccccagcttatgtcctgggctggccagtggaccccctggagccccaggccctgtgaagtcagggtttgagggctatgtggagctccctccaattgagggccggtcccccaggtcaccaaggaacaatcctgtcccccctgaggccaaaagccctgtcctgaacccaggggaacgcccggcagatgtgtccccaacatccccacagcccgagggcctccttgtcctgcagcaagtgggcgactattgcttcctccccggcctggggcccggccctctctcgctccggagtaaaccttcttccccgggacccggtcctgagatcaagaacctagaccaggcttttcaagtcaagaagcccccaggccaggctgtgccccaggtgcccgtcattcagctcttcaaagccctgaagcagcaggactacctgtctctgcccccttgggaggtcaacaagcctggggaggtgtgttgagacccccaggcctagacaggcaaggggatggagagggcttgccttccctcccgcctgaccttcctcagtcatttctgcaaagccaaggggcagcctcctgtcaaggtagctagaggcctgggaaaggagatagccttgctccggcccccttgaccttcagcaaatcacttctctccctgcgctcacacagacacacacacacacacgtacatgcacacatttttcctgtcaggttaacttatttgtaggttctgcattattagaactttctagatatactcattccatctccccctcatttttttaatcaggtttccttgcttttgccatttttcttccttcttttttcactgatttattatgagagtggggctgaggtctgagctgagccttatcagactgagatgcggctggttgtgttgaggacttgtgtgggctgcctgtccccggcagtcgctgatgcacatgacatgattctcatctgggtgcagaggtgggaggcaccaggtgggcacccgtgggggttagggcttggaagagtggcacaggactgggcacgctcagtgaggctcagggaattcagactagcctcgattgtcactccgagaaatgggcatggtattgggggtcgggggggcggtgcaagggacgcacatgagagactgtttgggagcttctggggagccctgctagttgtctcagtgatgtctgtgggacctccagtcccttgagaccccacgtcatgtagagaagttaacggcccaagtggtgggcaggctggcgggacctggggaacatcaggagaggagtccagagcccacgtctactgcggaaaagtcaggggaaactgccaaacaaaggaaaatgccccaaaggcatatatgctttagggcctttggtccaaatggcccgggtggccactcttccagatagaccaggcaactctccctcccaccggccacagatgaggggctgctgatctatgcctgggcctgcaccagggattatggttcttttaaatctttgcctttcagatacaggaaaaataatggcattaaattgctttaatttgcattattttagttatccagtttgcacatatttttataggtatcttaggcatcgattggtattttttaactgggccaagcccattaaggtctttcttctgttgggtgctatcattttctgattaagtctttttgactattgacatacagtctttcacagatggtggagtgtttttcccccaaatctgttgtttgtcttataatgttgtatatgaggttttatggtgtatgaatatgaatgcttctgtaatgtcaaacagatccctagtaaactccttcttcacttttactgtcagatttacaaaggtcctcccattgcaaagcagtgtttgtcctaatttatatattgtttttctagttcattttgtgtttccaacttttcatgtaaaattttaattatttttgaatgtgtggatgtgagactgaggtgccttttggtactgaaattctttttccatgtacctgaagtgttacttttgtgatataggaaatccttgtatatatactttattggtccctaggcttcctattttgttaccttgctttctctatggcatccaccattttgattgttctacttttatgatatgttttcataagtggttaagcaagtattctcgttacttttgctcttaaatccctattcattacagcaatgttggtggtcaaagaaaatgataaacaacttgaatgttcaatggtcctgaaatacataacaacattttagtacattgtaaagtagaatcctctgttcataatgaacaagatgaaccaatgtggattagaaagaagtccgagatattaattccaaaatatccagacattgttaaagggaaaaaattgcaataaaatatttgtaacataaaacaaagtgaaaccc

SEQ ID NO: 453436 - DNA, 408 bp, Homo sapiens
gagtgatagaatgatgactgactgactgacaggatgctgaatgagtgaatggttttataatctgtttgtgtggctgattcaggcttttgtaccctgattgatgattgcttgggcgggaaagtgctgatacacctagatataatggaacatttctgtgccaaggtggcagggcatggtggtatagcctggtatagggtggtattataccaccaacttgaatgttcaatggtcctgaaatacataacaacattttagtacattgtaaagtagaatcctctgttcataatgaacaagatgaaccaatgtggattagaaagaagtccgagatattaattccaaaatatccagacattgttaaagggaaaaaattgcaataaaatatttgtaacataaaacaaagtgaaaccc

SEQ ID NO: 453437 - DNA, 213 bp, Homo sapiens
acacagctggcaggttcaggctgaagtttcagccctggtcttttggccccagagctcatgacctctgtgtgatgaatcacacggtgggcacccactgagagctatgggagggatgaatgacggagtacatgaggacctgtctccaacccaggggatgaggcccagccccagaacctggagtgcttctttgacggggccgccgtgctcagctgc

SEQ ID NO: 453438 - DNA, 319 bp, Homo sapiens
cgctttttatggagttcgggtcacgtgcgcattgcaatctgcacggctttccattgctttcatgttgaaaccctacagttttgcagatgaagggctgaggctcacagaggagacgggtcttgctcaaggtccctcagctgctgggggcaggggtggcctggaaccccctgtgtccacacaaaaggccatgcaggccctgactgccccccagcggtccagcccttaggtgcccttcacttcctcccctccagtccagcctcctgagcccagggacctgcagatcagcaccgaccaggaccacttcctgctgacctggagt

SEQ ID NO: 453439 - DNA, 3949 bp, Homo sapiens
gcctggaggaggcagaggccaggagggagaggtcccaagagcctgtgaaatgggtctggcctggctcccagctgggcaggaacacaggacttcaggacactaaggaccctgtcatgcccatggccagcacccaccagtgctggtgcctgcctgtccagagctgaccagggagatggtgctggcccaggggctgctctccatggccctgctggccctgtgctgggagcgcagcctggcaggggcagaagaaaccatcccgctgcagaccctgcgctgctacaacgactacaccagccacatcacctgcaggtgggcagacacccaggatgcccagcggctcgtcaacgtgaccctcattcgccgggtgaatgaggacctcctggagccagtgtcctgtgacctcagtgatgacatgccctggtcagcctgcccccatccccgctgcgtgcccaggagatgtgtcattccctgccagagttttgtcgtcactgacgttgactacttctcattccaaccagacaggcctctgggcacccggctcaccgtcactctgacccagcatgtccagcctcctgagcccagggacctgcagatcagcaccgaccaggaccacttcctgctgacctggagtgtggcccttgggagtccccagagccactggttgtccccaggggatctggagtttgaggtggtctacaagcggcttcaggactcttgggaggacgcagccatcctcctctccaacacctcccaggccaccctggggccagagcacctcatgcccagcagcacctacgtggcccgagtacggacccgcctggccccaggttctcggctctcaggacgtcccagcaagtggagcccagaggtttgctgggactcccagccaggggatgaggcccagccccagaacctggagtgcttctttgacggggccgccgtgctcagctgctcctgggaggtgaggaaggaggtggccagctcggtctcctttggcctattctacaagcccagcccagatgcaggggaggaagagtgctccccagtgctgagggaggggctcggcagcctccacaccaggcaccactgccagattcccgtgcccgaccccgcgacccacggccaatacatcgtctctgttcagccaaggagggcagagaaacacataaagagctcagtgaacatccagatggcccctccatccctcaacgtgaccaaggatggagacagctacagcctgcgctgggaaacaatgaaaatgcgatacgaacacatagaccacacatttgagatccagtacaggaaagacacggccacgtggaaggacagcaagaccgagaccctccagaacgcccacagcatggccctgccagccctggagccctccaccaggtactgggccagggtgagggtcaggacctcccgcaccggctacaacgggatctggagcgagtggagtgaggcgcgctcctgggacaccgagtcggtgctgcctatgtgggtgctggccctcatcgtgatcttcctcaccatcgctgtgctcctggccctccgcttctgtggcatctacgggtacaggctgcgcagaaagtgggaggagaagatccccaaccccagcaagagccacctgttccagaacgggagcgcagagctttggcccccaggcagcatgtcggccttcactagcgggagtcccccacaccaggggccgtggggcagccgcttccctgagctggagggggtgttccctgtaggattcggggacagcgaggtgtcacctctcaccatagaggaccccaagcatgtctgtgatccaccatctgggcctgacacgactccagctgcctcagatctacccacagagcagccccccagcccccagccaggcccgcctgccgcctcccacacacctgagaaacaggcttccagctttgacttcaatgggccctacctggggccgccccacagccgctccctacctgacatcctgggccagccggagcccccacaggagggtgggagccagaagtccccacctccagggtccctggagtacctgtgtctgcctgctggggggcaggtgcaactggtccctctggcccaggcgatgggaccgggacaggccgtggaagtggagagaaggccgagccagggggctgcagggagtccctccctggagtccgggggaggccctgcccctcctgctcttgggccaagggtgggaggacaggaccaaaaggacagccctgtggctatacccatgagctctggggacactgaggaccctggagtggcctctggttatgtctcctctgcagacctggtattcaccccaaactcaggggcctcgtctgtctccctagttccctctctgggcctcccctcagaccagacccccagcttatgtcctgggctggccagtggaccccctggagccccaggccctgtgaagtcagggtttgagggctatgtggagctccctccaattgagggccggtcccccaggtcaccaaggaacaatcctgtcccccctgaggccaaaagccctgtcctgaacccaggggaacgcccggcagatgtgtccccaacatccccacagcccgagggcctccttgtcctgcagcaagtgggcgactattgcttcctccccggcctggggcccggccctctctcgctccggagtaaaccttcttccccgggacccggtcctgagatcaagaacctagaccaggcttttcaagtcaagaagcccccaggccaggctgtgccccaggtgcccgtcattcagctcttcaaagccctgaagcagcaggactacctgtctctgcccccttgggaggtcaacaagcctggggaggtgtgttgagacccccaggcctagacaggcaaggggatggagagggcttgccttccctcccgcctgaccttcctcagtcatttctgcaaagccaaggggcagcctcctgtcaaggtagctagaggcctgggaaaggagatagccttgctccggcccccttgaccttcagcaaatcacttctctccctgcgctcacacagacacacacacacacacgtacatgcacacatttttcctgtcaggttaacttatttgtaggttctgcattattagaactttctagatatactcattccatctccccctcatttttttaatcaggtttccttgcttttgccatttttcttccttcttttttcactgatttattatgagagtggggctgaggtctgagctgagccttatcagactgagatgcggctggttgtgttgaggacttgtgtgggctgcctgtccccggcagtcgctgatgcacatgacatgattctcatctgggtgcagaggtgggaggcaccaggtgggcacccgtgggggttagggcttggaagagtggcacaggactgggcacgctcagtgaggctcagggaattcagactagcctcgattgtcactccgagaaatgggcatggtattgggggtcgggggggcggtgcaagggacgcacatgagagactgtttgggagcttctggggagccctgctagttgtctcagtgatgtctgtgggacctccagtcccttgagaccccacgtcatgtagagaagttaacggcccaagtggtgggcaggctggcgggacctggggaacatcaggagaggagtccagagcccacgtctactgcggaaaagtcaggggaaactgccaaacaaaggaaaatgcccttatgagcaggagaaagaaagacaccactcctaaaacctgggaaggccccagagcatgaagaatgggcttattccccatgtgttcctctctgaatcctaaccagcccaagggttttgtactggagagttttttctccatagccacgcctccgtagtacatgttttgaaagccacagggagagagatgagaagaggtatgatgactctacgaat

SEQ ID NO: 453440 - DNA, 3236 bp, Homo sapiens
  misc_feature (35)..(36): n is a, c, g, or t
  misc_feature (43)..(44): n is a, c, g, or t
tgatggccggagcttatggagagagaggccaagcnnagcgagnncacctgttccagaacgggagcgcagagctttggcccccaggcagcatgtcggccttcactagcgggagtcccccacaccaggggccgtggggcagccgcttccctgagctggagggggtgttccctgtaggattcggggacagcgaggtgtcacctctcaccatagaggaccccaagcatgtctgtgatccaccatctgggcctgacacgactccagctgcctcagatctacccacagagcagccccccagcccccagccaggcccgcctgccgcctcccacacacctgagaaacaggcttccagctttgacttcaatgggccctacctggggccgccccacagccgctccctacctgacatcctgggccagccggagcccccacaggagggtgggagccagaagtccccacctccagggtccctggagtacctgtgtctgcctgctggggggcaggtgcaactggtccctctggcccaggcgatgggaccgggacaggccgtggaagtggagagaaggccgagccagggggctgcagggagtccctccctggagtccgggggaggccctgcccctcctgctcttgggccaagggtgggaggacaggaccaaaaggacagccctgtggctatacccatgagctctggggacactgaggaccctggagtggcctctggttatgtctcctctgcagacctggtattcaccccaaactcaggggcctcgtctgtctccctagttccctctctgggcctcccctcagaccagacccccagcttatgtcctgggctggccagtggaccccctggagccccaggccctgtgaagtcagggtttgagggctatgtggagctccctccaattgagggccggtcccccaggtcaccaaggaacaatcctgtcccccctgaggccaaaagccctgtcctgaacccaggggaacgcccggcagatgtgtccccaacatccccacagcccgagggcctccttgtcctgcagcaagtgggcgactattgcttcctccccggcctggggcccggccctctctcgctccggagtaaaccttcttccccgggacccggtcctgagatcaagaacctagaccaggcttttcaagtcaagaagcccccaggccaggctgtgccccaggtgcccgtcattcagctcttcaaagccctgaagcagcaggactacctgtctctgcccccttgggaggtcaacaagcctggggaggtgtgttgagacccccaggcctagacaggcaaggggatggagagggcttgccttccctcccgcctgaccttcctcagtcatttctgcaaagccaaggggcagcctcctgtcaaggtagctagaggcctgggaaaggagatagccttgctccggcccccttgaccttcagcaaatcacttctctccctgcgctcacacagacacacacacacacacgtacatgcacacatttttcctgtcaggttaacttatttgtaggttctgcattattagaactttctagatatactcattccatctccccctcatttttttaatcaggtttccttgcttttgccatttttcttccttcttttttcactgatttattatgagagtggggctgaggtctgagctgagccttatcagactgagatgcggctggttgtgttgaggacttgtgtgggctgcctgtccccggcagtcgctgatgcacatgacatgattctcatctgggtgcagaggtgggaggcaccaggtgggcacccgtgggggttagggcttggaagagtggcacaggactgggcacgctcagtgaggctcagggaattcagactagcctcgattgtcactccgagaaatgggcatggtattgggggtcgggggggcggtgcaagggacgcacatgagagactgtttgggagcttctggggagccctgctagttgtctcagtgatgtctgtgggacctccagtcccttgagaccccacgtcatgtagagaagttaacggcccaagtggtgggcaggctggcgggacctggggaacatcaggagaggagtccagagcccacgtctactgcggaaaagtcaggggaaactgccaaacaaaggaaaatgccccaaaggcatatatgctttagggcctttggtccaaatggcccgggtggccactcttccagatagaccaggcaactctccctcccaccggccacagatgaggggctgctgatctatgcctgggcctgcaccagggattatggttcttttaaatctttgcctttcagatacaggaaaaataatggcattaaattgctttaatttgcattattttagttatccagtttgcacatatttttataggtatcttaggcatcgattggtattttttaactgggccaagcccattaaggtctttcttctgttgggtgctatcattttctgattaagtctttttgactattgacatacagtctttcacagatggtggagtgtttttcccccaaatctgttgtttgtcttataatgttgtatatgaggttttatggtgtatgaatatgaatgcttctgtaatgtcaaacagatccctagtaaactccttcttcacttttactgtcagatttacaaaggtcctcccattgcaaagcagtgtttgtcctaatttatatattgtttttctagttcattttgtgtttccaacttttcatgtaaaattttaattatttttgaatgtgtggatgtgagactgaggtgccttttggtactgaaattctttttccatgtacctgaagtgttacttttgtgatataggaaatccttgtatatatactttattggtccctaggcttcctattttgttaccttgctttctctatggcatccaccattttgattgttctacttttatgatatgttttcataagtggttaagcaagtattctcgttacttttgctcttaaatccctattcattacagcaatgttggtggtcaaagaaaatgataaacaacttgaatgttcaatggtcctgaaatacataacaacattttagtacattgtaaagtagaatcctctgttcataatgaacaagatgaaccaatgtggattagaaagaagtccgagatattaattccaaaatatccagacattgttaaagggaaaaaattgcaataaaatatttgtaacataaaacaaagtgaaaccc

SEQ ID NO: 453441 - DNA, 149 bp, Homo sapiens
tcttggagtaccttcatatatatcttctttttaatttcttctctggcaattctttcctggattctttgctttgcataattatacctgcttcctgcttctgctattgacagtggataaaacactgaggaaataaattttttttcattttg

SEQ ID NO: 453442 - DNA, 12918 bp, Homo sapiens
gaggaggagctggagggggcgcggcttcctctcggtcgctccctggcgccgggcctctttctctgcctggcccagggctggcggccggcgggggtcgcggcggcggcagtgggggcgctggcgggccgcgggtggcgggggccgggccgcggctccgggtgttaggagacaagatggcggcggctctcagaaggccggtctcctcctctccgccgtcctccgccccgccgctcgccgcctcctcctctcgggtctcctcctcctcgtttgctgcctcctcctcctcctgcagcagcaccagcgaccgccgaagcgccggctcgctcacccggagctccggaggtggatagacggggcagctgcaggctccggcgaccgaggccgagctggggccggggcggggacggcggcggcggcggcggcgacggcggcggcgccgggtggggatggggtcgcagacgctgcagatcctccgacagggggtgtgggccgcgctcagcgggggctggtactacgacccgcaccaggccaccttcgtgaacgcgctgcacctctacctgtggctctttctgctgggcctacccttcaccctctacatggcccttccttctaccatgattatagtagcagtttattgtcctgtgatagctgctgttttcattgttctgaagatggtcaactatcgactacacagagcacttgatgctggagaagttgtagataggactgcaaatgagttcacggatcagcgaaccaaagctgaacaaggcaactgttcaaccaggagaaaagacagcaatggaccgagtgatcctggtggagggattgaaatgtctgagttcatccgagaggccacacccccagttggttgcagttccagaaattcttatgccggtctagatccaagcaaccagattggatctggttcctcgcgtcttggaacagcagcaactattaaaggagatacagacactgctaagacttctgatgatatcagtttaagtctgggccaaagttctagtctttgtaaggaaggaagtgaagaacaagatttggcagctgatcggaagctctttcgtcttgtctccaatgactccttcatctctattcagccttccttatcctcttgtggacaggacttgccaagggacttcagtgacaaagtgaacctgccaagtcataaccaccaccaccatgttgatcagtctctgtccagcgcctgtgacacagaagtagcttctcttgtacctttacactcacactcttatagaaaagaccaccggccgcgaggtgtaccacggacttctagctctgctgtggcttttccagacacttcactgaatgattttcccctttatcagcaaagacgtggattagatccagttagtgagttagaatcttccaagcctctttctggatccaaagaatccttggtggaaaattctggtttatctggggaatttcagcttgctggtgacttgaaaatcaatacttctcagccacccacaaaaagtgggaagagcaaacctttgaaagcagagaaaagcatggacagcttgaggagcctgagcacacggagtagtgggtcaacagaaagctactgcagtggaacggaccgggacactaacagtactgtcagcagctataaaagtgagcagaccagctcaactcacatagagagcatcctgtcagagcatgaggagtctcctaaagcaggaacaaaaagtgggaggaagaaagagtgctgtgcaggcccagaggagaagaatagctgtgccagtgacaaaaggactagcagtgaaaagattgctatggaagcgagtaccaacagtggggttcacgaggccaaggaccccaccccctctgatgagatgcacaaccagagaggtctcagcacctctgcatctgaagaagccaataaaaatccccatgcaaatgaatttacttcccaaggggacagaccacctgggaacactgcagaaaacaaagaagagaagagtgataagtcagctgtttctgtggattccaaagtgcgtaaagatgttggtggaaagcaaaaggaaggggatgttcgacctaaatcttctagcgtaatccatcggacagcttctgcccacaagtcaggcaggagacgcacaggaaaaaaacgggctagcagttttgattcaagccggcatagggactatgtttgctttcgaggtgtttctggtaccaagccacacagtgctatattttgtcatgacgaagactctagtgatcagagtgacttgagtagagcatcaagtgttcagtctgctcaccagttcagcagtgatagctcttctagcaccacttctcattcctgtcagtctcctgagggcagatacagtgctctaaagaccaaacacactcataaagaaaggggcacagactctgaacacacacacaaagctcatttggttcctgaaggaaccagcaaaaagcgtgcaacacgacggacttctagcacaaatagtgccaagactcgtgcccgagtgttgagcctggacagtggcacagtagcatgtttgaatgactcaaacaggttaatggcacctgaaagtataaagcccttaaccacttcaaaatcagatcttgaggccaaagagggagaggtgctagatgagctatctttattaggacgggcttcccagttagagacagtcactcgatctaggaatagcttgccaaaccaggttgcatttcctgaaggggaagagcaagatgcagtcagtggagcagcacaagccagcgaggaggcagtgtcatttcgccgtgaacgcagcacatttaggcgccaggcagtacggcgccggcacaatgcagggagtaaccctacccctcctacattgctcatcggatcacccctaagccttcaagatggtcagcaaggccagcagtccacagcccaggtcaaagtccagtcccgccccccttcccaggctgcagtgctcagtgctagtgcctccttgctggtgagaaatgggagtgtccacttagaagcatcacatgacaatgcatctgctgtaggcggtagcagtttgcacgatgaacttggtaagttctcttctacgctgtatgagactggtggctgtgatatgtcacttgtgaattttgaaccagcagcaagaagagcatccaatatctgtgacacagattctcatgtatccagttctacctcagttcgattttatccacatgatgtgctctctctcccacagattcgattgaatagactattgaccattgatacagatttgttggagcaacaggacattgatctaagccctgacttggcagctacttacggcccaacagaagaagctgcccaaaaggttaaacactattatcgcttttggatcctaccccagctgtggattggcattaactttgacagactcacacttttggccctgtttgatagaaatcgtgagatcctggaaaatgtgttagctgtcatcctggctattctcgtggcctttttgggatctattcttctcatacaaggattcttcagagatatctgggtcttccagttctgcctcgtcatagccagctgtcaatactcactgcttaagagtgttcaaccagattcttcttctcccagacatggtcataatcgtatcattgcctacagtagaccagtttatttctgcatatgttgcggtcttatttggctcttggattatggtagcagaaacctgactgcaaccaagttcaaattatatggaataactttcaccaatccactggtgtttatatcagccagggatttagttatagtgtttacactctgtttcccaatagtgtttttcattggtctcctgcctcaggtgaatacatttgtaatgtacctttgtgaacaattggatattcatatttttggtggtaatgccactacaagcctgcttgcagcactttacagttttatctgtagcattgttgcagtagccttattgtatggattatgttatggggctttaaaggattcttgggatggccagcatattccagtacttttctccattttttgtggtttattagtggcagtgtcttaccatctcagccgacaaagcagtgatccatctgtacttttctctttagtgcaatccaagatttttccaaaaacggaagagaaaaatccagaagaccctctatctgaagtaaaagatccactgcctgaaaaacttagaaattctgttagtgagcgattacagtctgacctggtagtatgcattgtaattggtgtgctgtattttgctattcatgtaagcacagtcttcacagtattgcagcctgccctcaagtatgtgttgtatacattggttggctttgtgggttttgtaacccattatgtgctgcctcaagttagaaaacagctaccatggcactgtttctctcatcctctgctaaagacactagagtataatcagtatgaagttcgaaatgcagccactatgatgtggtttgagaaacttcatgtgtggcttctttttgtggagaagaatataatctatccattgattgttctcaatgaactgagcagcagtgcagagacaattgctagtccaaagaaactgaatacagaattaggtgctttaatgatcactgttgctggtttgaagttgctacgatcctcttttagcagccctacatatcagtatgttacagtcatctttactgtgctgtttttcaaatttgactatgaagctttttcagagaccatgctgttggatctcttctttatgtccatactcttcaacaagctttgggaactactttataaattgcagtttgtgtatacctatattgccccatggcagatcacatggggttctgctttccatgcttttgctcagccttttgcagtgcctcattcagccatgctgtttattcaggctgctgtctcggccttcttctctactccactgaacccctttctgggaagtgcaatattcatcacttcatatgtccgacctgtgaaattctgggagagagactataacacaaaacgagtggatcattcaaataccagattggcttcccagcttgatagaaatccaggatcagatgacaacaatctgaattccatcttttatgagcatttaactagatccctacagcacagcctctgtggtgatttgctactaggacggtggggaaactacagtacaggggactgtttcatccttgcctctgactatctcaatgcattagtacaccttatagagataggcaatggtctggtcacttttcagctgcggggacttgaattcagaggtacctactgtcaacaacgggaagtggaggccattactgaaggtgtagaggaagatgaaggattttgctgttgtgaacctggccatattcctcacatgctttcatttaatgctgcatttagccagcgatggctagcttgggaagtgatagtcacaaagtacattctggagggttatagcatcactgataacagtgctgcttctatgcttcaagtctttgatcttcggaaagtactcaccacttactatgtcaagggtatcatttattatgttacgacctcgtctaagctagaggagtggctagctaatgagacaatgcaggaaggacttcgtctgtgtgctgatcgcaattatgtcgatgtggacccgacctttaatccaaacattgatgaagactatgaccaccgactggcaggcatatctagggagagtttctgtgtgatttacctcaactggatagagtactgctcttcccgaagagcaaagcctgtggatgtggacaaagattcatccctagtgactctctgttatggactctgtgttctgggacggagagctttggggactgcatcccatcatatgtccagtaatttagagtcattcctctatggattgcatgccctatttaaaggagatttccgtatttcttcaattcgagatgaatggatctttgctgacatggaattgctaagaaaagtagtagtccctgggatccgtatgtccattaaacttcatcaggatcattttacttctccagatgaatatgatgaccctactgtgctctatgaagccatagtatctcatgagaagaacctcgtaatagcccatgaaggggaccctgcatggcggagtgcagtacttgccaactctccctccttgcttgctctgcggcatgtcatggatgatggcaccaatgaatataaaatcatcatgctcaacagacgctacctgagcttcagggtcattaaagtgaataaggaatgtgtccgaggtctttgggcagggcaacagcaggagcttgtttttctacgtaaccgtaacccagagagaggtagcatccaaaatgcaaagcaagccctgagaaacatgataaactcatcttgtgatcaacctattggctacccaatctttgtctcacccctgacaacttcttactctgacagccacgaacagcttaaagacattcttgggggtcctatcagcttgggaaatatcaggaacttcatagtgtcaacctggcacaggcttaggaaaggttgcggagctggatgtaacagtggtggcaatattgaagattctgatactggaggtgggacttcctgcactggtaacaatgcaacaactgccaacaatccccacagcaacgtgacccagggaagcattggaaatcctgggcagggatcaggaactggactccacccacctgtcacatcttatcctccaacactaggcactagccacagctctcactctgtgcagtcgggcctggtcagacagtctcctgcccgggcctcagtagccagccagtcttcctactgctatagcagccggcattcatccctccggatgtccaccactgggtttgtgccttgtcggcgctcttctactagtcagatatcgcttcgaaacttgccatcatccatccaatcccgactgtcgatggtgaaccaaatggaaccctcaggtcagagcggcctggcctgtgtgcagcacggcctgccttcctccagcagctccagccaaagcatcccagcctgcaaacatcacactctcgtgggctttcttgcgacagagggaggtcagagcagtgccactgatgcacagccaggcaacaccttaagtcctgccaacaattcacactccagaaaggcagaagtgatttacagagtccaaattgtggatcccagtcaaattctggaagggatcaacctgtctaaaaggaaagagctacagtggcctgatgaaggaatccggttaaaagctgggagaaatagctggaaagactggagtccgcaggagggcatggaaggccatgtgattcaccgatgggtgccttgcagcagagatccaggtaccagatcccacatcgacaaggcagtgcttctggtccagattgatgataaatatgtgactgtaattgaaactggggtactagaacttggggctgaagtgtgagccagtgtttattataaagacatttctttttccctctcaattccaaggcattggaaaaagagaggaacaagcagaagatgcctgcaggtatcactttgatcctatgtgggagcgactgaaaatagaatgagcttggttaagcacctctcctttgcccttcaccctgactcctgtcactgtctccatccccaaataaagctgaaatatttttttaagttagctgccgagaaaacattttgcatgaaggataaagttctgttaaaatacatccttaaaaaaagtttttcctatgcattgcctatgctttaaatcaacaaactcttcatttctaaactatgatctcatatttttctaatttctttgccaaaaataattgccatgttttgtcatagaacatgaaattcatttaccttgatttttaagaacagaccagtgtagaaatgttccttttgacttatagcagtataaaagtttaatgtacagtgaaagagactatgaacagacatagatttatcttattccttgagcgctaaaaactttaataaaaaaaactgcactaattttttacagcaatgcactaaagtctgagatttctcagaacatttatttatatataaaaataaaataccattatttaaattgcctttgggattagccccttccctttccttataaacacaggtagcaggaactgtgctgctcatttttctgttagtagtgtgtacttcatgccaggacattgggtattttctttaaagtgaatatagaatctcaagatatacgtagcttcatcattgacatttcccagagccaatagtcagcggatcggtcttgtgaacaccactgccagctcctgtgtctacatctcagaggagcccatgtgctctgcttctctccaccagagcaagctctgctgggcgtgcttctgggaagaaaacaattttctttaagaagaagatgaatgtccaggaatttaaagaaaggatcgattgccttttatttatgagtttctagctcttgaagttattcacatgcagttcagttagtcaagtaaaattttttttcaaataaaagtatccaagtggtgcagttattattatatccctctttaataattttgctttttatttttcccctcttctttttctgttacttgaattttatttcctgtaatttatagtgtgtagctgtaaattgaaatatttataactgtgaaattgacttaattcatatgttgtctcataactttattttttttaaatgcatattcagggaaatatattactcatatttacaattgggcgatataggaacttcaatttagatttaatttgcaactcttagcattttttaaatccttgataaaattttcccttttggtgtgaaactccaaagaaaattgtacatctcctctgagcatttaggagcagccatctttctaccccttgtgaataaatcattgaaagaaacaggtaaaattaattttaatgatacattttgtttcacccagtatagtcaaagtattactatttcatcatatgtcactagccatatttcaagtactcaatagctacatgtacctagtggctactgtattagacagtacagatttaaagtatcttttgttgaggtgacagaagagagaagctgtttttcctaccaattctgatgtagatctcacattatagcataacattacagtagaaggaatgaaaactaagaaagtaaatagtgaacatacagaacttactgcatttccactttaaaacctatttattttccctttttctaattttaaacttttgtggtcattcagaacctaatgtgccttgtgttgacatttccatagacttcacactttacaaaatttactgtttaaaaatacttgtcaaatgatttactgaacctttatacaaaagtaccctttctaaattgaccatttaaaaatgtatttttgtgataccgtcattatgttctgcatttgcctcattttggcagatctacagtatgccattaaagtttagtgttgtttttggttttggagggtttttttctgaaactgaatttataatctatttctctgtatacgtatatttttaaaatcttctgaaaggaactatgttccctgctgcttcttccctttctgaagtgaatatgatcttttcatggtcattgcctagataaaagtagagccttttcaatcttagatggaagataattcattttcccacacagaaaaaaaatctgacctttacatgatttaatctgaagggctagaattttttaatttctagcccctcctccaaaaaaattttaaacacatcacatactctgaaaagtcagatttcaaatgcaagactagactttatatggaacatatatgttgggttttgattttgggtagcaattgacatatatttttctcaaaacaagttgaattttgttaacatatataattctttagtgaatttataaattaggacccctgagaagaagccctgttgtttttcttaagagtctaaaactgacaatcttttaaaaatcataatacttttctagtaattgcatcagggaattggtgataattgaagaaagatccatttcttaagaataatttgatctaaattattatatggaaataaacatacttgtgttaactaaattgatcataaattcttgttcctgcctcacccctcaccccccagagaatagtgagtgactcgtttagattctctgctttttttcagttatgtacaagacttcagcatacattaatgtctttagtttataaatttgccaatgctttaatttccataatttgaaagttaaaagatgtaactaaaatactagcttttttattcatttccttttggtggagttgtatgattgaaaactttgctttttcttgtttaattcttccgccaccccctcttttgagagaaaggtaatcgtggaatgagttataaattattgcctttttttcctttatttctttcattcagtggcaaaaaacattttataactcctaagtttttggttaatcttccaacttataccttggtgtgaactctctttttacaccattttcaacactggataaaactttaatgttgactttttgctaaagaactttaatttttccaagaatctagattaacataagatgttgatatttaaggaacttggaagagtaagtggtgaggctgtatgtatattttttaagagattaccttttaggaaattagtgaacaaacttaaccagtgttctgccttctttgactttgttactggaggatgataatctatttctattagattcgaagtattttggaaaatatttcaagtatatctgaactacttataattcttaaaacagaagtagtcagacaatatttgtatcctaagtgagatatggaaaattactctgtatactaaatgtcaggcaatgaaaatgtaagtttttgtgtagaaaacccattaagaagatgtgtttttctttctgaattagtttatttttccatcacataccaaaatataaaaatcagcctcacatttttcagcaagtttagcttatagccttgataaattcctctgtgcttctgagcagcatccttctgcctctgcttagcagctctgcatttggtggattgctgttgtgagtcattcatccagcactgggccttttaagctgaagattcacccagtgtctaaagttgtccttttcttatagctagctttcaagcatctttcctcctaaataaatatgtgacttgagaaaaaggtaataatgattttgtcagaattctttgaatttatatttactagctacttaaccataaactgctgtccgagattgttaatttcatttatatttattttaattaatttgtcatgaatatggacaaagccttttctggggtgtgtgtgtgtgtgtatgtttgttttttaagtcgtcattattcattcgtattctttttctgtgtaatgtaatcatataaagttactttggacagagacccagttaattttctcttttgataggatacatggtttagataaggtataaagtgtccctttttattctagaggcttttcctttaattcagagattagtggagataataacgtcagtcaaggctaatgtggtacatggaacttgctaatggaggttggacattctgtttcagtcttacatggatattgtttcattggtgttgaggaagaaaaaaattagatactaccatgcattgggacagcataattctaatattacattgaatatggctttttaaaaataagtattaaaaagccaatcgttttctccatttatctatcttttttgtttgtttttaatttggttgattgatatgcacccaggccgtcttatttttacttgttaaatgtctgtctaggaagaactgtgattggaaaggaattaattattatacaaataaatctggtaggatatgagtggagtaagtttgcttgaaacagaagtatattttctactttgaatcacctcaccagagtcatctgtcaagaattatgtataacaatttatctttattgcctacatacaacatactttttctgaattaagataacttctatttgtgagttgaacttcattatctgccattttgtggaatcaaccttacattctttggtggaactagagctgattgtcaccacaaggttatatgacaactctgttctaagacttatacctattatatagggttataccttttttcttatgcctcagctctgtacctgacaatttatgattcagtggagccaagctagaaggaacaaaggtcatctaacactgtgatggggatgaattcctgagttttacctgcacaatgaggtggtgccccggaattcacaacagagtagtgatagagcataagatggctgctccagatgactcttgggtttagtgtacttgtgattgaacaagattttttatctatgaagcttgattctacaaccaaaataatagaaatggggggggggggggaatcatgtctgcttatgctttttaaaagcttatagtttaagtaaaagtaaaatgtaaaaactgattaaacctatacaagtctggcaatgagctctgcatgaggaaatggaaggaggaatattgaaaatgattctaggaaagtgaacgtaagaaaggaaaatgggttttccttttctgatcatgggctctggaaagtattcatggcctttaccagcattcagtataaaccagagataaggacatatgtacttacgtgtgtctgtgagtgtgtgtgtgtctgagtgttattctgaacagcttgtaaatattgtagttgtttaaaatggaaaataaaagctgagttcttttggcaaatatattgcatcaaaaatacagtattgacagtggataaaacactgaggaaataaattttttttcattttg

SEQ ID NO: 453443 - DNA, 12731 bp, Homo sapiens
gaggaggagctggagggggcgcggcttcctctcggtcgctccctggcgccgggcctctttctctgcctggcccagggctggcggccggcgggggtcgcggcggcggcagtgggggcgctggcgggccgcgggtggcgggggccgggccgcggctccgggtgttaggagacaagatggcggcggctctcagaaggccggtctcctcctctccgccgtcctccgccccgccgctcgccgcctcctcctctcgggtctcctcctcctcgtttgctgcctcctcctcctcctgcagcagcaccagcgaccgccgaagcgccggctcgctcacccggagctccggaggtggatagacggggcagctgcaggctccggcgaccgaggccgagctggggccggggcggggacggcggcggcggcggcggcgacggcggcggcgccgggtggggatggggtcgcagacgctgcagatcctccgacagggggtgtgggccgcgctcagcgggggctggtactacgacccgcaccaggccaccttcgtgaacgcgctgcacctctacctgtggctctttctgctgggcctacccttcaccctctacatggcccttccttctaccatgattatagtagcagtttattgtcctgtgatagctgctgttttcattgttctgaagatggtcaactatcgactacacagagcacttgatgctggagaagttgtagataggactgcaaatgagttcacggatcagcgaaccaaagctgaacaaggcaactgttcaaccaggagaaaagacagcaatggaccgagtgatcctggtggagggattgaaatgtctgagttcatccgagaggccacacccccagttggttgcagttccagaaattcttatgccggtctagatccaagcaaccagattggatctggttcctcgcgtcttggaacagcagcaactattaaaggagatacagacactgctaagacttctgatgatatcagtttaagtctgggccaaagttctagtctttgtaaggaaggaagtgaagaacaagatttggcagctgatcggaagctctttcgtcttgtctccaatgactccttcatctctattcagccttccttatcctcttgtggacaggacttgccaagggacttcagtgacaaagtgaacctgccaagtcataaccaccaccaccatgttgatcagtctctgtccagcgcctgtgacacagaagtagcttctcttgtacctttacactcacactcttatagaaaagaccaccggccgcgaggtgtaccacggacttctagctctgctgtggcttttccagacacttcactgaatgattttcccctttatcagcaaagacgtggattagatccagttagtgagttagaatcttccaagcctctttctggatccaaagaatccttggtggaaaattctggtttatctggggaatttcagcttgctggtgacttgaaaatcaatacttctcagccacccacaaaaagtgggaagagcaaacctttgaaagcagagaaaagcatggacagcttgaggagcctgagcacacggagtagtgggtcaacagaaagctactgcagtggaacggaccgggacactaacagtactgtcagcagctataaaagtgagcagaccagctcaactcacatagagagcatcctgtcagagcatgaggagtctcctaaagcaggaacaaaaagtgggaggaagaaagagtgctgtgcaggcccagaggagaagaatagctgtgccagtgacaaaaggactagcagtgaaaagattgctatggaagcgagtaccaacagtggggttcacgaggccaaggaccccaccccctctgatgagatgcacaaccagagaggtctcagcacctctgcatctgaagaagccaataaaaatccccatgcaaatgaatttacttcccaaggggacagaccacctgggaacactgcagaaaacaaagaagagaagagtgataagtcagctgtttctgtggattccaaagtgcgtaaagatgttggtggaaagcaaaaggaaggggatgttcgacctaaatcttctagcgtaatccatcggacagcttctgcccacaagtcaggcaggagacgcacaggaaaaaaacgggctagcagttttgattcaagccggcatagggactatgtttgctttcgaggtgtttctggtaccaagccacacagtgctatattttgtcatgacgaagactctagtgatcagagtgacttgagtagagcatcaagtgttcagtctgctcaccagttcagcagtgatagctcttctagcaccacttctcattcctgtcagtctcctgagggcagatacagtgctctaaagaccaaacacactcataaagaaaggggcacagactctgaacacacacacaaagctcatttggttcctgaaggaaccagcaaaaagcgtgcaacacgacggacttctagcacaaatagtgccaagactcgtgcccgagtgttgagcctggacagtggcacagtagcatgtttgaatgactcaaacaggttaatggcacctgaaagtataaagcccttaaccacttcaaaatcagatcttgaggccaaagagggagaggtgctagatgagctatctttattaggacgggcttcccagttagagacagtcactcgatctaggaatagcttgccaaaccaggttgcatttcctgaaggggaagagcaagatgcagtcagtggagcagcacaagccagcgaggaggcagtgtcatttcgccgtgaacgcagcacatttaggcgccaggcagtacggcgccggcacaatgcagggagtaaccctacccctcctacattgctcatcggatcacccctaagccttcaagatggtcagcaaggccagcagtccacagcccaggtcaaagtccagtcccgccccccttcccaggctgcagtgctcagtgctagtgcctccttgctggtgagaaatgggagtgtccacttagaagcatcacatgacaatgcatctgctgtaggcggtagcagtttgcacgatgaacttggtaagttctcttctacgctgtatgagactggtggctgtgatatgtcacttgtgaattttgaaccagcagcaagaagagcatccaatatctgtgacacagattctcatgtatccagttctacctcagttcgattttatccacatgatgtgctctctctcccacagattcgattgaatagactattgaccattgatacagatttgttggagcaacaggacattgatctaagccctgacttggcagctacttacggcccaacagaagaagctgcccaaaaggttaaacactattatcgcttttggatcctaccccagctgtggattggcattaactttgacagactcacacttttggccctgtttgatagaaatcgtgagatcctggaaaatgtgttagctgtcatcctggctattctcgtggcctttttgggatctattcttctcatacaaggattcttcagagatatctgggtcttccagttctgcctcgtcatagccagctgtcaatactcactgcttaagagtgttcaaccagattcttcttctcccagacatggtcataatcgtatcattgcctacagtagaccagtttatttctgcatatgttgcggtcttatttggctcttggattatggtagcagaaacctgactgcaaccaagttcaaattatatggaataactttcaccaatccactggtgtttatatcagccagggatttagttatagtgtttacactctgtttcccaatagtgtttttcattggtctcctgcctcaggtgaatacatttgtaatgtacctttgtgaacaattggatattcatatttttggtggtaatgccactacaagcctgcttgcagcactttacagttttatctgtagcattgttgcagtagccttattgtatggattatgttatggggctttaaaggattcttgggatggccagcatattccagtacttttctccattttttgtggtttattagtggcagtgtcttaccatctcagccgacaaagcagtgatccatctgtacttttctctttagtgcaatccaagatttttccaaaaacggaagagaaaaatccagaagaccctctatctgaagtaaaagatccactgcctgaaaaacttagaaattctgttagtgagcgattacagtctgacctggtagtatgcattgtaattggtgtgctgtattttgctattcatgtaagcacagtcttcacagtattgcagcctgccctcaagtatgtgttgtatacattggttggctttgtgggttttgtaacccattatgtgctgcctcaagttagaaaacagctaccatggcactgtttctctcatcctctgctaaagacactagagtataatcagtatgaagttcgaaatgcagccactatgatgtggtttgagaaacttcatgtgtggcttctttttgtggagaagaatataatctatccattgattgttctcaatgaactgagcagcagtgcagagacaattgctagtccaaagaaactgaatacagaattaggtgctttaatgatcactgttgctggtttgaagttgctacgatcctcttttagcagccctacatatcagtatgttacagtcatctttactgtgctgtttttcaaatttgactatgaagctttttcagagaccatgctgttggatctcttctttatgtccatactcttcaacaagctttgggaactactttataaattgcagtttgtgtatacctatattgccccatggcagatcacatggggttctgctttccatgcttttgctcagccttttgcagtgcctcattcagccatgctgtttattcaggctgctgtctcggccttcttctctactccactgaacccctttctgggaagtgcaatattcatcacttcatatgtccgacctgtgaaattctgggagagagactataacacaaaacgagtggatcattcaaataccagattggcttcccagcttgatagaaatccaggatcagatgacaacaatctgaattccatcttttatgagcatttaactagatccctacagcacagcctctgtggtgatttgctactaggacggtggggaaactacagtacaggggactgtttcatccttgcctctgactatctcaatgcattagtacaccttatagagataggcaatggtctggtcacttttcagctgcggggacttgaattcagaggtacctactgtcaacaacgggaagtggaggccattactgaaggtgtagaggaagatgaaggattttgctgttgtgaacctggccatattcctcacatgctttcatttaatgctgcatttagccagcgatggctagcttgggaagtgatagtcacaaagtacattctggagggttatagcatcactgataacagtgctgcttctatgcttcaagtctttgatcttcggaaagtactcaccacttactatgtcaagggtatcatttattatgttacgacctcgtctaagctagaggagtggctagctaatgagacaatgcaggaaggacttcgtctgtgtgctgatcgcaattatgtcgatgtggacccgacctttaatccaaacattgatgaagactatgaccaccgactggcaggcatatctagggagagtttctgtgtgatttacctcaactggatagagtactgctcttcccgaagagcaaagcctgtggatgtggacaaagattcatccctagtgactctctgttatggactctgtgttctgggacggagagctttggggactgcatcccatcatatgtccagtaatttagagtcattcctctatggattgcatgccctatttaaaggagatttccgtatttcttcaattcgagatgaatggatctttgctgacatggaattgctaagaaaagtagtagtccctgggatccgtatgtccattaaacttcatcaggatcattttacttctccagatgaatatgatgaccctactgtgctctatgaagccatagtatctcatgagaagaacctcgtaatagcccatgaaggggaccctgcatggcggagtgcagtacttgccaactctccctccttgcttgctctgcggcatgtcatggatgatggcaccaatgaatataaaatcatcatgctcaacagacgctacctgagcttcagggtcattaaagtgaataaggaatgtgtccgaggtctttgggcagggcaacagcaggagcttgtttttctacgtaaccgtaacccagagagaggtagcatccaaaatgcaaagcaagccctgagaaacatgataaactcatcttgtgatcaacctattggctacccaatctttgtctcacccctgacaacttcttactctgacagccacgaacagcttaaagacattcttgggggtcctatcagcttgggaaatatcaggaacttcatagtgtcaacctggcacaggcttaggaaaggttgcggagctggatgtaacagtggtggcaatattgaagattctgatactggaggtgggacttcctgcactggtaacaatgcaacaactgccaacaatccccacagcaacgtgacccagggaagcattggaaatcctgggcagggatcaggaactggactccacccacctgtcacatcttatcctccaacactaggcactagccacagctctcactctgtgcagtcgggcctggtcagacagtctcctgcccgggcctcagtagccagccagtcttcctactgctatagcagccggcattcatccctccggatgtccaccactgggtttgtgccttgtcggcgctcttctactagtcagatatcgcttcgaaacttgccatcatccatccaatcccgactgtcgatggtgaaccaaatggaaccctcaggtcagagcggcctggcctgtgtgcagcacggcctgccttcctccagcagctccagccaaagcatcccagcctgcaaacatcacactctcgtgggctttcttgcgacagagggaggtcagagcagtgccactgatgcacagccaggcaacaccttaagtcctgccaacaattcacactccagaaaggcagaagtgatttacagagtccaaattgtggatcccagtcaaattctggaagggatcaacctgtctaaaaggaaagagctacagtggcctgatgaaggaatccggttaaaagctgggagaaatagctggaaagactggagtccgcaggagggcatggaaggccatgtgattcaccgatgggtgccttgcagcagagatccaggtaccagatcccacatcgacaaggcagtgcttctggtccagattgatgataaatatgtgactgtaattgaaactggggtactagaacttggggctgaagtgtgagccagtgtttattataaagacatttctttttccctctcaattccaaggcattggaaaaagagaggaacaagcagaagatgcctgcaggtatcactttgatcctatgtgggagcgactgaaaatagaatgagcttggttaagcacctctcctttgcccttcaccctgactcctgtcactgtctccatccccaaataaagctgaaatatttttttaagttagctgccgagaaaacattttgcatgaaggataaagttctgttaaaatacatccttaaaaaaagtttttcctatgcattgcctatgctttaaatcaacaaactcttcatttctaaactatgatctcatatttttctaatttctttgccaaaaataattgccatgttttgtcatagaacatgaaattcatttaccttgatttttaagaacagaccagtgtagaaatgttccttttgacttatagcagtataaaagtttaatgtacagtgaaagagactatgaacagacatagatttatcttattccttgagcgctaaaaactttaataaaaaaaactgcactaattttttacagcaatgcactaaagtctgagatttctcagaacatttatttatatataaaaataaaataccattatttaaattgcctttgggattagccccttccctttccttataaacacaggtagcaggaactgtgctgctcatttttctgttagtagtgtgtacttcatgccaggacattgggtattttctttaaagtgaatatagaatctcaagatatacgtagcttcatcattgacatttcccagagccaatagtcagcggatcggtcttgtgaacaccactgccagctcctgtgtctacatctcagaggagcccatgtgctctgcttctctccaccagagcaagctctgctgggcgtgcttctgggaagaaaacaattttctttaagaagaagatgaatgtccaggaatttaaagaaaggatcgattgccttttatttatgagtttctagctcttgaagttattcacatgcagttcagttagtcaagtaaaattttttttcaaataaaagtatccaagtggtgcagttattattatatccctctttaataattttgctttttatttttcccctcttctttttctgttacttgaattttatttcctgtaatttatagtgtgtagctgtaaattgaaatatttataactgtgaaattgacttaattcatatgttgtctcataactttattttttttaaatgcatattcagggaaatatattactcatatttacaattgggcgatataggaacttcaatttagatttaatttgcaactcttagcattttttaaatccttgataaaattttcccttttggtgtgaaactccaaagaaaattgtacatctcctctgagcatttaggagcagccatctttctaccccttgtgaataaatcattgaaagaaacaggtaaaattaattttaatgatacattttgtttcacccagtatagtcaaagtattactatttcatcatatgtcactagccatatttcaagtactcaatagctacatgtacctagtggctactgtattagacagtacagatttaaagtatcttttgttgaggtgacagaagagagaagctgtttttcctaccaattctgatgtagatctcacattatagcataacattacagtagaaggaatgaaaactaagaaagtaaatagtgaacatacagaacttactgcatttccactttaaaacctatttattttccctttttctaattttaaacttttgtggtcattcagaacctaatgtgccttgtgttgacatttccatagacttcacactttacaaaatttactgtttaaaaatacttgtcaaatgatttactgaacctttatacaaaagtaccctttctaaattgaccatttaaaaatgtatttttgtgataccgtcattatgttctgcatttgcctcattttggcagatctacagtatgccattaaagtttagtgttgtttttggttttggagggtttttttctgaaactgaatttataatctatttctctgtatacgtatatttttaaaatcttctgaaaggaactatgttccctgctgcttcttccctttctgaagtgaatatgatcttttcatggtcattgcctagataaaagtagagccttttcaatcttagatggaagataattcattttcccacacagaaaaaaaatctgacctttacatgatttaatctgaagggctagaattttttaatttctagcccctcctccaaaaaaattttaaacacatcacatactctgaaaagtcagatttcaaatgcaagactagactttatatggaacatatatgttgggttttgattttgggtagcaattgacatatatttttctcaaaacaagttgaattttgttaacatatataattctttagtgaatttataaattaggacccctgagaagaagccctgttgtttttcttaagagtctaaaactgacaatcttttaaaaatcataatacttttctagtaattgcatcagggaattggtgataattgaagaaagatccatttcttaagaataatttgatctaaattattatatggaaataaacatacttgtgttaactaaattgatcataaattcttgttcctgcctcacccctcaccccccagagaatagtgagtgactcgtttagattctctgctttttttcagttatgtacaagacttcagcatacattaatgtctttagtttataaatttgccaatgctttaatttccataatttgaaagttaaaagatgtaactaaaatactagcttttttattcatttccttttggtggagttgtatgattgaaaactttgctttttcttgtttaattcttccgccaccccctcttttgagagaaaggtaatcgtggaatgagttataaattattgcctttttttcctttatttctttcattcagtggcaaaaaacattttataactcctaagtttttggttaatcttccaacttataccttggtgtgaactctctttttacaccattttcaacactggataaaactttaatgttgactttttgctaaagaactttaatttttccaagaatctagattaacataagatgttgatatttaaggaacttggaagagtaagtggtgaggctgtatgtatattttttaagagattaccttttaggaaattagtgaacaaacttaaccagtgttctgccttctttgactttgttactggaggatgataatctatttctattagattcgaagtattttggaaaatatttcaagtatatctgaactacttataattcttaaaacagaagtagtcagacaatatttgtatcctaagtgagatatggaaaattactctgtatactaaatgtcaggcaatgaaaatgtaagtttttgtgtagaaaacccattaagaagatgtgtttttctttctgaattagtttatttttccatcacataccaaaatataaaaatcagcctcacatttttcagcaagtttagcttatagccttgataaattcctctgtgcttctgagcagcatccttctgcctctgcttagcagctctgcatttggtggattgctgttgtgagtcattcatccagcactgggccttttaagctgaagattcacccagtgtctaaagttgtccttttcttatagctagctttcaagcatctttcctcctaaataaatatgtgacttgagaaaaaggtaataatgattttgtcagaattctttgaatttatatttactagctacttaaccataaactgctgtccgagattgttaatttcatttatatttattttaattaatttgtcatgaatatggacaaagccttttctggggtgtgtgtgtgtgtgtatgtttgttttttaagtcgtcattattcattcgtattctttttctgtgtaatgtaatcatataaagttactttggacagagacccagttaattttctcttttgataggatacatggtttagataaggtataaagtgtccctttttattctagaggcttttcctttaattcagagattagtggagataataacgtcagtcaaggctaatgtggtacatggaacttgctaatggaggttggacattctgtttcagtcttacatggatattgtttcattggtgttgaggaagaaaaaaattagatactaccatgcattgggacagcataattctaatattacattgaatatggctttttaaaaataagtattaaaaagccaatcgttttctccatttatctatcttttttgtttgtttttaatttggttgattgatatgcacccaggccgtcttatttttacttgttaaatgtctgtctaggaagaactgtgattggaaaggaattaattattatacaaataaatctggtaggatatgagtggagtaagtttgcttgaaacagaagtatattttctactttgaatcacctcaccagagtcatctgtcaagaattatgtataacaatttatctttattgcctacatacaacatactttttctgaattaagataacttctatttgtgagttgaacttcattatctgccattttgtggaatcaaccttacattctttggtggaactagagctgattgtcaccacaaggttatatgacaactctgttctaagacttatacctattatatagggttataccttttttcttatgcctcagctctgtacctgacaatttatgattcagtggagccaagctagaaggaacaaaggtcatctaacactgtgatggggatgaattcctgagttttacctgcacaatgaggtggtgccccggaattcacaacagagtagtgatagagcataagatggctgctccagatgactcttgggtttagtgtacttgtgattgaacaagattttttatctatgaagcttgattctacaaccaaaataatagaaatggggggggggggggaatcatgtctgcttatgctttttaaaagcttatagtttaagtaaaagtaaaatgtaaaaactgattaaacctatacaagtctggcaatgagctctgcatgaggaaatggaaggaggaatattgtagttgtttaaaatggaaaataaaagctgagttcttttggcaaatatattgcatcaaaaatacagtattgacagtggataaaacactgaggaaataaattttttttcattttg

SEQ ID NO: 453444 - DNA, 11289 bp, Homo sapiens
gaggaggagctggagggggcgcggcttcctctcggtcgctccctggcgccgggcctctttctctgcctggcccagggctggcggccggcgggggtcgcggcggcggcagtgggggcgctggcgggccgcgggtggcgggggccgggccgcggctccgggtgttaggagacaagatggcggcggctctcagaaggccggtctcctcctctccgccgtcctccgccccgccgctcgccgcctcctcctctcgggtctcctcctcctcgtttgctgcctcctcctcctcctgcagcagcaccagcgaccgccgaagcgccggctcgctcacccggagctccggaggtggatagacggggcagctgcaggctccggcgaccgaggccgagctggggccggggcggggacggcggcggcggcggcggcgacggcggcggcgccgggtggggatggggtcgcagacgctgcagatcctccgacagggggtgtgggccgcgctcagcgggggctggtactacgacccgcaccaggccaccttcgtgaacgcgctgcacctctacctgtggctctttctgctgggcctacccttcaccctctacatggcccttccttctaccatgattatagtagcagtttattgtcctgtgatagctgctgttttcattgttctgaagatggtcaactatcgactacacagagcacttgatgctggagaagttgtagataggactgcaaatgagttcacggatcagcgaaccaaagctgaacaaggcaactgttcaaccaggagaaaagacagcaatggaccgagtgatcctggtggagggattgaaatgtctgagttcatccgagaggccacacccccagttggttgcagttccagaaattcttatgccggtctagatccaagcaaccagattggatctggttcctcgcgtcttggaacagcagcaactattaaaggagatacagacactgctaagacttctgatgatatcagtttaagtctgggccaaagttctagtctttgtaaggaaggaagtgaagaacaagatttggcagctgatcggaagctctttcgtcttgtctccaatgactccttcatctctattcagccttccttatcctcttgtggacaggacttgccaagggacttcagtgacaaagtgaacctgccaagtcataaccaccaccaccatgttgatcagtctctgtccagcgcctgtgacacagaagtagcttctcttgtacctttacactcacactcttatagaaaagaccaccggccgcgaggtgtaccacggacttctagctctgctgtggcttttccagacacttcactgaatgattttcccctttatcagcaaagacgtggattagatccagttagtgagttagaatcttccaagcctctttctggatccaaagaatccttggtggaaaattctggtttatctggggaatttcagcttgctggtgacttgaaaatcaatacttctcagccacccacaaaaagtgggaagagcaaacctttgaaagcagagaaaagcatggacagcttgaggagcctgagcacacggagtagtgggtcaacagaaagctactgcagtggaacggaccgggacactaacagtactgtcagcagctataaaagtgagcagaccagctcaactcacatagagagcatcctgtcagagcatgaggagtctcctaaagcaggaacaaaaagtgggaggaagaaagagtgctgtgcaggcccagaggagaagaatagctgtgccagtgacaaaaggactagcagtgaaaagattgctatggaagcgagtaccaacagtggggttcacgaggccaaggaccccaccccctctgatgagatgcacaaccagagaggtctcagcacctctgcatctgaagaagccaataaaaatccccatgcaaatgaatttacttcccaaggggacagaccacctgggaacactgcagaaaacaaagaagagaagagtgataagtcagctgtttctgtggattccaaagtgcgtaaagatgttggtggaaagcaaaaggaaggggatgttcgacctaaatcttctagcgtaatccatcggacagcttctgcccacaagtcaggcaggagacgcacaggaaaaaaacgggctagcagttttgattcaagccggcatagggactatgtttgctttcgaggtgtttctggtaccaagccacacagtgctatattttgtcatgacgaagactctagtgatcagagtgacttgagtagagcatcaagtgttcagtctgctcaccagttcagcagtgatagctcttctagcaccacttctcattcctgtcagtctcctgagggcagatacagtgctctaaagaccaaacacactcataaagaaaggggcacagactctgaacacacacacaaagctcatttggttcctgaaggaaccagcaaaaagcgtgcaacacgacggacttctagcacaaatagtgccaagactcgtgcccgagtgttgagcctggacagtggcacagtagcatgtttgaatgactcaaacaggttaatggcacctgaaagtataaagcccttaaccacttcaaaatcagatcttgaggccaaagagggagaggtgctagatgagctatctttattaggacgggcttcccagttagagacagtcactcgatctaggaatagcttgccaaaccaggttgcatttcctgaaggggaagagcaagatgcagtcagtggagcagcacaagccagcgaggaggcagtgtcatttcgccgtgaacgcagcacatttaggcgccaggcagtacggcgccggcacaatgcagggagtaaccctacccctcctacattgctcatcggatcacccctaagccttcaagatggtcagcaaggccagcagtccacagcccaggtcaaagtccagtcccgccccccttcccaggctgcagtgctcagtgctagtgcctccttgctggtgagaaatgggagtgtccacttagaagcatcacatgacaatgcatctgctgtaggcggtagcagtttgcacgatgaacttggtaagttctcttctacgctgtatgagactggtggctgtgatatgtcacttgtgaattttgaaccagcagcaagaagagcatccaatatctgtgacacagattctcatgtatccagttctacctcagttcgattttatccacatgatgtgctctctctcccacagattcgattgaatagactattgaccattgatacagatttgttggagcaacaggacattgatctaagccctgacttggcagctacttacggcccaacagaagaagctgcccaaaaggttaaacactattatcgcttttggatcctaccccagctgtggattggcattaactttgacagactcacacttttggccctgtttgatagaaatcgtgagatcctggaaaatgtgttagctgtcatcctggctattctcgtggcctttttgggatctattcttctcatacaaggattcttcagagatatctgggtcttccagttctgcctcgtcatagccagctgtcaatactcactgcttaagagtgttcaaccagattcttcttctcccagacatggtcataatcgtatcattgcctacagtagaccagtttatttctgcatatgttgcggtcttatttggctcttggattatggtagcagaaacctgactgcaaccaagttcaaattatatggaataactttcaccaatccactggtgtttatatcagccagggatttagttatagtgtttacactctgtttcccaatagtgtttttcattggtctcctgcctcaggtgaatacatttgtaatgtacctttgtgaacaattggatattcatatttttggtggtaatgccactacaagcctgcttgcagcactttacagttttatctgtagcattgttgcagtagccttattgtatggattatgttatggggctttaaaggattcttgggatggccagcatattccagtacttttctccattttttgtggtttattagtggcagtgtcttaccatctcagccgacaaagcagtgatccatctgtacttttctctttagtgcaatccaagatttttccaaaaacggaagagaaaaatccagaagaccctctatctgaagtaaaagatccactgcctgaaaaacttagaaattctgttagtgagcgattacagtctgacctggtagtatgcattgtaattggtgtgctgtattttgctattcatgtaagcacagtcttcacagtattgcagcctgccctcaagtatgtgttgtatacattggttggctttgtgggttttgtaacccattatgtgctgcctcaagttagaaaacagctaccatggcactgtttctctcatcctctgctaaagacactagagtataatcagtatgaagttcgaaatgcagccactatgatgtggtttgagaaacttcatgtgtggcttctttttgtggagaagaatataatctatccattgattgttctcaatgaactgagcagcagtgcagagacaattgctagtccaaagaaactgaatacagaattaggtgctttaatgatcactgttgctggtttgaagttgctacgatcctcttttagcagccctacatatcagtatgttacagtcatctttactgtgctgtttttcaaatttgactatgaagctttttcagagaccatgctgttggatctcttctttatgtccatactcttcaacaagctttgggaactactttataaattgcagtttgtgtatacctatattgccccatggcagatcacatggggttctgctttccatgcttttgctcagccttttgcagtgcctcattcagccatgctgtttattcaggctgctgtctcggccttcttctctactccactgaacccctttctgggaagtgcaatattcatcacttcatatgtccgacctgtgaaattctgggagagagactataacacaaaacgagtggatcattcaaataccagattggcttcccagcttgatagaaatccaggatcagatgacaacaatctgaattccatcttttatgagcatttaactagatccctacagcacagcctctgtggtgatttgctactaggacggtggggaaactacagtacaggggactgtttcatccttgcctctgactatctcaatgcattagtacaccttatagagataggcaatggtctggtcacttttcagctgcggggacttgaattcagaggtacctactgtcaacaacgggaagtggaggccattactgaaggtgtagaggaagatgaaggattttgctgttgtgaacctggccatattcctcacatgctttcatttaatgctgcatttagccagcgatggctagcttgggaagtgatagtcacaaagtacattctggagggttatagcatcactgataacagtgctgcttctatgcttcaagtctttgatcttcggaaagtactcaccacttactatgtcaagggtatcatttattatgttacgacctcgtctaagctagaggagtggctagctaatgagacaatgcaggaaggacttcgtctgtgtgctgatcgcaattatgtcgatgtggacccgacctttaatccaaacattgatgaagactatgaccaccgactggcaggcatatctagggagagtttctgtgtgatttacctcaactggatagagtactgctcttcccgaagagcaaagcctgtggatgtggacaaagattcatccctagtgactctctgttatggactctgtgttctgggacggagagctttggggactgcatcccatcatatgtccagtaatttagagtcattcctctatggattgcatgccctatttaaaggagatttccgtatttcttcaattcgagatgaatggatctttgctgacatggaattgctaagaaaagtagtagtccctgggatccgtatgtccattaaacttcatcaggatcattttacttctccagatgaatatgatgaccctactgtgctctatgaagccatagtatctcatgagaagaacctcgtaatagcccatgaaggggaccctgcatggcggagtgcagtacttgccaactctccctccttgcttgctctgcggcatgtcatggatgatggcaccaatgaatataaaatcatcatgctcaacagacgctacctgagcttcagggtcattaaagtgaataaggaatgtgtccgaggtctttgggcagggcaacagcaggagcttgtttttctacgtaaccgtaacccagagagaggtagcatccaaaatgcaaagcaagccctgagaaacatgataaactcatcttgtgatcaacctattggctacccaatctttgtctcacccctgacaacttcttactctgacagccacgaacagcttaaagacattcttgggggtcctatcagcttgggaaatatcaggaacttcatagtgtcaacctggcacaggcttaggaaaggttgcggagctggatgtaacagtggtggcaatattgaagattctgatactggaggtgggacttcctgcactggtaacaatgcaacaactgccaacaatccccacagcaacgtgacccagggaagcattggaaatcctgggcagggatcaggaactggactccacccacctgtcacatcttatcctccaacactaggcactagccacagctctcactctgtgcagtcgggcctggtcagacagtctcctgcccgggcctcagtagccagccagtcttcctactgctatagcagccggcattcatccctccggatgtccaccactgggtttgtgccttgtcggcgctcttctactagtcagatatcgcttcgaaacttgccatcatccatccaatcccgactgtcgatggtgaaccaaatggaaccctcaggtcagagcggcctggcctgtgtgcagcacggcctgccttcctccagcagctccagccaaagcatcccagcctgcaaacatcacactctcgtgggctttcttgcgacagagggaggtcagagcagtgccactgatgcacagccaggcaacaccttaagtcctgccaacaattcacactccagaaaggcagaagtgatttacagagtccaaattgtggatcccagtcaaattctggaagggatcaacctgtctaaaaggaaagagctacagtggcctgatgaaggaatccggttaaaagctgggagaaatagctggaaagactggagtccgcaggagggcatggaaggccatgtgattcaccgatgggtgccttgcagcagagatccaggtaccagatcccacatcgacaaggcagtgcttctggtccagattgatgataaatatgtgactgtaattgaaactggggtactagaacttggggctgaagtgtgagccagtgtttattataaagacatttctttttccctctcaattccaaggcattggaaaaagagaggaacaagcagaagatgcctgcaggtatcactttgatcctatgtgggagcgactgaaaatagaatgagcttggttaagcacctctcctttgcccttcaccctgactcctgtcactgtctccatccccaaataaagctgaaatatttttttaagttagctgccgagaaaacattttgcatgaaggataaagttctgttaaaatacatccttaaaaaaagtttttcctatgcattgcctatgctttaaatcaacaaactcttcatttctaaactatgatctcatatttttctaatttctttgccaaaaataattgccatgttttgtcatagaacatgaaattcatttaccttgatttttaagaacagaccagtgtagaaatgttccttttgacttatagcagtataaaagtttaatgtacagtgaaagagactatgaacagacatagatttatcttattccttgagcgctaaaaactttaataaaaaaaactgcactaattttttacagcaatgcactaaagtctgagatttctcagaacatttatttatatataaaaataaaataccattatttaaattgcctttgggattagccccttccctttccttataaacacaggtagcaggaactgtgctgctcatttttctgttagtagtgtgtacttcatgccaggacattgggtattttctttaaagtgaatatagaatctcaagatatacgtagcttcatcattgacatttcccagagccaatagtcagcggatcggtcttgtgaacaccactgccagctcctgtgtctacatctcagaggagcccatgtgctctgcttctctccaccagagcaagctctgctgggcgtgcttctgggaagaaaacaattttctttaagaagaagatgaatgtccaggaatttaaagaaaggatcgattgccttttatttatgagtttctagctcttgaagttattcacatgcagttcagttagtcaagtaaaattttttttcaaataaaagtatccaagtggtgcagttattattatatccctctttaataattttgctttttatttttcccctcttctttttctgttacttgaattttatttcctgtaatttatagtgtgtagctgtaaattgaaatatttataactgtgaaattgacttaattcatatgttgtctcataactttattttttttaaatgcatattcagggaaatatattactcatatttacaattgggcgatataggaacttcaatttagatttaatttgcaactcttagcattttttaaatccttgataaaattttcccttttggtgtgaaactccaaagaaaattgtacatctcctctgagcatttaggagcagccatctttctaccccttgtgaataaatcattgaaagaaacaggtaaaattaattttaatgatacattttgtttcacccagtatagtcaaagtattactatttcatcatatgtcactagccatatttcaagtactcaatagctacatgtacctagtggctactgtattagacagtacagatttaaagtatcttttgttgaggtgacagaagagagaagctgtttttcctaccaattctgatgtagatctcacattatagcataacattacagtagaaggaatgaaaactaagaaagtaaatagtgaacatacagaacttactgcatttccactttaaaacctatttattttccctttttctaattttaaacttttgtggtcattcagaacctaatgtgccttgtgttgacatttccatagacttcacactttacaaaatttactgtttaaaaatacttgtcaaatgatttactgaacctttatacaaaagtaccctttctaaattgaccatttaaaaatgtatttttgtgataccgtcattatgttctgcatttgcctcattttggcagatctacagtatgccattaaagtttagtgttgtttttggttttggagggtttttttctgaaactgaatttataatctatttctctgtatacgtatatttttaaaatcttctgaaaggaactatgttccctgctgcttcttccctttctgaagtgaatatgatcttttcatggtcattgcctagataaaagtagagccttttcaatcttagatggaagataattcattttcccacacagaaaaaaaatctgacctttacatgatttaatctgaagggctagaattttttaatttctagcccctcctccaaaaaaattttaaacacatcacatactctgaaaagtcagatttcaaatgcaagactagactttatatggaacatatatgttgggttttgattttgggtagcaattgacatatatttttctcaaaacaagttgaattttgttaacatatataattctttagtgaatttataaattaggacccctgagaagaagccctgttgtttttcttaagagtctaaaactgacaatcttttaaaaatcataatacttttctagtaattgcatcagggaattggtgataattgaagaaagatccatttcttaagaataatttgatctaaattattatatggaaataaacatacttgtgttaactaaattgatcataaattcttgttcctgcctcacccctcaccccccagagaatagtgagtgactcgtttagattctctgctttttttcagttatgtacaagacttcagcatacattaatgtctttagtttataaatttgccaatgctttaatttccataatttgaaagttaaaagatgtaactaaaatactagcttttttattcatttccttttggtggagttgtatgattgaaaactttgctttttcttgtttaattcttccgccaccccctcttttgagagaaaggtaatcgtggaatgagttataaattattgcctttttttcctttatttctttcattcagtggcaaaaaacattttataactcctaagtttttggttaatcttccaacttataccttggtgtgaactctctttttacaccattttcaacactggataaaactttaatgttgactttttgctaaagaactttaatttttccaagaatctagattaacataagatgttgatatttaaggaacttggaagagtaagtggtgaggctgtatgtatattttttaagagattaccttttaggaaattagtgaacaaacttaaccagtgttctgccttctttgactttgttactggaggatgataatctatttctattagattcgaagtattttggaaaatatttcaagtatatctgaactacttataattcttaaaacagaagtagtcagacaatatttgtatcctaagtgagatatggaaaattactctgtatactaaatgtcaggcaatgaaaatgtaagtttttgtgtagaaaacccattaagaagatgtgtttttctttctgaattagtttatttttccatcacataccaaaatataaaaatcagcctcacatttttcagcaagtttagcttatagccttgataaattcctctgtgcttctgagcagcatccttctgcctctgcttagcagctctgcatttggtggattgctgttgtgagtcattcatccagcactgggccttttaagctgaagattcacccagtgtctaaagttgtcctgctttctttacctttttctcaagtcacatatctatctagcaggatatatgtctgtcagtcagtcactagctctctctctctctctctaactctctct

SEQ ID NO: 453445 - DNA, 11921 bp, Homo sapiens
cctttgtttcctcttaattttattgttgatagtctatacaactctttctgaggccagttgaagaactcaaagatttggaagttcagttcatttcgtgagtagaatgctttctttgtgcagctgtgaaacagaaagcagctctttggagaactacttgagaaattatttatacttgatttactgtatgcagtgaattctttccattgttaaacagtagaaaagcagatcatacatttattttaacatttcaaaatatgtgtttgaaacagatttggcagctgatcggaagctctttcgtcttgtctccaatgactccttcatctctattcagccttccttatcctcttgtggacaggacttgccaagggacttcagtgacaaagtgaacctgccaagtcataaccaccaccaccatgttgatcagtctctgtccagcgcctgtgacacagaagtagcttctcttgtacctttacactcacactcttatagaaaagaccaccggccgcgaggtgtaccacggacttctagctctgctgtggcttttccagacacttcactgaatgattttcccctttatcagcaaagacgtggattagatccagttagtgagttagaatcttccaagcctctttctggatccaaagaatccttggtggaaaattctggtttatctggggaatttcagcttgctggtgacttgaaaatcaatacttctcagccacccacaaaaagtgggaagagcaaacctttgaaagcagagaaaagcatggacagcttgaggagcctgagcacacggagtagtgggtcaacagaaagctactgcagtggaacggaccgggacactaacagtactgtcagcagctataaaagtgagcagaccagctcaactcacatagagagcatcctgtcagagcatgaggagtctcctaaagcaggaacaaaaagtgggaggaagaaagagtgctgtgcaggcccagaggagaagaatagctgtgccagtgacaaaaggactagcagtgaaaagattgctatggaagcgagtaccaacagtggggttcacgaggccaaggaccccaccccctctgatgagatgcacaaccagagaggtctcagcacctctgcatctgaagaagccaataaaaatccccatgcaaatgaatttacttcccaaggggacagaccacctgggaacactgcagaaaacaaagaagagaagagtgataagtcagctgtttctgtggattccaaagtgcgtaaagatgttggtggaaagcaaaaggaaggggatgttcgacctaaatcttctagcgtaatccatcggacagcttctgcccacaagtcaggcaggagacgcacaggaaaaaaacgggctagcagttttgattcaagccggcatagggactatgtttgctttcgaggtgtttctggtaccaagccacacagtgctatattttgtcatgacgaagactctagtgatcagagtgacttgagtagagcatcaagtgttcagtctgctcaccagttcagcagtgatagctcttctagcaccacttctcattcctgtcagtctcctgagggcagatacagtgctctaaagaccaaacacactcataaagaaaggggcacagactctgaacacacacacaaagctcatttggttcctgaaggaaccagcaaaaagcgtgcaacacgacggacttctagcacaaatagtgccaagactcgtgcccgagtgttgagcctggacagtggcacagtagcatgtttgaatgactcaaacaggttaatggcacctgaaagtataaagcccttaaccacttcaaaatcagatcttgaggccaaagagggagaggtgctagatgagctatctttattaggacgggcttcccagttagagacagtcactcgatctaggaatagcttgccaaaccaggttgcatttcctgaaggggaagagcaagatgcagtcagtggagcagcacaagccagcgaggaggcagtgtcatttcgccgtgaacgcagcacatttaggcgccaggcagtacggcgccggcacaatgcagggagtaaccctacccctcctacattgctcatcggatcacccctaagccttcaagatggtcagcaaggccagcagtccacagcccaggtcaaagtccagtcccgccccccttcccaggctgcagtgctcagtgctagtgcctccttgctggtgagaaatgggagtgtccacttagaagcatcacatgacaatgcatctgctgtaggcggtagcagtttgcacgatgaacttggtaagttctcttctacgctgtatgagactggtggctgtgatatgtcacttgtgaattttgaaccagcagcaagaagagcatccaatatctgtgacacagattctcatgtatccagttctacctcagttcgattttatccacatgatgtgctctctctcccacagattcgattgaatagactattgaccattgatacagatttgttggagcaacaggacattgatctaagccctgacttggcagctacttacggcccaacagaagaagctgcccaaaaggttaaacactattatcgcttttggatcctaccccagctgtggattggcattaactttgacagactcacacttttggccctgtttgatagaaatcgtgagatcctggaaaatgtgttagctgtcatcctggctattctcgtggcctttttgggatctattcttctcatacaaggattcttcagagatatctgggtcttccagttctgcctcgtcatagccagctgtcaatactcactgcttaagagtgttcaaccagattcttcttctcccagacatggtcataatcgtatcattgcctacagtagaccagtttatttctgcatatgttgcggtcttatttggctcttggattatggtagcagaaacctgactgcaaccaagttcaaattatatggaataactttcaccaatccactggtgtttatatcagccagggatttagttatagtgtttacactctgtttcccaatagtgtttttcattggtctcctgcctcaggtgaatacatttgtaatgtacctttgtgaacaattggatattcatatttttggtggtaatgccactacaagcctgcttgcagcactttacagttttatctgtagcattgttgcagtagccttattgtatggattatgttatggggctttaaaggattcttgggatggccagcatattccagtacttttctccattttttgtggtttattagtggcagtgtcttaccatctcagccgacaaagcagtgatccatctgtacttttctctttagtgcaatccaagatttttccaaaaacggaagagaaaaatccagaagaccctctatctgaagtaaaagatccactgcctgaaaaacttagaaattctgttagtgagcgattacagtctgacctggtagtatgcattgtaattggtgtgctgtattttgctattcatgtaagcacagtcttcacagtattgcagcctgccctcaagtatgtgttgtatacattggttggctttgtgggttttgtaacccattatgtgctgcctcaagttagaaaacagctaccatggcactgtttctctcatcctctgctaaagacactagagtataatcagtatgaagttcgaaatgcagccactatgatgtggtttgagaaacttcatgtgtggcttctttttgtggagaagaatataatctatccattgattgttctcaatgaactgagcagcagtgcagagacaattgctagtccaaagaaactgaatacagaattaggtgctttaatgatcactgttgctggtttgaagttgctacgatcctcttttagcagccctacatatcagtatgttacagtcatctttactgtgctgtttttcaaatttgactatgaagctttttcagagaccatgctgttggatctcttctttatgtccatactcttcaacaagctttgggaactactttataaattgcagtttgtgtatacctatattgccccatggcagatcacatggggttctgctttccatgcttttgctcagccttttgcagtgcctcattcagccatgctgtttattcaggctgctgtctcggccttcttctctactccactgaacccctttctgggaagtgcaatattcatcacttcatatgtccgacctgtgaaattctgggagagagactataacacaaaacgagtggatcattcaaataccagattggcttcccagcttgatagaaatccaggtacctactgtcaacaacgggaagtggaggccattactgaaggtgtagaggaagatgaaggattttgctgttgtgaacctggccatattcctcacatgctttcatttaatgctgcatttagccagcgatggctagcttgggaagtgatagtcacaaagtacattctggagggttatagcatcactgataacagtgctgcttctatgcttcaagtctttgatcttcggaaagtactcaccacttactatgtcaagggtatcatttattatgttacgacctcgtctaagctagaggagtggctagctaatgagacaatgcaggaaggacttcgtctgtgtgctgatcgcaattatgtcgatgtggacccgacctttaatccaaacattgatgaagactatgaccaccgactggcaggcatatctagggagagtttctgtgtgatttacctcaactggatagagtactgctcttcccgaagagcaaagcctgtggatgtggacaaagattcatccctagtgactctctgttatggactctgtgttctgggacggagagctttggggactgcatcccatcatatgtccagtaatttagagtcattcctctatggattgcatgccctatttaaaggagatttccgtatttcttcaattcgagatgaatggatctttgctgacatggaattgctaagaaaagtagtagtccctgggatccgtatgtccattaaacttcatcaggatcattttacttctccagatgaatatgatgaccctactgtgctctatgaagccatagtatctcatgagaagaacctcgtaatagcccatgaaggggaccctgcatggcggagtgcagtacttgccaactctccctccttgcttgctctgcggcatgtcatggatgatggcaccaatgaatataaaatcatcatgctcaacagacgctacctgagcttcagggtcattaaagtgaataaggaatgtgtccgaggtctttgggcagggcaacagcaggagcttgtttttctacgtaaccgtaacccagagagaggtagcatccaaaatgcaaagcaagccctgagaaacatgataaactcatcttgtgatcaacctattggctacccaatctttgtctcacccctgacaacttcttactctgacagccacgaacagcttaaagacattcttgggggtcctatcagcttgggaaatatcaggaacttcatagtgtcaacctggcacaggcttaggaaaggttgcggagctggatgtaacagtggtggcaatattgaagattctgatactggaggtgggacttcctgcactggtaacaatgcaacaactgccaacaatccccacagcaacgtgacccagggaagcattggaaatcctgggcagggatcaggaactggactccacccacctgtcacatcttatcctccaacactaggcactagccacagctctcactctgtgcagtcgggcctggtcagacagtctcctgcccgggcctcagtagccagccagtcttcctactgctatagcagccggcattcatccctccggatgtccaccactgggtttgtgccttgtcggcgctcttctactagtcagatatcgcttcgaaacttgccatcatccatccaatcccgactgtcgatggtgaaccaaatggaaccctcaggtcagagcggcctggcctgtgtgcagcacggcctgccttcctccagcagctccagccaaagcatcccagcctgcaaacatcacactctcgtgggctttcttgcgacagagggaggtcagagcagtgccactgatgcacagccaggcaacaccttaagtcctgccaacaattcacactccagaaaggcagaagtgatttacagagtccaaattgtggatcccagtcaaattctggaagggatcaacctgtctaaaaggaaagagctacagtggcctgatgaaggaatccggttaaaagctgggagaaatagctggaaagactggagtccgcaggagggcatggaaggccatgtgattcaccgatgggtgccttgcagcagagatccaggtaccagatcccacatcgacaaggcagtgcttctggtccagattgatgataaatatgtgactgtaattgaaactggggtactagaacttggggctgaagtgtgagccagtgtttattataaagacatttctttttccctctcaattccaaggcattggaaaaagagaggaacaagcagaagatgcctgcaggtatcactttgatcctatgtgggagcgactgaaaatagaatgagcttggttaagcacctctcctttgcccttcaccctgactcctgtcactgtctccatccccaaataaagctgaaatatttttttaagttagctgccgagaaaacattttgcatgaaggataaagttctgttaaaatacatccttaaaaaaagtttttcctatgcattgcctatgctttaaatcaacaaactcttcatttctaaactatgatctcatatttttctaatttctttgccaaaaataattgccatgttttgtcatagaacatgaaattcatttaccttgatttttaagaacagaccagtgtagaaatgttccttttgacttatagcagtataaaagtttaatgtacagtgaaagagactatgaacagacatagatttatcttattccttgagcgctaaaaactttaataaaaaaaactgcactaattttttacagcaatgcactaaagtctgagatttctcagaacatttatttatatataaaaataaaataccattatttaaattgcctttgggattagccccttccctttccttataaacacaggtagcaggaactgtgctgctcatttttctgttagtagtgtgtacttcatgccaggacattgggtattttctttaaagtgaatatagaatctcaagatatacgtagcttcatcattgacatttcccagagccaatagtcagcggatcggtcttgtgaacaccactgccagctcctgtgtctacatctcagaggagcccatgtgctctgcttctctccaccagagcaagctctgctgggcgtgcttctgggaagaaaacaattttctttaagaagaagatgaatgtccaggaatttaaagaaaggatcgattgccttttatttatgagtttctagctcttgaagttattcacatgcagttcagttagtcaagtaaaattttttttcaaataaaagtatccaagtggtgcagttattattatatccctctttaataattttgctttttatttttcccctcttctttttctgttacttgaattttatttcctgtaatttatagtgtgtagctgtaaattgaaatatttataactgtgaaattgacttaattcatatgttgtctcataactttattttttttaaatgcatattcagggaaatatattactcatatttacaattgggcgatataggaacttcaatttagatttaatttgcaactcttagcattttttaaatccttgataaaattttcccttttggtgtgaaactccaaagaaaattgtacatctcctctgagcatttaggagcagccatctttctaccccttgtgaataaatcattgaaagaaacaggtaaaattaattttaatgatacattttgtttcacccagtatagtcaaagtattactatttcatcatatgtcactagccatatttcaagtactcaatagctacatgtacctagtggctactgtattagacagtacagatttaaagtatcttttgttgaggtgacagaagagagaagctgtttttcctaccaattctgatgtagatctcacattatagcataacattacagtagaaggaatgaaaactaagaaagtaaatagtgaacatacagaacttactgcatttccactttaaaacctatttattttccctttttctaattttaaacttttgtggtcattcagaacctaatgtgccttgtgttgacatttccatagacttcacactttacaaaatttactgtttaaaaatacttgtcaaatgatttactgaacctttatacaaaagtaccctttctaaattgaccatttaaaaatgtatttttgtgataccgtcattatgttctgcatttgcctcattttggcagatctacagtatgccattaaagtttagtgttgtttttggttttggagggtttttttctgaaactgaatttataatctatttctctgtatacgtatatttttaaaatcttctgaaaggaactatgttccctgctgcttcttccctttctgaagtgaatatgatcttttcatggtcattgcctagataaaagtagagccttttcaatcttagatggaagataattcattttcccacacagaaaaaaaatctgacctttacatgatttaatctgaagggctagaattttttaatttctagcccctcctccaaaaaaattttaaacacatcacatactctgaaaagtcagatttcaaatgcaagactagactttatatggaacatatatgttgggttttgattttgggtagcaattgacatatatttttctcaaaacaagttgaattttgttaacatatataattctttagtgaatttataaattaggacccctgagaagaagccctgttgtttttcttaagagtctaaaactgacaatcttttaaaaatcataatacttttctagtaattgcatcagggaattggtgataattgaagaaagatccatttcttaagaataatttgatctaaattattatatggaaataaacatacttgtgttaactaaattgatcataaattcttgttcctgcctcacccctcaccccccagagaatagtgagtgactcgtttagattctctgctttttttcagttatgtacaagacttcagcatacattaatgtctttagtttataaatttgccaatgctttaatttccataatttgaaagttaaaagatgtaactaaaatactagcttttttattcatttccttttggtggagttgtatgattgaaaactttgctttttcttgtttaattcttccgccaccccctcttttgagagaaaggtaatcgtggaatgagttataaattattgcctttttttcctttatttctttcattcagtggcaaaaaacattttataactcctaagtttttggttaatcttccaacttataccttggtgtgaactctctttttacaccattttcaacactggataaaactttaatgttgactttttgctaaagaactttaatttttccaagaatctagattaacataagatgttgatatttaaggaacttggaagagtaagtggtgaggctgtatgtatattttttaagagattaccttttaggaaattagtgaacaaacttaaccagtgttctgccttctttgactttgttactggaggatgataatctatttctattagattcgaagtattttggaaaatatttcaagtatatctgaactacttataattcttaaaacagaagtagtcagacaatatttgtatcctaagtgagatatggaaaattactctgtatactaaatgtcaggcaatgaaaatgtaagtttttgtgtagaaaacccattaagaagatgtgtttttctttctgaattagtttatttttccatcacataccaaaatataaaaatcagcctcacatttttcagcaagtttagcttatagccttgataaattcctctgtgcttctgagcagcatccttctgcctctgcttagcagctctgcatttggtggattgctgttgtgagtcattcatccagcactgggccttttaagctgaagattcacccagtgtctaaagttgtccttttcttatagctagctttcaagcatctttcctcctaaataaatatgtgacttgagaaaaaggtaataatgattttgtcagaattctttgaatttatatttactagctacttaaccataaactgctgtccgagattgttaatttcatttatatttattttaattaatttgtcatgaatatggacaaagccttttctggggtgtgtgtgtgtgtgtatgtttgttttttaagtcgtcattattcattcgtattctttttctgtgtaatgtaatcatataaagttactttggacagagacccagttaattttctcttttgataggatacatggtttagataaggtataaagtgtccctttttattctagaggcttttcctttaattcagagattagtggagataataacgtcagtcaaggctaatgtggtacatggaacttgctaatggaggttggacattctgtttcagtcttacatggatattgtttcattggtgttgaggaagaaaaaaattagatactaccatgcattgggacagcataattctaatattacattgaatatggctttttaaaaataagtattaaaaagccaatcgttttctccatttatctatcttttttgtttgtttttaatttggttgattgatatgcacccaggccgtcttatttttacttgttaaatgtctgtctaggaagaactgtgattggaaaggaattaattattatacaaataaatctggtaggatatgagtggagtaagtttgcttgaaacagaagtatattttctactttgaatcacctcaccagagtcatctgtcaagaattatgtataacaatttatctttattgcctacatacaacatactttttctgaattaagataacttctatttgtgagttgaacttcattatctgccattttgtggaatcaaccttacattctttggtggaactagagctgattgtcaccacaaggttatatgacaactctgttctaagacttatacctattatatagggttataccttttttcttatgcctcagctctgtacctgacaatttatgattcagtggagccaagctagaaggaacaaaggtcatctaacactgtgatggggatgaattcctgagttttacctgcacaatgaggtggtgccccggaattcacaacagagtagtgatagagcataagatggctgctccagatgactcttgggtttagtgtacttgtgattgaacaagattttttatctatgaagcttgattctacaaccaaaataatagaaatggggggggggggggaatcatgtctgcttatgctttttaaaagcttatagtttaagtaaaagtaaaatgtaaaaactgattaaacctatacaagtctggcaatgagctctgcatgaggaaatggaaggaggaatattgaaaatgattctaggaaagtgaacgtaagaaaggaaaatgggttttccttttctgatcatgggctctggaaagtattcatggcctttaccagcattcagtataaaccagagataaggacatatgtacttacgtgtgtctgtgagtgtgtgtgtgtctgagtgttattctgaacagcttgtaaatattgtagttgtttaaaatggaaaataaaagctgagttcttttggcaaatatattgcatcaaaaatacagtattgacagtggataaaacactgaggaaataaattttttttcattttg

SEQ ID NO: 453446 - DNA, 10277 bp, Homo sapiens
gaggaatatgggaccaaaataaatgaaactttcaggaaaagatttaaacaacagagatcttaaaaataggaaattgaggttgaagagaagatggcaaggctagataataagtcaaaaacattatttttaaagaaacaattttctttaaataaatgacagatactttttgtgtattacctgatatgatagattgacagtatacatgtgaaaacagtttggattaataagttcactttacccatgagggtgggaagtcaagggaaagccaggctcagctgctatttacatctctgacctaggctcttgtttgacctaagtctgtcttgatgcagcagcacaagccagcgaggaggcagtgtcatttcgccgtgaacgcagcacatttaggcgccaggcagtacggcgccggcacaatgcagggagtaaccctacccctcctacattgctcatcggatcacccctaagccttcaagatggtcagcaaggccagcagtccacagcccaggtcaaagtccagtcccgccccccttcccaggctgcagtgctcagtgctagtgcctccttgctggtgagaaatgggagtgtccacttagaagcatcacatgacaatgcatctgctgtaggcggtagcagtttgcacgatgaacttggtaagttctcttctacgctgtatgagactggtggctgtgatatgtcacttgtgaattttgaaccagcagcaagaagagcatccaatatctgtgacacagattctcatgtatccagttctacctcagttcgattttatccacatgatgtgctctctctcccacagattcgattgaatagactattgaccattgatacagatttgttggagcaacaggacattgatctaagccctgacttggcagctacttacggcccaacagaagaagctgcccaaaaggttaaacactattatcgcttttggatcctaccccagctgtggattggcattaactttgacagactcacacttttggccctgtttgatagaaatcgtgagatcctggaaaatgtgttagctgtcatcctggctattctcgtggcctttttgggatctattcttctcatacaaggattcttcagagatatctgggtcttccagttctgcctcgtcatagccagctgtcaatactcactgcttaagagtgttcaaccagattcttcttctcccagacatggtcataatcgtatcattgcctacagtagaccagtttatttctgcatatgttgcggtcttatttggctcttggattatggtagcagaaacctgactgcaaccaagttcaaattatatggaataactttcaccaatccactggtgtttatatcagccagggatttagttatagtgtttacactctgtttcccaatagtgtttttcattggtctcctgcctcaggtgaatacatttgtaatgtacctttgtgaacaattggatattcatatttttggtggtaatgccactacaagcctgcttgcagcactttacagttttatctgtagcattgttgcagtagccttattgtatggattatgttatggggctttaaaggattcttgggatggccagcatattccagtacttttctccattttttgtggtttattagtggcagtgtcttaccatctcagccgacaaagcagtgatccatctgtacttttctctttagtgcaatccaagatttttccaaaaacggaagagaaaaatccagaagaccctctatctgaagtaaaagatccactgcctgaaaaacttagaaattctgttagtgagcgattacagtctgacctggtagtatgcattgtaattggtgtgctgtattttgctattcatgtaagcacagtcttcacagtattgcagcctgccctcaagtatgtgttgtatacattggttggctttgtgggttttgtaacccattatgtgctgcctcaagttagaaaacagctaccatggcactgtttctctcatcctctgctaaagacactagagtataatcagtatgaagttcgaaatgcagccactatgatgtggtttgagaaacttcatgtgtggcttctttttgtggagaagaatataatctatccattgattgttctcaatgaactgagcagcagtgcagagacaattgctagtccaaagaaactgaatacagaattaggtgctttaatgatcactgttgctggtttgaagttgctacgatcctcttttagcagccctacatatcagtatgttacagtcatctttactgtgctgtttttcaaatttgactatgaagctttttcagagaccatgctgttggatctcttctttatgtccatactcttcaacaagctttgggaactactttataaattgcagtttgtgtatacctatattgccccatggcagatcacatggggttctgctttccatgcttttgctcagccttttgcagtgcctcattcagccatgctgtttattcaggctgctgtctcggccttcttctctactccactgaacccctttctgggaagtgcaatattcatcacttcatatgtccgacctgtgaaattctgggagagagactataacacaaaacgagtggatcattcaaataccagattggcttcccagcttgatagaaatccaggtacctactgtcaacaacgggaagtggaggccattactgaaggtgtagaggaagatgaaggattttgctgttgtgaacctggccatattcctcacatgctttcatttaatgctgcatttagccagcgatggctagcttgggaagtgatagtcacaaagtacattctggagggttatagcatcactgataacagtgctgcttctatgcttcaagtctttgatcttcggaaagtactcaccacttactatgtcaagggtatcatttattatgttacgacctcgtctaagctagaggagtggctagctaatgagacaatgcaggaaggacttcgtctgtgtgctgatcgcaattatgtcgatgtggacccgacctttaatccaaacattgatgaagactatgaccaccgactggcaggcatatctagggagagtttctgtgtgatttacctcaactggatagagtactgctcttcccgaagagcaaagcctgtggatgtggacaaagattcatccctagtgactctctgttatggactctgtgttctgggacggagagctttggggactgcatcccatcatatgtccagtaatttagagtcattcctctatggattgcatgccctatttaaaggagatttccgtatttcttcaattcgagatgaatggatctttgctgacatggaattgctaagaaaagtagtagtccctgggatccgtatgtccattaaacttcatcaggatcattttacttctccagatgaatatgatgaccctactgtgctctatgaagccatagtatctcatgagaagaacctcgtaatagcccatgaaggggaccctgcatggcggagtgcagtacttgccaactctccctccttgcttgctctgcggcatgtcatggatgatggcaccaatgaatataaaatcatcatgctcaacagacgctacctgagcttcagggtcattaaagtgaataaggaatgtgtccgaggtctttgggcagggcaacagcaggagcttgtttttctacgtaaccgtaacccagagagaggtagcatccaaaatgcaaagcaagccctgagaaacatgataaactcatcttgtgatcaacctattggctacccaatctttgtctcacccctgacaacttcttactctgacagccacgaacagcttaaagacattcttgggggtcctatcagcttgggaaatatcaggaacttcatagtgtcaacctggcacaggcttaggaaaggttgcggagctggatgtaacagtggtggcaatattgaagattctgatactggaggtgggacttcctgcactggtaacaatgcaacaactgccaacaatccccacagcaacgtgacccagggaagcattggaaatcctgggcagggatcaggaactggactccacccacctgtcacatcttatcctccaacactaggcactagccacagctctcactctgtgcagtcgggcctggtcagacagtctcctgcccgggcctcagtagccagccagtcttcctactgctatagcagccggcattcatccctccggatgtccaccactgggtttgtgccttgtcggcgctcttctactagtcagatatcgcttcgaaacttgccatcatccatccaatcccgactgtcgatggtgaaccaaatggaaccctcaggtcagagcggcctggcctgtgtgcagcacggcctgccttcctccagcagctccagccaaagcatcccagcctgcaaacatcacactctcgtgggctttcttgcgacagagggaggtcagagcagtgccactgatgcacagccaggcaacaccttaagtcctgccaacaattcacactccagaaaggcagaagtgatttacagagtccaaattgtggatcccagtcaaattctggaagggatcaacctgtctaaaaggaaagagctacagtggcctgatgaaggaatccggttaaaagctgggagaaatagctggaaagactggagtccgcaggagggcatggaaggccatgtgattcaccgatgggtgccttgcagcagagatccaggtaccagatcccacatcgacaaggcagtgcttctggtccagattgatgataaatatgtgactgtaattgaaactggggtactagaacttggggctgaagtgtgagccagtgtttattataaagacatttctttttccctctcaattccaaggcattggaaaaagagaggaacaagcagaagatgcctgcaggtatcactttgatcctatgtgggagcgactgaaaatagaatgagcttggttaagcacctctcctttgcccttcaccctgactcctgtcactgtctccatccccaaataaagctgaaatatttttttaagttagctgccgagaaaacattttgcatgaaggataaagttctgttaaaatacatccttaaaaaaagtttttcctatgcattgcctatgctttaaatcaacaaactcttcatttctaaactatgatctcatatttttctaatttctttgccaaaaataattgccatgttttgtcatagaacatgaaattcatttaccttgatttttaagaacagaccagtgtagaaatgttccttttgacttatagcagtataaaagtttaatgtacagtgaaagagactatgaacagacatagatttatcttattccttgagcgctaaaaactttaataaaaaaaactgcactaattttttacagcaatgcactaaagtctgagatttctcagaacatttatttatatataaaaataaaataccattatttaaattgcctttgggattagccccttccctttccttataaacacaggtagcaggaactgtgctgctcatttttctgttagtagtgtgtacttcatgccaggacattgggtattttctttaaagtgaatatagaatctcaagatatacgtagcttcatcattgacatttcccagagccaatagtcagcggatcggtcttgtgaacaccactgccagctcctgtgtctacatctcagaggagcccatgtgctctgcttctctccaccagagcaagctctgctgggcgtgcttctgggaagaaaacaattttctttaagaagaagatgaatgtccaggaatttaaagaaaggatcgattgccttttatttatgagtttctagctcttgaagttattcacatgcagttcagttagtcaagtaaaattttttttcaaataaaagtatccaagtggtgcagttattattatatccctctttaataattttgctttttatttttcccctcttctttttctgttacttgaattttatttcctgtaatttatagtgtgtagctgtaaattgaaatatttataactgtgaaattgacttaattcatatgttgtctcataactttattttttttaaatgcatattcagggaaatatattactcatatttacaattgggcgatataggaacttcaatttagatttaatttgcaactcttagcattttttaaatccttgataaaattttcccttttggtgtgaaactccaaagaaaattgtacatctcctctgagcatttaggagcagccatctttctaccccttgtgaataaatcattgaaagaaacaggtaaaattaattttaatgatacattttgtttcacccagtatagtcaaagtattactatttcatcatatgtcactagccatatttcaagtactcaatagctacatgtacctagtggctactgtattagacagtacagatttaaagtatcttttgttgaggtgacagaagagagaagctgtttttcctaccaattctgatgtagatctcacattatagcataacattacagtagaaggaatgaaaactaagaaagtaaatagtgaacatacagaacttactgcatttccactttaaaacctatttattttccctttttctaattttaaacttttgtggtcattcagaacctaatgtgccttgtgttgacatttccatagacttcacactttacaaaatttactgtttaaaaatacttgtcaaatgatttactgaacctttatacaaaagtaccctttctaaattgaccatttaaaaatgtatttttgtgataccgtcattatgttctgcatttgcctcattttggcagatctacagtatgccattaaagtttagtgttgtttttggttttggagggtttttttctgaaactgaatttataatctatttctctgtatacgtatatttttaaaatcttctgaaaggaactatgttccctgctgcttcttccctttctgaagtgaatatgatcttttcatggtcattgcctagataaaagtagagccttttcaatcttagatggaagataattcattttcccacacagaaaaaaaatctgacctttacatgatttaatctgaagggctagaattttttaatttctagcccctcctccaaaaaaattttaaacacatcacatactctgaaaagtcagatttcaaatgcaagactagactttatatggaacatatatgttgggttttgattttgggtagcaattgacatatatttttctcaaaacaagttgaattttgttaacatatataattctttagtgaatttataaattaggacccctgagaagaagccctgttgtttttcttaagagtctaaaactgacaatcttttaaaaatcataatacttttctagtaattgcatcagggaattggtgataattgaagaaagatccatttcttaagaataatttgatctaaattattatatggaaataaacatacttgtgttaactaaattgatcataaattcttgttcctgcctcacccctcaccccccagagaatagtgagtgactcgtttagattctctgctttttttcagttatgtacaagacttcagcatacattaatgtctttagtttataaatttgccaatgctttaatttccataatttgaaagttaaaagatgtaactaaaatactagcttttttattcatttccttttggtggagttgtatgattgaaaactttgctttttcttgtttaattcttccgccaccccctcttttgagagaaaggtaatcgtggaatgagttataaattattgcctttttttcctttatttctttcattcagtggcaaaaaacattttataactcctaagtttttggttaatcttccaacttataccttggtgtgaactctctttttacaccattttcaacactggataaaactttaatgttgactttttgctaaagaactttaatttttccaagaatctagattaacataagatgttgatatttaaggaacttggaagagtaagtggtgaggctgtatgtatattttttaagagattaccttttaggaaattagtgaacaaacttaaccagtgttctgccttctttgactttgttactggaggatgataatctatttctattagattcgaagtattttggaaaatatttcaagtatatctgaactacttataattcttaaaacagaagtagtcagacaatatttgtatcctaagtgagatatggaaaattactctgtatactaaatgtcaggcaatgaaaatgtaagtttttgtgtagaaaacccattaagaagatgtgtttttctttctgaattagtttatttttccatcacataccaaaatataaaaatcagcctcacatttttcagcaagtttagcttatagccttgataaattcctctgtgcttctgagcagcatccttctgcctctgcttagcagctctgcatttggtggattgctgttgtgagtcattcatccagcactgggccttttaagctgaagattcacccagtgtctaaagttgtccttttcttatagctagctttcaagcatctttcctcctaaataaatatgtgacttgagaaaaaggtaataatgattttgtcagaattctttgaatttatatttactagctacttaaccataaactgctgtccgagattgttaatttcatttatatttattttaattaatttgtcatgaatatggacaaagccttttctggggtgtgtgtgtgtgtgtatgtttgttttttaagtcgtcattattcattcgtattctttttctgtgtaatgtaatcatataaagttactttggacagagacccagttaattttctcttttgataggatacatggtttagataaggtataaagtgtccctttttattctagaggcttttcctttaattcagagattagtggagataataacgtcagtcaaggctaatgtggtacatggaacttgctaatggaggttggacattctgtttcagtcttacatggatattgtttcattggtgttgaggaagaaaaaaattagatactaccatgcattgggacagcataattctaatattacattgaatatggctttttaaaaataagtattaaaaagccaatcgttttctccatttatctatcttttttgtttgtttttaatttggttgattgatatgcacccaggccgtcttatttttacttgttaaatgtctgtctaggaagaactgtgattggaaaggaattaattattatacaaataaatctggtaggatatgagtggagtaagtttgcttgaaacagaagtatattttctactttgaatcacctcaccagagtcatctgtcaagaattatgtataacaatttatctttattgcctacatacaacatactttttctgaattaagataacttctatttgtgagttgaacttcattatctgccattttgtggaatcaaccttacattctttggtggaactagagctgattgtcaccacaaggttatatgacaactctgttctaagacttatacctattatatagggttataccttttttcttatgcctcagctctgtacctgacaatttatgattcagtggagccaagctagaaggaacaaaggtcatctaacactgtgatggggatgaattcctgagttttacctgcacaatgaggtggtgccccggaattcacaacagagtagtgatagagcataagatggctgctccagatgactcttgggtttagtgtacttgtgattgaacaagattttttatctatgaagcttgattctacaaccaaaataatagaaatggggggggggggggaatcatgtctgcttatgctttttaaaagcttatagtttaagtaaaagtaaaatgtaaaaactgattaaacctatacaagtctggcaatgagctctgcatgaggaaatggaaggaggaatattgaaaatgattctaggaaagtgaacgtaagaaaggaaaatgggttttccttttctgatcatgggctctggaaagtattcatggcctttaccagcattcagtataaaccagagataaggacatatgtacttacgtgtgtctgtgagtgtgtgtgtgtctgagtgttattctgaacagcttgtaaatattgtagttgtttaaaatggaaaataaaagctgagttcttttggcaaatatattgcatcaaaaatacagtattgacagtggataaaacactgaggaaataaattttttttcattttg

SEQ ID NO: 453447 - DNA, 12297 bp, Homo sapiens
  misc_feature (4340)..(4340): n is a, c, g, or t
gaggaggagctggagggggcgcggcttcctctcggtcgctccctggcgccgggcctctttctctgcctggcccagggctggcggccggcgggggtcgcggcggcggcagtgggggcgctggcgggccgcgggtggcgggggccgggccgcggctccgggtgttaggagacaagatggcggcggctctcagaaggccggtctcctcctctccgccgtcctccgccccgccgctcgccgcctcctcctctcgggtctcctcctcctcgtttgctgcctcctcctcctcctgcagcagcaccagcgaccgccgaagcgccggctcgctcacccggagctccggaggtggatagacggggcagctgcaggctccggcgaccgaggccgagctggggccggggcggggacggcggcggcggcggcggcgacggcggcggcgccgggtggggatggggtcgcagacgctgcagatcctccgacagggggtgtgggccgcgctcagcgggggctggtactacgacccgcaccaggccaccttcgtgaacgcgctgcacctctacctgtggctctttctgctgggcctacccttcaccctctacatggcccttccttctaccatgattatagtagcagtttattgtcctgtgatagctgctgttttcattgttctgaagatggtcaactatcgactacacagagcacttgatgctggagaagttgtagataggactgcaaatgagttcacggatcagcgaaccaaagctgaacaaggcaactgttcaaccaggagaaaagacagcaatggaccgagtgatcctggtggagggattgaaatgtctgagttcatccgagaggccacacccccagttggttgcagttccagaaattcttatgccggtctagatccaagcaaccagattggatctggttcctcgcgtcttggaacagcagcaactattaaaggagatacagacactgctaagacttctgatgatatcagtttaagtctgggccaaagttctagtctttgtaaggaaggaagtgaagaacaagatttggcagctgatcggaagctctttcgtcttgtctccaatgactccttcatctctattcagccttccttatcctcttgtggacaggacttgccaagggacttcagtgacaaagtgaacctgccaagtcataaccaccaccaccatgttgatcagtctctgtccagcgcctgtgacacagaagtagcttctcttgtacctttacactcacactcttatagaaaagaccaccggccgcgaggtgtaccacggacttctagctctgctgtggcttttccagacacttcactgaatgattttcccctttatcagcaaagacgtggattagatccagttagtgagttagaatcttccaagcctctttctggatccaaagaatccttggtggaaaattctggtttatctggggaatttcagcttgctggtgacttgaaaatcaatacttctcagccacccacaaaaagtgggaagagcaaacctttgaaagcagagaaaagcatggacagcttgaggagcctgagcacacggagtagtgggtcaacagaaagctactgcagtggaacggaccgggacactaacagtactgtcagcagctataaaagtgagcagaccagctcaactcacatagagagcatcctgtcagagcatgaggagtctcctaaagcaggaacaaaaagtgggaggaagaaagagtgctgtgcaggcccagaggagaagaatagctgtgccagtgacaaaaggactagcagtgaaaagattgctatggaagcgagtaccaacagtggggttcacgaggccaaggaccccaccccctctgatgagatgcacaaccagagaggtctcagcacctctgcatctgaagaagccaataaaaatccccatgcaaatgaatttacttcccaaggggacagaccacctgggaacactgcagaaaacaaagaagagaagagtgataagtcagctgtttctgtggattccaaagtgcgtaaagatgttggtggaaagcaaaaggaaggggatgttcgacctaaatcttctagcgtaatccatcggacagcttctgcccacaagtcaggcaggagacgcacaggaaaaaaacgggctagcagttttgattcaagccggcatagggactatgtttgctttcgaggtgtttctggtaccaagccacacagtgctatattttgtcatgacgaagactctagtgatcagagtgacttgagtagagcatcaagtgttcagtctgctcaccagttcagcagtgatagctcttctagcaccacttctcattcctgtcagtctcctgagggcagatacagtgctctaaagaccaaacacactcataaagaaaggggcacagactctgaacacacacacaaagctcatttggttcctgaaggaaccagcaaaaagcgtgcaacacgacggacttctagcacaaatagtgccaagactcgtgcccgagtgttgagcctggacagtggcacagtagcatgtttgaatgactcaaacaggttaatggcacctgaaagtataaagcccttaaccacttcaaaatcagatcttgaggccaaagagggagaggtgctagatgagctatctttattaggacgggcttcccagttagagacagtcactcgatctaggaatagcttgccaaaccaggttgcatttcctgaaggggaagagcaagatgcagtcagtggagcagcacaagccagcgaggaggcagtgtcatttcgccgtgaacgcagcacatttaggcgccaggcagtacggcgccggcacaatgcagggagtaaccctacccctcctacattgctcatcggatcacccctaagccttcaagatggtcagcaaggccagcagtccacagcccaggtcaaagtccagtcccgccccccttcccaggctgcagtgctcagtgctagtgcctccttgctggtaagttctcttctacgctgtatgagactggtggctgtgatatgtcacttgtgaattttgaaccagcagcaagaagagcatccaatatctgtgacacagattctcatgtatccagttctacctcagttcgattttatccacatgatgtggtaggtttttctttatttttacaacatgataaattttcagattaaatctgaaatatgtatttacatagatagctataaaagccataaaaattgatgaagttacacaaaaattttttgaaaactatggcaaaatcactttgctgccctccagtggctctctttttctaagtcctttgataagaaacaaaagtacaaggttaagaaaccctggcatagagtattttaaaaagtgttttggaaagtatttgtcaatgcttagagatagaaatggctgtgttatatataggaagtaaattttctcaactatacccagatatgtgtttgaaaagtaaaaccctccctactttttggctatagtgtattcctggaaactgcataggaaagcaaacatgggaagatgattgttttattgttttctacttttaaatggtatgggaaccttgagatagcaaaatgctgcctagtactatgccaaatacagtcaacttttgatgctttctgaggaaaagaaaactggtaaactgatggatggatgagttgaagttaaatatagtatagtaatttgtatagcctcaggtgagcagcttgccaaaacaaacaaacaaacaaacaaacaggggtgagggatttggaaatatagtaacaacaatgataagagactgtgggaagaaatgagagttgctgccatcagatccaatgcagtggggctcagatttaacactgataatgaggttcaaagcttaaggagaaaagactataaatgtgagaagagaagccactaacgattcacagtaagtggttttagtagattcgctagctatacagttataaaatcttaaggttttttcttaagcattccctgagaaaaatcttaagattttagacacttttctagtcaattatttacaataggtttattgattaattaactttgttttagttcacttcctattgtcaccttctatagtttctggtaatcataacatattcataaagagtaggctgggcgcagtggctcctgcctgtaatcccagcactttgagaggccgaggcgggtggatcacgaggtcaagagttcaagaccagcctggccaagatggtaaaatcccgtctctacaaaaaatagaaaaagaattagccgggcatggtggcaggtgcctgtaatcccagctcctctggaggctaaggcagaaaattncttgaaccgggacccaggaggcagaggttgcagtgggctgagatcacgccactgcactccagcctgggctacagagggagactctgtctcaaaacaaacaaaaaaagcgtagtgtgctaatgctaatgcacattgtgtttttgcaggatatgaatatagaatatgcgtgatttctggagtttgctacaatttgttaatgaatattctaaggcaaatccatcacatactttcaattgcaataaaatatgtatttttttctaaatcttatgtgtccttgcattcatttttcccactttctggttttccccctttgtaaagctctctctctctctctaaggtacctactgtcaacaacgggaagtggaggccattactgaaggtgtagaggaagatgaaggattttgctgttgtgaacctggccatattcctcacatgctttcatttaatgctgcatttagccagcgatggctagcttgggaagtgatagtcacaaagtacattctggagggttatagcatcactgataacagtgctgcttctatgcttcaagtctttgatcttcggaaagtactcaccacttactatgtcaagggtatcatttattatgttacgacctcgtctaagctagaggagtggctagctaatgagacaatgcaggaaggacttcgtctgtgtgctgatcgcaattatgtcgatgtggacccgacctttaatccaaacattgatgaagactatgaccaccgactggcaggcatatctagggagagtttctgtgtgatttacctcaactggatagagtactgctcttcccgaagagcaaagcctgtggatgtggacaaagattcatccctagtgactctctgttatggactctgtgttctgggacggagagctttggggactgcatcccatcatatgtccagtaatttagagtcattcctctatggattgcatgccctatttaaaggagatttccgtatttcttcaattcgagatgaatggatctttgctgacatggaattgctaagaaaagtagtagtccctgggatccgtatgtccattaaacttcatcaggatcattttacttctccagatgaatatgatgaccctactgtgctctatgaagccatagtatctcatgagaagaacctcgtaatagcccatgaaggggaccctgcatggcggagtgcagtacttgccaactctccctccttgcttgctctgcggcatgtcatggatgatggcaccaatgaatataaaatcatcatgctcaacagacgctacctgagcttcagggtcattaaagtgaataaggaatgtgtccgaggtctttgggcagggcaacagcaggagcttgtttttctacgtaaccgtaacccagagagaggtagcatccaaaatgcaaagcaagccctgagaaacatgataaactcatcttgtgatcaacctattggctacccaatctttgtctcacccctgacaacttcttactctgacagccacgaacagcttaaagacattcttgggggtcctatcagcttgggaaatatcaggaacttcatagtgtcaacctggcacaggcttaggaaaggttgcggagctggatgtaacagtggtggcaatattgaagattctgatactggaggtgggacttcctgcactggtaacaatgcaacaactgccaacaatccccacagcaacgtgacccagggaagcattggaaatcctgggcagggatcaggaactggactccacccacctgtcacatcttatcctccaacactaggcactagccacagctctcactctgtgcagtcgggcctggtcagacagtctcctgcccgggcctcagtagccagccagtcttcctactgctatagcagccggcattcatccctccggatgtccaccactgggtttgtgccttgtcggcgctcttctactagtcagatatcgcttcgaaacttgccatcatccatccaatcccgactgtcgatggtgaaccaaatggaaccctcaggtcagagcggcctggcctgtgtgcagcacggcctgccttcctccagcagctccagccaaagcatcccagcctgcaaacatcacactctcgtgggctttcttgcgacagagggaggtcagagcagtgccactgatgcacagccaggcaacaccttaagtcctgccaacaattcacactccagaaaggcagaagtgatttacagagtccaaattgtggatcccagtcaaattctggaagggatcaacctgtctaaaaggaaagagctacagtggcctgatgaaggaatccggttaaaagctgggagaaatagctggaaagactggagtccgcaggagggcatggaaggccatgtgattcaccgatgggtgccttgcagcagagatccaggtaccagatcccacatcgacaaggcagtgcttctggtccagattgatgataaatatgtgactgtaattgaaactggggtactagaacttggggctgaagtgtgagccagtgtttattataaagacatttctttttccctctcaattccaaggcattggaaaaagagaggaacaagcagaagatgcctgcaggtatcactttgatcctatgtgggagcgactgaaaatagaatgagcttggttaagcacctctcctttgcccttcaccctgactcctgtcactgtctccatccccaaataaagctgaaatatttttttaagttagctgccgagaaaacattttgcatgaaggataaagttctgttaaaatacatccttaaaaaaagtttttcctatgcattgcctatgctttaaatcaacaaactcttcatttctaaactatgatctcatatttttctaatttctttgccaaaaataattgccatgttttgtcatagaacatgaaattcatttaccttgatttttaagaacagaccagtgtagaaatgttccttttgacttatagcagtataaaagtttaatgtacagtgaaagagactatgaacagacatagatttatcttattccttgagcgctaaaaactttaataaaaaaaactgcactaattttttacagcaatgcactaaagtctgagatttctcagaacatttatttatatataaaaataaaataccattatttaaattgcctttgggattagccccttccctttccttataaacacaggtagcaggaactgtgctgctcatttttctgttagtagtgtgtacttcatgccaggacattgggtattttctttaaagtgaatatagaatctcaagatatacgtagcttcatcattgacatttcccagagccaatagtcagcggatcggtcttgtgaacaccactgccagctcctgtgtctacatctcagaggagcccatgtgctctgcttctctccaccagagcaagctctgctgggcgtgcttctgggaagaaaacaattttctttaagaagaagatgaatgtccaggaatttaaagaaaggatcgattgccttttatttatgagtttctagctcttgaagttattcacatgcagttcagttagtcaagtaaaattttttttcaaataaaagtatccaagtggtgcagttattattatatccctctttaataattttgctttttatttttcccctcttctttttctgttacttgaattttatttcctgtaatttatagtgtgtagctgtaaattgaaatatttataactgtgaaattgacttaattcatatgttgtctcataactttattttttttaaatgcatattcagggaaatatattactcatatttacaattgggcgatataggaacttcaatttagatttaatttgcaactcttagcattttttaaatccttgataaaattttcccttttggtgtgaaactccaaagaaaattgtacatctcctctgagcatttaggagcagccatctttctaccccttgtgaataaatcattgaaagaaacaggtaaaattaattttaatgatacattttgtttcacccagtatagtcaaagtattactatttcatcatatgtcactagccatatttcaagtactcaatagctacatgtacctagtggctactgtattagacagtacagatttaaagtatcttttgttgaggtgacagaagagagaagctgtttttcctaccaattctgatgtagatctcacattatagcataacattacagtagaaggaatgaaaactaagaaagtaaatagtgaacatacagaacttactgcatttccactttaaaacctatttattttccctttttctaattttaaacttttgtggtcattcagaacctaatgtgccttgtgttgacatttccatagacttcacactttacaaaatttactgtttaaaaatacttgtcaaatgatttactgaacctttatacaaaagtaccctttctaaattgaccatttaaaaatgtatttttgtgataccgtcattatgttctgcatttgcctcattttggcagatctacagtatgccattaaagtttagtgttgtttttggttttggagggtttttttctgaaactgaatttataatctatttctctgtatacgtatatttttaaaatcttctgaaaggaactatgttccctgctgcttcttccctttctgaagtgaatatgatcttttcatggtcattgcctagataaaagtagagccttttcaatcttagatggaagataattcattttcccacacagaaaaaaaatctgacctttacatgatttaatctgaagggctagaattttttaatttctagcccctcctccaaaaaaattttaaacacatcacatactctgaaaagtcagatttcaaatgcaagactagactttatatggaacatatatgttgggttttgattttgggtagcaattgacatatatttttctcaaaacaagttgaattttgttaacatatataattctttagtgaatttataaattaggacccctgagaagaagccctgttgtttttcttaagagtctaaaactgacaatcttttaaaaatcataatacttttctagtaattgcatcagggaattggtgataattgaagaaagatccatttcttaagaataatttgatctaaattattatatggaaataaacatacttgtgttaactaaattgatcataaattcttgttcctgcctcacccctcaccccccagagaatagtgagtgactcgtttagattctctgctttttttcagttatgtacaagacttcagcatacattaatgtctttagtttataaatttgccaatgctttaatttccataatttgaaagttaaaagatgtaactaaaatactagcttttttattcatttccttttggtggagttgtatgattgaaaactttgctttttcttgtttaattcttccgccaccccctcttttgagagaaaggtaatcgtggaatgagttataaattattgcctttttttcctttatttctttcattcagtggcaaaaaacattttataactcctaagtttttggttaatcttccaacttataccttggtgtgaactctctttttacaccattttcaacactggataaaactttaatgttgactttttgctaaagaactttaatttttccaagaatctagattaacataagatgttgatatttaaggaacttggaagagtaagtggtgaggctgtatgtatattttttaagagattaccttttaggaaattagtgaacaaacttaaccagtgttctgccttctttgactttgttactggaggatgataatctatttctattagattcgaagtattttggaaaatatttcaagtatatctgaactacttataattcttaaaacagaagtagtcagacaatatttgtatcctaagtgagatatggaaaattactctgtatactaaatgtcaggcaatgaaaatgtaagtttttgtgtagaaaacccattaagaagatgtgtttttctttctgaattagtttatttttccatcacataccaaaatataaaaatcagcctcacatttttcagcaagtttagcttatagccttgataaattcctctgtgcttctgagcagcatccttctgcctctgcttagcagctctgcatttggtggattgctgttgtgagtcattcatccagcactgggccttttaagctgaagattcacccagtgtctaaagttgtccttttcttatagctagctttcaagcatctttcctcctaaataaatatgtgacttgagaaaaaggtaataatgattttgtcagaattctttgaatttatatttactagctacttaaccataaactgctgtccgagattgttaatttcatttatatttattttaattaatttgtcatgaatatggacaaagccttttctggggtgtgtgtgtgtgtgtatgtttgttttttaagtcgtcattattcattcgtattctttttctgtgtaatgtaatcatataaagttactttggacagagacccagttaattttctcttttgataggatacatggtttagataaggtataaagtgtccctttttattctagaggcttttcctttaattcagagattagtggagataataacgtcagtcaaggctaatgtggtacatggaacttgctaatggaggttggacattctgtttcagtcttacatggatattgtttcattggtgttgaggaagaaaaaaattagatactaccatgcattgggacagcataattctaatattacattgaatatggctttttaaaaataagtattaaaaagccaatcgttttctccatttatctatcttttttgtttgtttttaatttggttgattgatatgcacccaggccgtcttatttttacttgttaaatgtctgtctaggaagaactgtgattggaaaggaattaattattatacaaataaatctggtaggatatgagtggagtaagtttgcttgaaacagaagtatattttctactttgaatcacctcaccagagtcatctgtcaagaattatgtataacaatttatctttattgcctacatacaacatactttttctgaattaagataacttctatttgtgagttgaacttcattatctgccattttgtggaatcaaccttacattctttggtggaactagagctgattgtcaccacaaggttatatgacaactctgttctaagacttatacctattatatagggttataccttttttcttatgcctcagctctgtacctgacaatttatgattcagtggagccaagctagaaggaacaaaggtcatctaacactgtgatggggatgaattcctgagttttacctgcacaatgaggtggtgccccggaattcacaacagagtagtgatagagcataagatggctgctccagatgactcttgggtttagtgtacttgtgattgaacaagattttttatctatgaagcttgattctacaaccaaaataatagaaatggggggggggggggaatcatgtctgcttatgctttttaaaagcttatagtttaagtaaaagtaaaatgtaaaaactgattaaacctatacaagtctggcaatgagctctgcatgaggaaatggaaggaggaatattgaaaatgattctaggaaagtgaacgtaagaaaggaaaatgggttttccttttctgatcatgggctctggaaagtattcatggcctttaccagcattcagtataaaccagagataaggacatatgtacttacgtgtgtctgtgagtgtgtgtgtgtctgagtgttattctgaacagcttgtaaatattgtagttgtttaaaatggaaaataaaagctgagttcttttggcaaatatattgcatcaaaaatacagtattgacagtggataaaacactgaggaaataaattttttttcattttg

SEQ ID NO: 453448 - DNA, 12146 bp, Homo sapiens
  misc_feature (4340)..(4340): n is a, c, g, or t
gaggaggagctggagggggcgcggcttcctctcggtcgctccctggcgccgggcctctttctctgcctggcccagggctggcggccggcgggggtcgcggcggcggcagtgggggcgctggcgggccgcgggtggcgggggccgggccgcggctccgggtgttaggagacaagatggcggcggctctcagaaggccggtctcctcctctccgccgtcctccgccccgccgctcgccgcctcctcctctcgggtctcctcctcctcgtttgctgcctcctcctcctcctgcagcagcaccagcgaccgccgaagcgccggctcgctcacccggagctccggaggtggatagacggggcagctgcaggctccggcgaccgaggccgagctggggccggggcggggacggcggcggcggcggcggcgacggcggcggcgccgggtggggatggggtcgcagacgctgcagatcctccgacagggggtgtgggccgcgctcagcgggggctggtactacgacccgcaccaggccaccttcgtgaacgcgctgcacctctacctgtggctctttctgctgggcctacccttcaccctctacatggcccttccttctaccatgattatagtagcagtttattgtcctgtgatagctgctgttttcattgttctgaagatggtcaactatcgactacacagagcacttgatgctggagaagttgtagataggactgcaaatgagttcacggatcagcgaaccaaagctgaacaaggcaactgttcaaccaggagaaaagacagcaatggaccgagtgatcctggtggagggattgaaatgtctgagttcatccgagaggccacacccccagttggttgcagttccagaaattcttatgccggtctagatccaagcaaccagattggatctggttcctcgcgtcttggaacagcagcaactattaaaggagatacagacactgctaagacttctgatgatatcagtttaagtctgggccaaagttctagtctttgtaaggaaggaagtgaagaacaagatttggcagctgatcggaagctctttcgtcttgtctccaatgactccttcatctctattcagccttccttatcctcttgtggacaggacttgccaagggacttcagtgacaaagtgaacctgccaagtcataaccaccaccaccatgttgatcagtctctgtccagcgcctgtgacacagaagtagcttctcttgtacctttacactcacactcttatagaaaagaccaccggccgcgaggtgtaccacggacttctagctctgctgtggcttttccagacacttcactgaatgattttcccctttatcagcaaagacgtggattagatccagttagtgagttagaatcttccaagcctctttctggatccaaagaatccttggtggaaaattctggtttatctggggaatttcagcttgctggtgacttgaaaatcaatacttctcagccacccacaaaaagtgggaagagcaaacctttgaaagcagagaaaagcatggacagcttgaggagcctgagcacacggagtagtgggtcaacagaaagctactgcagtggaacggaccgggacactaacagtactgtcagcagctataaaagtgagcagaccagctcaactcacatagagagcatcctgtcagagcatgaggagtctcctaaagcaggaacaaaaagtgggaggaagaaagagtgctgtgcaggcccagaggagaagaatagctgtgccagtgacaaaaggactagcagtgaaaagattgctatggaagcgagtaccaacagtggggttcacgaggccaaggaccccaccccctctgatgagatgcacaaccagagaggtctcagcacctctgcatctgaagaagccaataaaaatccccatgcaaatgaatttacttcccaaggggacagaccacctgggaacactgcagaaaacaaagaagagaagagtgataagtcagctgtttctgtggattccaaagtgcgtaaagatgttggtggaaagcaaaaggaaggggatgttcgacctaaatcttctagcgtaatccatcggacagcttctgcccacaagtcaggcaggagacgcacaggaaaaaaacgggctagcagttttgattcaagccggcatagggactatgtttgctttcgaggtgtttctggtaccaagccacacagtgctatattttgtcatgacgaagactctagtgatcagagtgacttgagtagagcatcaagtgttcagtctgctcaccagttcagcagtgatagctcttctagcaccacttctcattcctgtcagtctcctgagggcagatacagtgctctaaagaccaaacacactcataaagaaaggggcacagactctgaacacacacacaaagctcatttggttcctgaaggaaccagcaaaaagcgtgcaacacgacggacttctagcacaaatagtgccaagactcgtgcccgagtgttgagcctggacagtggcacagtagcatgtttgaatgactcaaacaggttaatggcacctgaaagtataaagcccttaaccacttcaaaatcagatcttgaggccaaagagggagaggtgctagatgagctatctttattaggacgggcttcccagttagagacagtcactcgatctaggaatagcttgccaaaccaggttgcatttcctgaaggggaagagcaagatgcagtcagtggagcagcacaagccagcgaggaggcagtgtcatttcgccgtgaacgcagcacatttaggcgccaggcagtacggcgccggcacaatgcagggagtaaccctacccctcctacattgctcatcggatcacccctaagccttcaagatggtcagcaaggccagcagtccacagcccaggtcaaagtccagtcccgccccccttcccaggctgcagtgctcagtgctagtgcctccttgctggtaagttctcttctacgctgtatgagactggtggctgtgatatgtcacttgtgaattttgaaccagcagcaagaagagcatccaatatctgtgacacagattctcatgtatccagttctacctcagttcgattttatccacatgatgtggtaggtttttctttatttttacaacatgataaattttcagattaaatctgaaatatgtatttacatagatagctataaaagccataaaaattgatgaagttacacaaaaattttttgaaaactatggcaaaatcactttgctgccctccagtggctctctttttctaagtcctttgataagaaacaaaagtacaaggttaagaaaccctggcatagagtattttaaaaagtgttttggaaagtatttgtcaatgcttagagatagaaatggctgtgttatatataggaagtaaattttctcaactatacccagatatgtgtttgaaaagtaaaaccctccctactttttggctatagtgtattcctggaaactgcataggaaagcaaacatgggaagatgattgttttattgttttctacttttaaatggtatgggaaccttgagatagcaaaatgctgcctagtactatgccaaatacagtcaacttttgatgctttctgaggaaaagaaaactggtaaactgatggatggatgagttgaagttaaatatagtatagtaatttgtatagcctcaggtgagcagcttgccaaaacaaacaaacaaacaaacaaacaggggtgagggatttggaaatatagtaacaacaatgataagagactgtgggaagaaatgagagttgctgccatcagatccaatgcagtggggctcagatttaacactgataatgaggttcaaagcttaaggagaaaagactataaatgtgagaagagaagccactaacgattcacagtaagtggttttagtagattcgctagctatacagttataaaatcttaaggttttttcttaagcattccctgagaaaaatcttaagattttagacacttttctagtcaattatttacaataggtttattgattaattaactttgttttagttcacttcctattgtcaccttctatagtttctggtaatcataacatattcataaagagtaggctgggcgcagtggctcctgcctgtaatcccagcactttgagaggccgaggcgggtggatcacgaggtcaagagttcaagaccagcctggccaagatggtaaaatcccgtctctacaaaaaatagaaaaagaattagccgggcatggtggcaggtgcctgtaatcccagctcctctggaggctaaggcagaaaattncttgaaccgggacccaggaggcagaggttgcagtgggctgagatcacgccactgcactccagcctgggctacagagggagactctgtctcaaaacaaacaaaaaaagcgtagtgtgctaatgctaatgcacattgtgtttttgcaggatatgaatatagaatatgcgtgatttctggagtttgctacaatttgttaatgaatattctaaggcaaatccatcacatactttcaattgcaataaaatatgtatttttttctaaatcttatgtgtccttgcattcatttttcccactttctggttttccccctttgtaaagctctctctctctctctaaggtacctactgtcaacaacgggaagtggaggccattactgaaggtgtagaggaagatgaaggattttgctgttgtgaacctggccatattcctcacatgctttcatttaatgctgcatttagccagcgatggctagcttgggaagtgatagtcacaaagtacattctggagggttatagcatcactgataacagtgctgcttctatgcttcaagtctttgatcttcggaaagtactcaccacttactatgtcaagggtatcatttattatgttacgacctcgtctaagctagaggagtggctagctaatgagacaatgcaggaaggacttcgtctgtgtgctgatcgcaattatgtcgatgtggacccgacctttaatccaaacattgatgaagactatgaccaccgactggcaggcatatctagggagagtttctgtgtgatttacctcaactggatagagtactgctcttcccgaagagcaaagcctgtggatgtggacaaagattcatccctagtgactctctgttatggactctgtgttctgggacggagagctttggggactgcatcccatcatatgtccagtaatttagagtcattcctctatggattgcatgccctatttaaaggagatttccgtatttcttcaattcgagatgaatggatctttgctgacatggaattgctaagaaaagtagtagtccctgggatccgtatgtccattaaacttcatcaggatcattttacttctccagatgaatatgatgaccctactgtgctctatgaagccatagtatctcatgagaagaacctcgtaatagcccatgaaggggaccctgcatggcggagtgcagtacttgccaactctccctccttgcttgctctgcggcatgtcatggatgatggcaccaatgaatataaaatcatcatgctcaacagacgctacctgagcttcagggtcattaaagtgaataaggaatgtgtccgaggtctttgggcagggcaacagcaggagcttgtttttctacgtaaccgtaacccagagagaggtagcatccaaaatgcaaagcaagccctgagaaacatgataaactcatcttgtgatcaacctattggctacccaatctttgtctcacccctgacaacttcttactctgacagccacgaacagcttaaagacattcttgggggtcctatcagcttgggaaatatcaggaacttcatagtgtcaacctggcacaggcttaggaaaggttgcggagctggatgtaacagtggtggcaatattgaagattctgatactggaggtgggacttcctgcactggtaacaatgcaacaactgccaacaatccccacagcaacgtgacccagggaagcattggaaatcctgggcagggatcaggaactggactccacccacctgtcacatcttatcctccaacactaggcactagccacagctctcactctgtgcagtcgggcctggtcagacagtctcctgcccgggcctcagtagccagccagtcttcctactgctatagcagccggcattcatccctccggatgtccaccactgggtttgtgccttgtcggcgctcttctactagtcagatatcgcttcgaaacttgccatcatccatccaatcccgactgtcgatggtgaaccaaatggaaccctcaggtcagagcggcctggcctgtgtgcagcacggcctgccttcctccagcagctccagccaaagcatcccagcctgcaaacatcacactctcgtgggctttcttgcgacagagggaggtcagagcagtgccactgatgcacagccaggcaacaccttaagtcctgccaacaattcacactccagaaaggcagaagtgatttacagagtccaaattgtggatcccagtcaaattctggaagggatcaacctgtctaaaaggaaagagctacagtggcctgatgaaggaatccggttaaaagctgggagaaatagctggaaagactggagtccgcaggagggcatggaaggccatgtgattcaccgatgggtgccttgcagcagagatccaggcattggaaaaagagaggaacaagcagaagatgcctgcaggtatcactttgatcctatgtgggagcgactgaaaatagaatgagcttggttaagcacctctcctttgcccttcaccctgactcctgtcactgtctccatccccaaataaagctgaaatatttttttaagttagctgccgagaaaacattttgcatgaaggataaagttctgttaaaatacatccttaaaaaaagtttttcctatgcattgcctatgctttaaatcaacaaactcttcatttctaaactatgatctcatatttttctaatttctttgccaaaaataattgccatgttttgtcatagaacatgaaattcatttaccttgatttttaagaacagaccagtgtagaaatgttccttttgacttatagcagtataaaagtttaatgtacagtgaaagagactatgaacagacatagatttatcttattccttgagcgctaaaaactttaataaaaaaaactgcactaattttttacagcaatgcactaaagtctgagatttctcagaacatttatttatatataaaaataaaataccattatttaaattgcctttgggattagccccttccctttccttataaacacaggtagcaggaactgtgctgctcatttttctgttagtagtgtgtacttcatgccaggacattgggtattttctttaaagtgaatatagaatctcaagatatacgtagcttcatcattgacatttcccagagccaatagtcagcggatcggtcttgtgaacaccactgccagctcctgtgtctacatctcagaggagcccatgtgctctgcttctctccaccagagcaagctctgctgggcgtgcttctgggaagaaaacaattttctttaagaagaagatgaatgtccaggaatttaaagaaaggatcgattgccttttatttatgagtttctagctcttgaagttattcacatgcagttcagttagtcaagtaaaattttttttcaaataaaagtatccaagtggtgcagttattattatatccctctttaataattttgctttttatttttcccctcttctttttctgttacttgaattttatttcctgtaatttatagtgtgtagctgtaaattgaaatatttataactgtgaaattgacttaattcatatgttgtctcataactttattttttttaaatgcatattcagggaaatatattactcatatttacaattgggcgatataggaacttcaatttagatttaatttgcaactcttagcattttttaaatccttgataaaattttcccttttggtgtgaaactccaaagaaaattgtacatctcctctgagcatttaggagcagccatctttctaccccttgtgaataaatcattgaaagaaacaggtaaaattaattttaatgatacattttgtttcacccagtatagtcaaagtattactatttcatcatatgtcactagccatatttcaagtactcaatagctacatgtacctagtggctactgtattagacagtacagatttaaagtatcttttgttgaggtgacagaagagagaagctgtttttcctaccaattctgatgtagatctcacattatagcataacattacagtagaaggaatgaaaactaagaaagtaaatagtgaacatacagaacttactgcatttccactttaaaacctatttattttccctttttctaattttaaacttttgtggtcattcagaacctaatgtgccttgtgttgacatttccatagacttcacactttacaaaatttactgtttaaaaatacttgtcaaatgatttactgaacctttatacaaaagtaccctttctaaattgaccatttaaaaatgtatttttgtgataccgtcattatgttctgcatttgcctcattttggcagatctacagtatgccattaaagtttagtgttgtttttggttttggagggtttttttctgaaactgaatttataatctatttctctgtatacgtatatttttaaaatcttctgaaaggaactatgttccctgctgcttcttccctttctgaagtgaatatgatcttttcatggtcattgcctagataaaagtagagccttttcaatcttagatggaagataattcattttcccacacagaaaaaaaatctgacctttacatgatttaatctgaagggctagaattttttaatttctagcccctcctccaaaaaaattttaaacacatcacatactctgaaaagtcagatttcaaatgcaagactagactttatatggaacatatatgttgggttttgattttgggtagcaattgacatatatttttctcaaaacaagttgaattttgttaacatatataattctttagtgaatttataaattaggacccctgagaagaagccctgttgtttttcttaagagtctaaaactgacaatcttttaaaaatcataatacttttctagtaattgcatcagggaattggtgataattgaagaaagatccatttcttaagaataatttgatctaaattattatatggaaataaacatacttgtgttaactaaattgatcataaattcttgttcctgcctcacccctcaccccccagagaatagtgagtgactcgtttagattctctgctttttttcagttatgtacaagacttcagcatacattaatgtctttagtttataaatttgccaatgctttaatttccataatttgaaagttaaaagatgtaactaaaatactagcttttttattcatttccttttggtggagttgtatgattgaaaactttgctttttcttgtttaattcttccgccaccccctcttttgagagaaaggtaatcgtggaatgagttataaattattgcctttttttcctttatttctttcattcagtggcaaaaaacattttataactcctaagtttttggttaatcttccaacttataccttggtgtgaactctctttttacaccattttcaacactggataaaactttaatgttgactttttgctaaagaactttaatttttccaagaatctagattaacataagatgttgatatttaaggaacttggaagagtaagtggtgaggctgtatgtatattttttaagagattaccttttaggaaattagtgaacaaacttaaccagtgttctgccttctttgactttgttactggaggatgataatctatttctattagattcgaagtattttggaaaatatttcaagtatatctgaactacttataattcttaaaacagaagtagtcagacaatatttgtatcctaagtgagatatggaaaattactctgtatactaaatgtcaggcaatgaaaatgtaagtttttgtgtagaaaacccattaagaagatgtgtttttctttctgaattagtttatttttccatcacataccaaaatataaaaatcagcctcacatttttcagcaagtttagcttatagccttgataaattcctctgtgcttctgagcagcatccttctgcctctgcttagcagctctgcatttggtggattgctgttgtgagtcattcatccagcactgggccttttaagctgaagattcacccagtgtctaaagttgtccttttcttatagctagctttcaagcatctttcctcctaaataaatatgtgacttgagaaaaaggtaataatgattttgtcagaattctttgaatttatatttactagctacttaaccataaactgctgtccgagattgttaatttcatttatatttattttaattaatttgtcatgaatatggacaaagccttttctggggtgtgtgtgtgtgtgtatgtttgttttttaagtcgtcattattcattcgtattctttttctgtgtaatgtaatcatataaagttactttggacagagacccagttaattttctcttttgataggatacatggtttagataaggtataaagtgtccctttttattctagaggcttttcctttaattcagagattagtggagataataacgtcagtcaaggctaatgtggtacatggaacttgctaatggaggttggacattctgtttcagtcttacatggatattgtttcattggtgttgaggaagaaaaaaattagatactaccatgcattgggacagcataattctaatattacattgaatatggctttttaaaaataagtattaaaaagccaatcgttttctccatttatctatcttttttgtttgtttttaatttggttgattgatatgcacccaggccgtcttatttttacttgttaaatgtctgtctaggaagaactgtgattggaaaggaattaattattatacaaataaatctggtaggatatgagtggagtaagtttgcttgaaacagaagtatattttctactttgaatcacctcaccagagtcatctgtcaagaattatgtataacaatttatctttattgcctacatacaacatactttttctgaattaagataacttctatttgtgagttgaacttcattatctgccattttgtggaatcaaccttacattctttggtggaactagagctgattgtcaccacaaggttatatgacaactctgttctaagacttatacctattatatagggttataccttttttcttatgcctcagctctgtacctgacaatttatgattcagtggagccaagctagaaggaacaaaggtcatctaacactgtgatggggatgaattcctgagttttacctgcacaatgaggtggtgccccggaattcacaacagagtagtgatagagcataagatggctgctccagatgactcttgggtttagtgtacttgtgattgaacaagattttttatctatgaagcttgattctacaaccaaaataatagaaatggggggggggggggaatcatgtctgcttatgctttttaaaagcttatagtttaagtaaaagtaaaatgtaaaaactgattaaacctatacaagtctggcaatgagctctgcatgaggaaatggaaggaggaatattgaaaatgattctaggaaagtgaacgtaagaaaggaaaatgggttttccttttctgatcatgggctctggaaagtattcatggcctttaccagcattcagtataaaccagagataaggacatatgtacttacgtgtgtctgtgagtgtgtgtgtgtctgagtgttattctgaacagcttgtaaatattgtagttgtttaaaatggaaaataaaagctgagttcttttggcaaatatattgcatcaaaaatacagtattgacagtggataaaacactgaggaaataaattttttttcattttg

SEQ ID NO: 453449 - DNA, 6132 bp, Homo sapiens
  misc_feature (4340)..(4340): n is a, c, g, or t
gaggaggagctggagggggcgcggcttcctctcggtcgctccctggcgccgggcctctttctctgcctggcccagggctggcggccggcgggggtcgcggcggcggcagtgggggcgctggcgggccgcgggtggcgggggccgggccgcggctccgggtgttaggagacaagatggcggcggctctcagaaggccggtctcctcctctccgccgtcctccgccccgccgctcgccgcctcctcctctcgggtctcctcctcctcgtttgctgcctcctcctcctcctgcagcagcaccagcgaccgccgaagcgccggctcgctcacccggagctccggaggtggatagacggggcagctgcaggctccggcgaccgaggccgagctggggccggggcggggacggcggcggcggcggcggcgacggcggcggcgccgggtggggatggggtcgcagacgctgcagatcctccgacagggggtgtgggccgcgctcagcgggggctggtactacgacccgcaccaggccaccttcgtgaacgcgctgcacctctacctgtggctctttctgctgggcctacccttcaccctctacatggcccttccttctaccatgattatagtagcagtttattgtcctgtgatagctgctgttttcattgttctgaagatggtcaactatcgactacacagagcacttgatgctggagaagttgtagataggactgcaaatgagttcacggatcagcgaaccaaagctgaacaaggcaactgttcaaccaggagaaaagacagcaatggaccgagtgatcctggtggagggattgaaatgtctgagttcatccgagaggccacacccccagttggttgcagttccagaaattcttatgccggtctagatccaagcaaccagattggatctggttcctcgcgtcttggaacagcagcaactattaaaggagatacagacactgctaagacttctgatgatatcagtttaagtctgggccaaagttctagtctttgtaaggaaggaagtgaagaacaagatttggcagctgatcggaagctctttcgtcttgtctccaatgactccttcatctctattcagccttccttatcctcttgtggacaggacttgccaagggacttcagtgacaaagtgaacctgccaagtcataaccaccaccaccatgttgatcagtctctgtccagcgcctgtgacacagaagtagcttctcttgtacctttacactcacactcttatagaaaagaccaccggccgcgaggtgtaccacggacttctagctctgctgtggcttttccagacacttcactgaatgattttcccctttatcagcaaagacgtggattagatccagttagtgagttagaatcttccaagcctctttctggatccaaagaatccttggtggaaaattctggtttatctggggaatttcagcttgctggtgacttgaaaatcaatacttctcagccacccacaaaaagtgggaagagcaaacctttgaaagcagagaaaagcatggacagcttgaggagcctgagcacacggagtagtgggtcaacagaaagctactgcagtggaacggaccgggacactaacagtactgtcagcagctataaaagtgagcagaccagctcaactcacatagagagcatcctgtcagagcatgaggagtctcctaaagcaggaacaaaaagtgggaggaagaaagagtgctgtgcaggcccagaggagaagaatagctgtgccagtgacaaaaggactagcagtgaaaagattgctatggaagcgagtaccaacagtggggttcacgaggccaaggaccccaccccctctgatgagatgcacaaccagagaggtctcagcacctctgcatctgaagaagccaataaaaatccccatgcaaatgaatttacttcccaaggggacagaccacctgggaacactgcagaaaacaaagaagagaagagtgataagtcagctgtttctgtggattccaaagtgcgtaaagatgttggtggaaagcaaaaggaaggggatgttcgacctaaatcttctagcgtaatccatcggacagcttctgcccacaagtcaggcaggagacgcacaggaaaaaaacgggctagcagttttgattcaagccggcatagggactatgtttgctttcgaggtgtttctggtaccaagccacacagtgctatattttgtcatgacgaagactctagtgatcagagtgacttgagtagagcatcaagtgttcagtctgctcaccagttcagcagtgatagctcttctagcaccacttctcattcctgtcagtctcctgagggcagatacagtgctctaaagaccaaacacactcataaagaaaggggcacagactctgaacacacacacaaagctcatttggttcctgaaggaaccagcaaaaagcgtgcaacacgacggacttctagcacaaatagtgccaagactcgtgcccgagtgttgagcctggacagtggcacagtagcatgtttgaatgactcaaacaggttaatggcacctgaaagtataaagcccttaaccacttcaaaatcagatcttgaggccaaagagggagaggtgctagatgagctatctttattaggacgggcttcccagttagagacagtcactcgatctaggaatagcttgccaaaccaggttgcatttcctgaaggggaagagcaagatgcagtcagtggagcagcacaagccagcgaggaggcagtgtcatttcgccgtgaacgcagcacatttaggcgccaggcagtacggcgccggcacaatgcagggagtaaccctacccctcctacattgctcatcggatcacccctaagccttcaagatggtcagcaaggccagcagtccacagcccaggtcaaagtccagtcccgccccccttcccaggctgcagtgctcagtgctagtgcctccttgctggtaagttctcttctacgctgtatgagactggtggctgtgatatgtcacttgtgaattttgaaccagcagcaagaagagcatccaatatctgtgacacagattctcatgtatccagttctacctcagttcgattttatccacatgatgtggtaggtttttctttatttttacaacatgataaattttcagattaaatctgaaatatgtatttacatagatagctataaaagccataaaaattgatgaagttacacaaaaattttttgaaaactatggcaaaatcactttgctgccctccagtggctctctttttctaagtcctttgataagaaacaaaagtacaaggttaagaaaccctggcatagagtattttaaaaagtgttttggaaagtatttgtcaatgcttagagatagaaatggctgtgttatatataggaagtaaattttctcaactatacccagatatgtgtttgaaaagtaaaaccctccctactttttggctatagtgtattcctggaaactgcataggaaagcaaacatgggaagatgattgttttattgttttctacttttaaatggtatgggaaccttgagatagcaaaatgctgcctagtactatgccaaatacagtcaacttttgatgctttctgaggaaaagaaaactggtaaactgatggatggatgagttgaagttaaatatagtatagtaatttgtatagcctcaggtgagcagcttgccaaaacaaacaaacaaacaaacaaacaggggtgagggatttggaaatatagtaacaacaatgataagagactgtgggaagaaatgagagttgctgccatcagatccaatgcagtggggctcagatttaacactgataatgaggttcaaagcttaaggagaaaagactataaatgtgagaagagaagccactaacgattcacagtaagtggttttagtagattcgctagctatacagttataaaatcttaaggttttttcttaagcattccctgagaaaaatcttaagattttagacacttttctagtcaattatttacaataggtttattgattaattaactttgttttagttcacttcctattgtcaccttctatagtttctggtaatcataacatattcataaagagtaggctgggcgcagtggctcctgcctgtaatcccagcactttgagaggccgaggcgggtggatcacgaggtcaagagttcaagaccagcctggccaagatggtaaaatcccgtctctacaaaaaatagaaaaagaattagccgggcatggtggcaggtgcctgtaatcccagctcctctggaggctaaggcagaaaattncttgaaccgggacccaggaggcagaggttgcagtgggctgagatcacgccactgcactccagcctgggctacagagggagactctgtctcaaaacaaacaaaaaaagcgtagtgtgctaatgctaatgcacattgtgtttttgcaggatatgaatatagaatatgcgtgatttctggagtttgctacaatttgttaatgaatattctaaggcaaatccatcacatactttcaattgcaataaaatatgtatttttttctaaatcttatgtgtccttgcattcatttttcccactttctggttttccccctttgtaaagctctctctctctctctaaggtacctactgtcaacaacgggaagtggaggccattactgaaggtgtagaggaagatgaaggattttgctgttgtgaacctggccatattcctcacatgctttcatttaatgctgcatttagccagcgatggctagcttgggaagtgatagtcacaaagtacattctggagggttatagcatcactgataacagtgctgcttctatgcttcaagtctttgatcttcggaaagtactcaccacttactatgtcaagggtatcatttattatgttacgacctcgtctaagctagaggagtggctagctaatgagacaatgcaggaaggacttcgtctgtgtgctgatcgcaattatgtcgatgtggacccgacctttaatccaaacattgatgaagactatgaccaccgactggcaggcatatctagggagagtttctgtgtgatttacctcaactggatagagtactgctcttcccgaagagcaaagcctgtggatgtggacaaagattcatccctagtgactctctgttatggactctgtgttctgggacggagagctttggggactgcatcccatcatatgtccagtaatttagagtcattcctctatggattgcatgccctatttaaaggagatttccgtatttcttcaattcgagatgaatggatctttgctgacatggaattgctaagaaaagtagtagtccctgggatccgtatgtccattaaacttcatcaggatcattttacttctccagatgaatatgatgaccctactgtgctctatgaagccatagtatctcatgagaagaacctcgtaatagcccatgaaggggaccctgcatggcggagtgcagtacttgccaactctccctccttgcttgctctgcggcatgtcatggatgatggcaccaatgaatataaaatcatcatgctcaacagacgctacctgagcttcagggtcattaaagtgaataaggaatgtgtccgaggtctttgggcagggcaacagcaggagcttgtttttctacgtaaccgtaacccagagagaggtagcatccaaaatgcaaagcaagccctgagaaacatgataaactcatcttgtgatcaacctattggctacccaatctttgtctcacccctgacaacttcttactctgacagccacgaacagcttaaagacattcttgggggtcctatcagcttgggaaatatcaggaacttcatagtgtcaacctggcacagcagatggacatggcctctaggaaggagatgcctcagaccccatatcccaggaggaaaaggaaactgcgcgttcaaggtggccaaagagtaactgatcctttcctctcccacactcaggcagtctttatgattcagtcaggcttcaaccatattccgagtatctgaactggaagcagggaggggcaggatgagaaccacagctggtagccaca

SEQ ID NO: 453450 - DNA, 1227 bp, Homo sapiens
gaggaggagctggagggggcgcggcttcctctcggtcgctccctggcgccgggcctctttctctgcctggcccagggctggcggccggcgggggtcgcggcggcggcagtgggggcgctggcgggccgcgggtggcgggggccgggccgcggctccgggtgttaggagacaagatggcggcggctctcagaaggccggtctcctcctctccgccgtcctccgccccgccgctcgccgcctcctcctctcgggtctcctcctcctcgtttgctgcctcctcctcctcctgcagcagcaccagcgaccgccgaagcgccggctcgctcacccggagctccggaggtggatagacggggcagctgcaggctccggcgaccgaggccgagctggggccggggcggggacggcggcggcggcggcggcgacggcggcggcgccgggtggggatggggtcgcagacgctgcagatcctccgacagggggtgtgggccgcgctcagcgggggctggtactacgacccgcaccaggccaccttcgtgaacgcgctgcacctctacctgtggctctttctgctgggcctacccttcaccctctacatggcccttccttctaccatgattatagtagcagtttattgtcctgtgatagctgctgttttcattgttctgaagatggtcaactatcgactacacagagcacttgatgctggagaagttgtagataggactgcaaatgagttcacggatcagcgaaccaaagctgaacaaggcaactgttcaaccaggagaaaagacagcaatggaccgagtgatcctggtggagggattgaaatgtctgagttcatccgagaggccacacccccagttggttgcagttccagaaattcttatgccggtctagatccaagcaaccagattggatctggttcctcgcgtcttggaacagcagcaactattaaaggagatacagacactgctaagacttctgatgatatcagtttaagtctgggccaaagttctagtctttgtaaggaaggaagtgaagaacaaggtaagaacgttatactttaccatgatgtcatatactgtggtgaccagagttaatttgtagaatatgctgcatacaatttggcagaagtttataacaatttaatatgatatttaaggaaacattaacataaaatgttatggtgatagtagtaatacagagttacacatgcttttagct

SEQ ID NO: 453451 - DNA, 220 bp, Homo sapiens
atatatatgtagaatattgagggggaataaaatactttttagtcagactaaaaagtgttttactatttatcattataaataattggaatttatttcattgagtaatctgagttaattgaaattgtaatttaatctgaattcttttttttttgtcttgttcatgttagggtatcatttattatgttacgacctcgtctaagctagaggagtggctagctaa

SEQ ID NO: 453452 - DNA, 344 bp, Homo sapiens
tcaaaaaaaaaaaaaaaaaaaagtgtatgagagaagaaaattaaagggcttagataactgataagctaattgagtaactgttgaattatgaagatattttattttgaataaacatattaaataaatattgaagatattttaagcctttcaatgctgactttcttttagctctctctcccacagattcgattgaatagactattgaccattgatacagatttgttggagcaacaggacattgatctaagccctgacttggcagctacttacggcccaacagaagaagctgcccaaaaggttaaacactattatcgcttttggatcctaccccagctgtggattgg

SEQ ID NO: 453453 - DNA, 11248 bp, Homo sapiens
gaggaggagctggagggggcgcggcttcctctcggtcgctccctggcgccgggcctctttctctgcctggcccagggctggcggccggcgggggtcgcggcggcggcagtgggggcgctggcgggccgcgggtggcgggggccgggccgcggctccgggtgttaggagacaagatggcggcggctctcagaaggccggtctcctcctctccgccgtcctccgccccgccgctcgccgcctcctcctctcgggtctcctcctcctcgtttgctgcctcctcctcctcctgcagcagcaccagcgaccgccgaagcgccggctcgctcacccggagctccggaggtggatagacggggcagctgcaggctccggcgaccgaggccgagctggggccggggcggggacggcggcggcggcggcggcgacggcggcggcgccgggtggggatggggtcgcagacgctgcagatcctccgacagggggtgtgggccgcgctcagcgggggctggtactacgacccgcaccaggccaccttcgtgaacgcgctgcacctctacctgtggctctttctgctgggcctacccttcaccctctacatggcccttccttctaccatgattatagtagcagtttattgtcctgtgatagctgctgttttcattgttctgaagatggtcaactatcgactacacagagcacttgatgctggagaagttgtagataggactgcaaatgagttcacggatcagcgaaccaaagctgaacaaggcaactgttcaaccaggagaaaagacagcaatggaccgagtgatcctggtggagggattgaaatgtctgagttcatccgagaggccacacccccagttggttgcagttccagaaattcttatgccggtctagatccaagcaaccagattggatctggttcctcgcgtcttggaacagcagcaactattaaaggagatacagacactgctaagacttctgatgatatcagtttaagtctgggccaaagttctagtctttgtaaggaaggaagtgaagaacaagatttggcagctgatcggaagctctttcgtcttgtctccaatgactccttcatctctattcagccttccttatcctcttgtggacaggacttgccaagggacttcagtgacaaagtgaacctgccaagtcataaccaccaccaccatgttgatcagtctctgtccagcgcctgtgacacagaagtagcttctcttgtacctttacactcacactcttatagaaaagaccaccggccgcgaggtgtaccacggacttctagctctgctgtggcttttccagacacttcactgaatgattttcccctttatcagcaaagacgtggattagatccagttagtgagttagaatcttccaagcctctttctggatccaaagaatccttggtggaaaattctggtttatctggggaatttcagcttgctggtgacttgaaaatcaatacttctcagccacccacaaaaagtgggaagagcaaacctttgaaagcagagaaaagcatggacagcttgaggagcctgagcacacggagtagtgggtcaacagaaagctactgcagtggaacggaccgggacactaacagtactgtcagcagctataaaagtgagcagaccagctcaactcacatagagagcatcctgtcagagcatgaggagtctcctaaagcaggaacaaaaagtgggaggaagaaagagtgctgtgcaggcccagaggagaagaatagctgtgccagtgacaaaaggactagcagtgaaaagattgctatggaagcgagtaccaacagtggggttcacgaggccaaggaccccaccccctctgatgagatgcacaaccagagaggtctcagcacctctgcatctgaagaagccaataaaaatccccatgcaaatgaatttacttcccaaggggacagaccacctgggaacactgcagaaaacaaagaagagaagagtgataagtcagctgtttctgtggattccaaagtgcgtaaagatgttggtggaaagcaaaaggaaggggatgttcgacctaaatcttctagcgtaatccatcggacagcttctgcccacaagtcaggcaggagacgcacaggaaaaaaacgggctagcagttttgattcaagccggcatagggactatgtttgctttcgaggtgtttctggtaccaagccacacagtgctatattttgtcatgacgaagactctagtgatcagagtgacttgagtagagcatcaagtgttcagtctgctcaccagttcagcagtgatagctcttctagcaccacttctcattcctgtcagtctcctgagggcagatacagtgctctaaagaccaaacacactcataaagaaaggggcacagactctgaacacacacacaaagctcatttggttcctgaaggaaccagcaaaaagcgtgcaacacgacggacttctagcacaaatagtgccaagactcgtgcccgagtgttgagcctggacagtggcacagtagcatgtttgaatgactcaaacaggttaatggcacctgaaagtataaagcccttaaccacttcaaaatcagatcttgaggccaaagagggagaggtgctagatgagctatctttattaggacgggcttcccagttagagacagtcactcgatctaggaatagcttgccaaaccaggttgcatttcctgaaggggaagagcaagatgcagtcagtggagcagcacaagccagcgaggaggcagtgtcatttcgccgtgaacgcagcacatttaggcgccaggcagtacggcgccggcacaatgcagggagtaaccctacccctcctacattgctcatcggatcacccctaagccttcaagatggtcagcaaggccagcagtccacagcccaggtcaaagtccagtcccgccccccttcccaggctgcagtgctcagtgctagtgcctccttgctggtgagaaatgggagtgtccacttagaagcatcacatgacaatgcatctgctgtaggcggtagcagtttgcacgatgaacttggtaagttctcttctacgctgtatgagactggtggctgtgatatgtcacttgtgaattttgaaccagcagcaagaagagcatccaatatctgtgacacagattctcatgtatccagttctacctcagttcgattttatccacatgatgtgctctctctcccacagattcgattgaatagactattgaccattgatacagatttgttggagcaacaggacattgatctaagccctgacttggcagctacttacggcccaacagaagaagctgcccaaaaggttaaacactattatcgcttttggatcctaccccagctgtggattggcattaactttgacagactcacacttttggccctgtttgatagaaatcgtgagatcctggaaaatgtgttagctgtcatcctggctattctcgtggcctttttgggatctattcttctcatacaaggattcttcagagatatctgggtcttccagttctgcctcgtcatagccagctgtcaatactcactgcttaagagtgttcaaccagattcttcttctcccagacatggtcataatcgtatcattgcctacagtagaccagtttatttctgcatatgttgcggtcttatttggctcttggattatggtagcagaaacctgactgcaaccaagttcaaattatatggaataactttcaccaatccactggtgtttatatcagccagggatttagttatagtgtttacactctgtttcccaatagtgtttttcattggtctcctgcctcaggtgaatacatttgtaatgtacctttgtgaacaattggatattcatatttttggtggtaatgccactacaagcctgcttgcagcactttacagttttatctgtagcattgttgcagtagccttattgtatggattatgttatggggctttaaaggattcttgggatggccagcatattccagtacttttctccattttttgtggtttattagtggcagtgtcttaccatctcagccgacaaagcagtgatccatctgtacttttctctttagtgcaatccaagatttttccaaaaacggaagagaaaaatccagaagaccctctatctgaagtaaaagatccactgcctgaaaaacttagaaattctgttagtgagcgattacagtctgacctggtagtatgcattgtaattggtgtgctgtattttgctattcatgtaagcacagtcttcacagtattgcagcctgccctcaagtatgtgttgtatacattggttggctttgtgggttttgtaacccattatgtgctgcctcaagttagaaaacagctaccatggcactgtttctctcatcctctgctaaagacactagagtataatcagtatgaagttcgaaatgcagccactatgatgtggtttgagaaacttcatgtgtggcttctttttgtggagaagaatataatctatccattgattgttctcaatgaactgagcagcagtgcagagacaattgctagtccaaagaaactgaatacagaattaggtgctttaatgatcactgttgctggtttgaagttgctacgatcctcttttagcagccctacatatcagtatgttacagtcatctttactgtgctgtttttcaaatttgactatgaagctttttcagagaccatgctgttggatctcttctttatgtccatactcttcaacaagctttgggaactactttataaattgcagtttgtgtatacctatattgccccatggcagatcacatggggttctgctttccatgcttttgctcagccttttgcagtgcctcattcagccatgctgtttattcaggctgctgtctcggccttcttctctactccactgaacccctttctgggaagtgcaatattcatcacttcatatgtccgacctgtgaaattctgggagagagactataacacaaaacgagtggatcattcaaataccagattggcttcccagcttgatagaaatccaggatcagatgacaacaatctgaattccatcttttatgagcatttaactagatccctacagcacagcctctgtggtgatttgctactaggacggtggggaaactacagtacaggggactgtttcatccttgcctctgactatctcaatgcattagtacaccttatagagataggcaatggtctggtcacttttcagctgcggggacttgaattcagaggtacctactgtcaacaacgggaagtggaggccattactgaaggtgtagaggaagatgaaggattttgctgttgtgaacctggccatattcctcacatgctttcatttaatgctgcatttagccagcgatggctagcttgggaagtgatagtcacaaagtacattctggagggttatagcatcactgataacagtgctgcttctatgcttcaagtctttgatcttcggaaagtactcaccacttactatgtcaagggtatcatttattatgttacgacctcgtctaagctagaggagtggctagctaatgagacaatgcaggaaggacttcgtctgtgtgctgatcgcaattatgtcgatgtggacccgacctttaatccaaacattgatgaagactatgaccaccgactggcaggcatatctagggagagtttctgtgtgatttacctcaactggatagagtactgctcttcccgaagagcaaagcctgtggatgtggacaaagattcatccctagtgactctctgttatggactctgtgttctgggacggagagctttggggactgcatcccatcatatgtccagtaatttagagtcattcctctatggattgcatgccctatttaaaggagatttccgtatttcttcaattcgagatgaatggatctttgctgacatggaattgctaagaaaagtagtagtccctgggatccgtatgtccattaaacttcatcaggatcattttacttctccagatgaatatgatgaccctactgtgctctatgaagccatagtatctcatgagaagaacctcgtaatagcccatgaaggggaccctgcatggcggagtgcagtacttgccaactctccctccttgcttgctctgcggcatgtcatggatgatggcaccaatgaatataaaatcatcatgctcaacagacgctacctgagcttcagggtcattaaagtgaataaggaatgtgtccgaggtctttgggcagggcaacagcaggagcttgtttttctacgtaaccgtaacccagagagaggtagcatccaaaatgcaaagcaagccctgagaaacatgataaactcatcttgtgatcaacctattggctacccaatctttgtctcacccctgacaacttcttactctgacagccacgaacagcttaaagacattcttgggggtcctatcagcttgggaaatatcaggaacttcatagtgtcaacctggcacaggcttaggaaaggttgcggagctggatgtaacagtggtggcaatattgaagattctgatactggaggtgggacttcctgcactggtaacaatgcaacaactgccaacaatccccacagcaacgtgacccagggaagcattggaaatcctgggcagggatcaggaactggactccacccacctgtcacatcttatcctccaacactaggcactagccacagctctcactctgtgcagtcgggcctggtcagacagtctcctgcccgggcctcagtagccagccagtcttcctactgctatagcagccggcattcatccctccggatgtccaccactgggtttgtgccttgtcggcgctcttctactagtcagatatcgcttcgaaacttgccatcatccatccaatcccgactgtcgatggtgaaccaaatggaaccctcaggtcagagcggcctggcctgtgtgcagcacggcctgccttcctccagcagctccagccaaagcatcccagcctgcaaacatcacactctcgtgggctttcttgcgacagagggaggtcagagcagtgccactgatgcacagccaggcaacaccttaagtcctgccaacaattcacactccagaaaggcagaagtgatttacagagtccaaattgtggatcccagtcaaattctggaagggatcaacctgtctaaaaggaaagagctacagtggcctgatgaaggaatccggttaaaagctgggagaaatagctggaaagactggagtccgcaggagggcatggaaggccatgtgattcaccgatgggtgccttgcagcagagatccaggtaccagatcccacatcgacaaggcagtgcttctggtccagattgatgataaatatgtgactgtaattgaaactggggtactagaacttggggctgaagtgtgagccagtgtttattataaagacatttctttttccctctcaattccaaggcattggaaaaagagaggaacaagcagaagatgcctgcaggtatcactttgatcctatgtgggagcgactgaaaatagaatgagcttggttaagcacctctcctttgcccttcaccctgactcctgtcactgtctccatccccaaataaagctgaaatatttttttaagttagctgccgagaaaacattttgcatgaaggataaagttctgttaaaatacatccttaaaaaaagtttttcctatgcattgcctatgctttaaatcaacaaactcttcatttctaaactatgatctcatatttttctaatttctttgccaaaaataattgccatgttttgtcatagaacatgaaattcatttaccttgatttttaagaacagaccagtgtagaaatgttccttttgacttatagcagtataaaagtttaatgtacagtgaaagagactatgaacagacatagatttatcttattccttgagcgctaaaaactttaataaaaaaaactgcactaattttttacagcaatgcactaaagtctgagatttctcagaacatttatttatatataaaaataaaataccattatttaaattgcctttgggattagccccttccctttccttataaacacaggtagcaggaactgtgctgctcatttttctgttagtagtgtgtacttcatgccaggacattgggtattttctttaaagtgaatatagaatctcaagatatacgtagcttcatcattgacatttcccagagccaatagtcagcggatcggtcttgtgaacaccactgccagctcctgtgtctacatctcagaggagcccatgtgctctgcttctctccaccagagcaagctctgctgggcgtgcttctgggaagaaaacaattttctttaagaagaagatgaatgtccaggaatttaaagaaaggatcgattgccttttatttatgagtttctagctcttgaagttattcacatgcagttcagttagtcaagtaaaattttttttcaaataaaagtatccaagtggtgcagttattattatatccctctttaataattttgctttttatttttcccctcttctttttctgttacttgaattttatttcctgtaatttatagtgtgtagctgtaaattgaaatatttataactgtgaaattgacttaattcatatgttgtctcataactttattttttttaaatgcatattcagggaaatatattactcatatttacaattgggcgatataggaacttcaatttagatttaatttgcaactcttagcattttttaaatccttgataaaattttcccttttggtgtgaaactccaaagaaaattgtacatctcctctgagcatttaggagcagccatctttctaccccttgtgaataaatcattgaaagaaacaggtaaaattaattttaatgatacattttgtttcacccagtatagtcaaagtattactatttcatcatatgtcactagccatatttcaagtactcaatagctacatgtacctagtggctactgtattagacagtacagatttaaagtatcttttgttgaggtgacagaagagagaagctgtttttcctaccaattctgatgtagatctcacattatagcataacattacagtagaaggaatgaaaactaagaaagtaaatagtgaacatacagaacttactgcatttccactttaaaacctatttattttccctttttctaattttaaacttttgtggtcattcagaacctaatgtgccttgtgttgacatttccatagacttcacactttacaaaatttactgtttaaaaatacttgtcaaatgatttactgaacctttatacaaaagtaccctttctaaattgaccatttaaaaatgtatttttgtgataccgtcattatgttctgcatttgcctcattttggcagatctacagtatgccattaaagtttagtgttgtttttggttttggagggtttttttctgaaactgaatttataatctatttctctgtatacgtatatttttaaaatcttctgaaaggaactatgttccctgctgcttcttccctttctgaagtgaatatgatcttttcatggtcattgcctagataaaagtagagccttttcaatcttagatggaagataattcattttcccacacagaaaaaaaatctgacctttacatgatttaatctgaagggctagaattttttaatttctagcccctcctccaaaaaaattttaaacacatcacatactctgaaaagtcagatttcaaatgcaagactagactttatatggaacatatatgttgggttttgattttgggtagcaattgacatatatttttctcaaaacaagttgaattttgttaacatatataattctttagtgaatttataaattaggacccctgagaagaagccctgttgtttttcttaagagtctaaaactgacaatcttttaaaaatcataatacttttctagtaattgcatcagggaattggtgataattgaagaaagatccatttcttaagaataatttgatctaaattattatatggaaataaacatacttgtgttaactaaattgatcataaattcttgttcctgcctcacccctcaccccccagagaatagtgagtgactcgtttagattctctgctttttttcagttatgtacaagacttcagcatacattaatgtctttagtttataaatttgccaatgctttaatttccataatttgaaagttaaaagatgtaactaaaatactagcttttttattcatttccttttggtggagttgtatgattgaaaactttgctttttcttgtttaattcttccgccaccccctcttttgagagaaaggtaatcgtggaatgagttataaattattgcctttttttcctttatttctttcattcagtggcaaaaaacattttataactcctaagtttttggttaatcttccaacttataccttggtgtgaactctctttttacaccattttcaacactggataaaactttaatgttgactttttgctaaagaactttaatttttccaagaatctagattaacataagatgttgatatttaaggaacttggaagagtaagtggtgaggctgtatgtatattttttaagagattaccttttaggaaattagtgaacaaacttaaccagtgttctgccttctttgactttgttactggaggatgataatctatttctattagattcgaagtattttggaaaatatttcaagtatatctgaactacttataattcttaaaacagaagtagtcagacaatatttgtatcctaagtgagatatggaaaattactctgtatactaaatgtcaggcaatgaaaatgtaagtttttgtgtagaaaacccattaagaagatgtgtttttctttctgaattagtttatttttccatcacataccaaaatataaaaatcagcctcacatttttcagcaagtttagcttatagccttgataaattcctctgtgcttctgagcagcatccttctgcctctgcttagcagctctgcatttggtggattgctgttgtgagtcattcatccagcactgggccttttaagctgaagattcacccagtgtctaaagttgtccttttcttatagctagctttcaagcatctttcctcctaaataaatatgtgacttgaga

SEQ ID NO: 453454 - DNA, 7745 bp, Homo sapiens
gaggaggagctggagggggcgcggcttcctctcggtcgctccctggcgccgggcctctttctctgcctggcccagggctggcggccggcgggggtcgcggcggcggcagtgggggcgctggcgggccgcgggtggcgggggccgggccgcggctccgggtgttaggagacaagatggcggcggctctcagaaggccggtctcctcctctccgccgtcctccgccccgccgctcgccgcctcctcctctcgggtctcctcctcctcgtttgctgcctcctcctcctcctgcagcagcaccagcgaccgccgaagcgccggctcgctcacccggagctccggaggtggatagacggggcagctgcaggctccggcgaccgaggccgagctggggccggggcggggacggcggcggcggcggcggcgacggcggcggcgccgggtggggatggggtcgcagacgctgcagatcctccgacagggggtgtgggccgcgctcagcgggggctggtactacgacccgcaccaggccaccttcgtgaacgcgctgcacctctacctgtggctctttctgctgggcctacccttcaccctctacatggcccttccttctaccatgattatagtagcagtttattgtcctgtgatagctgctgttttcattgttctgaagatggtcaactatcgactacacagagcacttgatgctggagaagttgtagataggactgcaaatgagttcacggatcagcgaaccaaagctgaacaaggcaactgttcaaccaggagaaaagacagcaatggaccgagtgatcctggtggagggattgaaatgtctgagttcatccgagaggccacacccccagttggttgcagttccagaaattcttatgccggtctagatccaagcaaccagattggatctggttcctcgcgtcttggaacagcagcaactattaaaggagatacagacactgctaagacttctgatgatatcagtttaagtctgggccaaagttctagtctttgtaaggaaggaagtgaagaacaagatttggcagctgatcggaagctctttcgtcttgtctccaatgactccttcatctctattcagccttccttatcctcttgtggacaggacttgccaagggacttcagtgacaaagtgaacctgccaagtcataaccaccaccaccatgttgatcagtctctgtccagcgcctgtgacacagaagtagcttctcttgtacctttacactcacactcttatagaaaagaccaccggccgcgaggtgtaccacggacttctagctctgctgtggcttttccagacacttcactgaatgattttcccctttatcagcaaagacgtggattagatccagttagtgagttagaatcttccaagcctctttctggatccaaagaatccttggtggaaaattctggtttatctggggaatttcagcttgctggtgacttgaaaatcaatacttctcagccacccacaaaaagtgggaagagcaaacctttgaaagcagagaaaagcatggacagcttgaggagcctgagcacacggagtagtgggtcaacagaaagctactgcagtggaacggaccgggacactaacagtactgtcagcagctataaaagtgagcagaccagctcaactcacatagagagcatcctgtcagagcatgaggagtctcctaaagcaggaacaaaaagtgggaggaagaaagagtgctgtgcaggcccagaggagaagaatagctgtgccagtgacaaaaggactagcagtgaaaagattgctatggaagcgagtaccaacagtggggttcacgaggccaaggaccccaccccctctgatgagatgcacaaccagagaggtctcagcacctctgcatctgaagaagccaataaaaatccccatgcaaatgaatttacttcccaaggggacagaccacctgggaacactgcagaaaacaaagaagagaagagtgataagtcagctgtttctgtggattccaaagtgcgtaaagatgttggtggaaagcaaaaggaaggggatgttcgacctaaatcttctagcgtaatccatcggacagcttctgcccacaagtcaggcaggagacgcacaggaaaaaaacgggctagcagttttgattcaagccggcatagggactatgtttgctttcgaggtgtttctggtaccaagccacacagtgctatattttgtcatgacgaagactctagtgatcagagtgacttgagtagagcatcaagtgttcagtctgctcaccagttcagcagtgatagctcttctagcaccacttctcattcctgtcagtctcctgagggcagatacagtgctctaaagaccaaacacactcataaagaaaggggcacagactctgaacacacacacaaagctcatttggttcctgaaggaaccagcaaaaagcgtgcaacacgacggacttctagcacaaatagtgccaagactcgtgcccgagtgttgagcctggacagtggcacagtagcatgtttgaatgactcaaacaggttaatggcacctgaaagtataaagcccttaaccacttcaaaatcagatcttgaggccaaagagggagaggtgctagatgagctatctttattaggacgggcttcccagttagagacagtcactcgatctaggaatagcttgccaaaccaggttgcatttcctgaaggggaagagcaagatgcagtcagtggagcagcacaagccagcgaggaggcagtgtcatttcgccgtgaacgcagcacatttaggcgccaggcagtacggcgccggcacaatgcagggagtaaccctacccctcctacattgctcatcggatcacccctaagccttcaagatggtcagcaaggccagcagtccacagcccaggtcaaagtccagtcccgccccccttcccaggctgcagtgctcagtgctagtgcctccttgctggtgagaaatgggagtgtccacttagaagcatcacatgacaatgcatctgctgtaggcggtagcagtttgcacgatgaacttggtaagttctcttctacgctgtatgagactggtggctgtgatatgtcacttgtgaattttgaaccagcagcaagaagagcatccaatatctgtgacacagattctcatgtatccagttctacctcagttcgattttatccacatgatgtgctctctctcccacagattcgattgaatagactattgaccattgatacagatttgttggagcaacaggacattgatctaagccctgacttggcagctacttacggcccaacagaagaagctgcccaaaaggttaaacactattatcgcttttggatcctaccccagctgtggattggcattaactttgacagactcacacttttggccctgtttgatagaaatcgtgagatcctggaaaatgtgttagctgtcatcctggctattctcgtggcctttttgggatctattcttctcatacaaggattcttcagagatatctgggtcttccagttctgcctcgtcatagccagctgtcaatactcactgcttaagagtgttcaaccagattcttcttctcccagacatggtcataatcgtatcattgcctacagtagaccagtttatttctgcatatgttgcggtcttatttggctcttggattatggtagcagaaacctgactgcaaccaagttcaaattatatggaataactttcaccaatccactggtgtttatatcagccagggatttagttatagtgtttacactctgtttcccaatagtgtttttcattggtctcctgcctcaggtgaatacatttgtaatgtacctttgtgaacaattggatattcatatttttggtggtaatgccactacaagcctgcttgcagcactttacagttttatctgtagcattgttgcagtagccttattgtatggattatgttatggggctttaaaggattcttgggatggccagcatattccagtacttttctccattttttgtggtttattagtggcagtgtcttaccatctcagccgacaaagcagtgatccatctgtacttttctctttagtgcaatccaagatttttccaaaaacggaagagaaaaatccagaagaccctctatctgaagtaaaagatccactgcctgaaaaacttagaaattctgttagtgagcgattacagtctgacctggtagtatgcattgtaattggtgtgctgtattttgctattcatgtaagcacagtcttcacagtattgcagcctgccctcaagtatgtgttgtatacattggttggctttgtgggttttgtaacccattatgtgctgcctcaagttagaaaacagctaccatggcactgtttctctcatcctctgctaaagacactagagtataatcagtatgaagttcgaaatgcagccactatgatgtggtttgagaaacttcatgtgtggcttctttttgtggagaagaatataatctatccattgattgttctcaatgaactgagcagcagtgcagagacaattgctagtccaaagaaactgaatacagaattaggtgctttaatgatcactgttgctggtttgaagttgctacgatcctcttttagcagccctacatatcagtatgttacagtcatctttactgtgctgtttttcaaatttgactatgaagctttttcagagaccatgctgttggatctcttctttatgtccatactcttcaacaagctttgggaactactttataaattgcagtttgtgtatacctatattgccccatggcagatcacatggggttctgctttccatgcttttgctcagccttttgcagtgcctcattcagccatgctgtttattcaggctgctgtctcggccttcttctctactccactgaacccctttctgggaagtgcaatattcatcacttcatatgtccgacctgtgaaattctgggagagagactataacacaaaacgagtggatcattcaaataccagattggcttcccagcttgatagaaatccaggatcagatgacaacaatctgaattccatcttttatgagcatttaactagatccctacagcacagcctctgtggtgatttgctactaggacggtggggaaactacagtacaggggactgtttcatccttgcctctgactatctcaatgcattagtacaccttatagagataggcaatggtctggtcacttttcagctgcggggacttgaattcagaggtacctactgtcaacaacgggaagtggaggccattactgaaggtgtagaggaagatgaaggattttgctgttgtgaacctggccatattcctcacatgctttcatttaatgctgcatttagccagcgatggctagcttgggaagtgatagtcacaaagtacattctggagggttatagcatcactgataacagtgctgcttctatgcttcaagtctttgatcttcggaaagtactcaccacttactatgtcaagggtatcatttattatgttacgacctcgtctaagctagaggagtggctagctaatgagacaatgcaggaaggacttcgtctgtgtgctgatcgcaattatgtcgatgtggacccgacctttaatccaaacattgatgaagactatgaccaccgactggcaggcatatctagggagagtttctgtgtgatttacctcaactggatagagtactgctcttcccgaagagcaaagcctgtggatgtggacaaagattcatccctagtgactctctgttatggactctgtgttctgggacggagagctttggggactgcatcccatcatatgtccagtaatttagagtcattcctctatggattgcatgccctatttaaaggagatttccgtatttcttcaattcgagatgaatggatctttgctgacatggaattgctaagaaaagtagtagtccctgggatccgtatgtccattaaacttcatcaggatcattttacttctccagatgaatatgatgaccctactgtgctctatgaagccatagtatctcatgagaagaacctcgtaatagcccatgaaggggaccctgcatggcggagtgcagtacttgccaactctccctccttgcttgctctgcggcatgtcatggatgatggcaccaatgaatataaaatcatcatgctcaacagacgctacctgagcttcagggtcattaaagtgaataaggaatgtgtccgaggtctttgggcagggcaacagcaggagcttgtttttctacgtaaccgtaacccagagagaggtagcatccaaaatgcaaagcaagccctgagaaacatgataaactcatcttgtgatcaacctattggctacccaatctttgtctcacccctgacaacttcttactctgacagccacgaacagcttaaagacattcttgggggtcctatcagcttgggaaatatcaggaacttcatagtgtcaacctggcacaggcttaggaaaggttgcggagctggatgtaacagtggtggcaatattgaagattctgatactggaggtgggacttcctgcactggtaacaatgcaacaactgccaacaatccccacagcaacgtgacccagggaagcattggaaatcctgggcagggatcaggaactggactccacccacctgtcacatcttatcctccaacactaggcactagccacagctctcactctgtgcagtcgggcctggtcagacagtctcctgcccgggcctcagtagccagccagtcttcctactgctatagcagccggcattcatccctccggatgtccaccactgggtttgtgccttgtcggcgctcttctactagtcagatatcgcttcgaaacttgccatcatccatccaatcccgactgtcgatggtgaaccaaatggaaccctcaggtcagagcggcctggcctgtgtgcagcacggcctgccttcctccagcagctccagccaaagcatcccagcctgcaaacatcacactctcgtgggctttcttgcgacagagggaggtcagagcagtgccactgatgcacagccaggcaacaccttaagtcctgccaacaattcacactccagaaaggcagaagtgatttacagagtccaaattgtggatcccagtcaaattctggaagggatcaacctgtctaaaaggaaagagctacagtggcctgatgaaggaatccggttaaaagctgggagaaatagctggaaagactggagtccgcaggagggcatggaaggccatgtgattcaccgatgggtgccttgcagcagagatccaggtaccagatcccacatcgacaaggcagtgcttctggtccagattgatgataaatatgtgactgtaattgaaactggggtactagaacttggggctgaagtgtgagccagtgtttattataaagacatttctttttccctctcaattccaaggcattggaaaaagagaggaacaagcagaagatgcctgcaggtatcactttgatcctatgtgggagcgactgaaaatagaatgagcttggttaagcacctctcctttgcccttcaccctgactcctgtcactgtctccatccccaaataaagctgaaatatttttttaagttagctgccgagaaaacattttgcatgaaggataaagttctgttaaaatacatcctt

SEQ ID NO: 453455 - DNA, 3399 bp, Homo sapiens
cctttgtttcctcttaattttattgttgatagtctatacaactctttctgaggccagttgaagaactcaaagatttggaagttcagttcatttcgtgagtagaatgctttctttgtgcagctgtgaaacagaaagcagctctttggagaactacttgagaaattatttatacttgatttactgtatgcagtgaattctttccattgttaaacagtagaaaagcagatcatacatttattttaacatttcaaaatatgtgtttgaaacagatttggcagctgatcggaagctctttcgtcttgtctccaatgactccttcatctctattcagccttccttatcctcttgtggacaggacttgccaagggacttcagtgacaaagtgaacctgccaagtcataaccaccaccaccatgttgatcagtctctgtccagcgcctgtgacacagaagtagcttctcttgtacctttacactcacactcttatagaaaagaccaccggccgcgaggtgtaccacggacttctagctctgctgtggcttttccagacacttcactgaatgattttcccctttatcagcaaagacgtggattagatccagttagtgagttagaatcttccaagcctctttctggatccaaagaatccttggtggaaaattctggtttatctggggaatttcagcttgctggtgacttgaaaatcaatacttctcagccacccacaaaaagtgggaagagcaaacctttgaaagcagagaaaagcatggacagcttgaggagcctgagcacacggagtagtgggtcaacagaaagctactgcagtggaacggaccgggacactaacagtactgtcagcagctataaaagtgagcagaccagctcaactcacatagagagcatcctgtcagagcatgaggagtctcctaaagcaggaacaaaaagtgggaggaagaaagagtgctgtgcaggcccagaggagaagaatagctgtgccagtgacaaaaggactagcagtgaaaagattgctatggaagcgagtaccaacagtggggttcacgaggccaaggaccccaccccctctgatgagatgcacaaccagagaggtctcagcacctctgcatctgaagaagccaataaaaatccccatgcaaatgaatttacttcccaaggggacagaccacctgggaacactgcagaaaacaaagaagagaagagtgataagtcagctgtttctgtggattccaaagtgcgtaaagatgttggtggaaagcaaaaggaaggggatgttcgacctaaatcttctagcgtaatccatcggacagcttctgcccacaagtcaggcaggagacgcacaggaaaaaaacgggctagcagttttgattcaagccggcatagggactatgtttgctttcgaggtgtttctggtaccaagccacacagtgctatattttgtcatgacgaagactctagtgatcagagtgacttgagtagagcatcaagtgttcagtctgctcaccagttcagcagtgatagctcttctagcaccacttctcattcctgtcagtctcctgagggcagatacagtgctctaaagaccaaacacactcataaagaaaggggcacagactctgaacacacacacaaagctcatttggttcctgaaggaaccagcaaaaagcgtgcaacacgacggacttctagcacaaatagtgccaagactcgtgcccgagtgttgagcctggacagtggcacagtagcatgtttgaatgactcaaacaggttaatggcacctgaaagtataaagcccttaaccacttcaaaatcagatcttgaggccaaagagggagaggtgctagatgagctatctttattaggacgggcttcccagttagagacagtcactcgatctaggaatagcttgccaaaccaggttgcatttcctgaaggggaagagcaagatgcagtcagtggagcagcacaagccagcgaggaggcagtgtcatttcgccgtgaacgcagcacatttaggcgccaggcagtacggcgccggcacaatgcagggagtaaccctacccctcctacattgctcatcggatcacccctaagccttcaagatggtcagcaaggccagcagtccacagcccaggtcaaagtccagtcccgccccccttcccaggctgcagtgctcagtgctagtgcctccttgctggtgagaaatgggagtgtccacttagaagcatcacatgacaatgcatctgctgtaggcggtagcagtttgcacgatgaacttggtaagttctcttctacgctgtatgagactggtggctgtgatatgtcacttgtgaattttgaaccagcagcaagaagagcatccaatatctgtgacacagattctcatgtatccagttctacctcagttcgattttatccacatgatgtgctctctctcccacagattcgattgaatagactattgaccattgatacagatttgttggagcaacaggacattgatctaagccctgacttggcagctacttacggcccaacagaagaagctgcccaaaaggttaaacactattatcgcttttggatcctaccccagctgtggattggcattaactttgacagactcacacttttggccctgtttgatagaaatcgtgagatcctggaaaatgtgttagctgtcatcctggctattctcgtggcctttttgggatctattcttctcatacaaggattcttcagagatatctgggtcttccagttctgcctcgtcatagccagctgtcaatactcactgcttaagagtgttcaaccagattcttcttctcccagacatggtcataatcgtatcattgcctacagtagaccagtttatttctgcatatgttgcggtcttatttggctcttggattatggtagcagaaacctgactgcaaccaagttcaaattatatggaataactttcaccaatccactggtgtttatatcagccagggatttagttataggtgaatacatttgtaatgtacctttgtgaacaattggatattcatatttttggtggtaatggtgagtacttctttataaaaattatagattacagtattacctttatagatcatgaagtaataaactgaccattaaaatgcttttccagttttcacttcaggcttgaaattagaaaaaaaaaagacattaagtgattgaagactgagaagcaattaatttgtggataggaaaaaatagtcaagtctgctactttagagaaagagccaggtataatgaagcagatgtttaagaagttataaaataatgtctgcaactaaaagttctagtgaatttacatggagcctacatatacttaagaggtattcataaaagatcatc

SEQ ID NO: 453456 - DNA, 12870 bp, Homo sapiens
gaggaggagctggagggggcgcggcttcctctcggtcgctccctggcgccgggcctctttctctgcctggcccagggctggcggccggcgggggtcgcggcggcggcagtgggggcgctggcgggccgcgggtggcgggggccgggccgcggctccgggtgttaggagacaagatggcggcggctctcagaaggccggtctcctcctctccgccgtcctccgccccgccgctcgccgcctcctcctctcgggtctcctcctcctcgtttgctgcctcctcctcctcctgcagcagcaccagcgaccgccgaagcgccggctcgctcacccggagctccggaggtggatagacggggcagctgcaggctccggcgaccgaggccgagctggggccggggcggggacggcggcggcggcggcggcgacggcggcggcgccgggtggggatggggtcgcagacgctgcagatcctccgacagggggtgtgggccgcgctcagcgggggctggtactacgacccgcaccaggccaccttcgtgaacgcgctgcacctctacctgtggctctttctgctgggcctacccttcaccctctacatggcccttccttctaccatgattatagtagcagtttattgtcctgtgatagctgctgttttcattgttctgaagatggtcaactatcgactacacagagcacttgatgctggagaagttgtagataggactgcaaatgagttcacggatcagcgaaccaaagctgaacaaggcaactgttcaaccaggagaaaagacagcaatggaccgagtgatcctggtggagggattgaaatgtctgagttcatccgagaggccacacccccagttggttgcagttccagaaattcttatgccggtctagatccaagcaaccagattggatctggttcctcgcgtcttggaacagcagcaactattaaaggagatacagacactgctaagacttctgatgatatcagtttaagtctgggccaaagttctagtctttgtaaggaaggaagtgaagaacaagatttggcagctgatcggaagctctttcgtcttgtctccaatgactccttcatctctattcagccttccttatcctcttgtggacaggacttgccaagggacttcagtgacaaagtgaacctgccaagtcataaccaccaccaccatgttgatcagtctctgtccagcgcctgtgacacagaagtagcttctcttgtacctttacactcacactcttatagaaaagaccaccggccgcgaggtgtaccacggacttctagctctgctgtggcttttccagacacttcactgaatgattttcccctttatcagcaaagacgtggattagatccagttagtgagttagaatcttccaagcctctttctggatccaaagaatccttggtggaaaattctggtttatctggggaatttcagcttgctggtgacttgaaaatcaatacttctcagccacccacaaaaagtgggaagagcaaacctttgaaagcagagaaaagcatggacagcttgaggagcctgagcacacggagtagtgggtcaacagaaagctactgcagtggaacggaccgggacactaacagtactgtcagcagctataaaagtgagcagaccagctcaactcacatagagagcatcctgtcagagcatgaggagtctcctaaagcaggaacaaaaagtgggaggaagaaagagtgctgtgcaggcccagaggagaagaatagctgtgccagtgacaaaaggactagcagtgaaaagattgctatggaagcgagtaccaacagtggggttcacgaggccaaggaccccaccccctctgatgagatgcacaaccagagaggtctcagcacctctgcatctgaagaagccaataaaaatccccatgcaaatgaatttacttcccaaggggacagaccacctgggaacactgcagaaaacaaagaagagaagagtgataagtcagctgtttctgtggattccaaagtgcgtaaagatgttggtggaaagcaaaaggaaggggatgttcgacctaaatcttctagcgtaatccatcggacagcttctgcccacaagtcaggcaggagacgcacaggaaaaaaacgggctagcagttttgattcaagccggcatagggactatgtttgctttcgaggtgtttctggtaccaagccacacagtgctatattttgtcatgacgaagactctagtgatcagagtgacttgagtagagcatcaagtgttcagtctgctcaccagttcagcagtgatagctcttctagcaccacttctcattcctgtcagtctcctgagggcagatacagtgctctaaagaccaaacacactcataaagaaaggggcacagactctgaacacacacacaaagctcatttggttcctgaaggaaccagcaaaaagcgtgcaacacgacggacttctagcacaaatagtgccaagactcgtgcccgagtgttgagcctggacagtggcacagtagcatgtttgaatgactcaaacaggttaatggcacctgaaagtataaagcccttaaccacttcaaaatcagatcttgaggccaaagagggagaggtgctagatgagctatctttattaggacgggcttcccagttagagacagtcactcgatctaggaatagcttgccaaaccaggttgcatttcctgaaggggaagagcaagatgcagtcagtggagcagcacaagccagcgaggaggcagtgtcatttcgccgtgaacgcagcacatttaggcgccaggcagtacggcgccggcacaatgcagggagtaaccctacccctcctacattgctcatcggatcacccctaagccttcaagatggtcagcaaggccagcagtccacagcccaggtcaaagtccagtcccgccccccttcccaggctgcagtgctcagtgctagtgcctccttgctggtgagaaatgggagtgtccacttagaagcatcacatgacaatgcatctgctgtaggcggtagcagtttgcacgatgaacttggtaagttctcttctacgctgtatgagactggtggctgtgatatgtcacttgtgaattttgaaccagcagcaagaagagcatccaatatctgtgacacagattctcatgtatccagttctacctcagttcgattttatccacatgatgtgctctctctcccacagattcgattgaatagactattgaccattgatacagatttgttggagcaacaggacattgatctaagccctgacttggcagctacttacggcccaacagaagaagctgcccaaaaggttaaacactattatcgcttttggatcctaccccagctgtggattggcattaactttgacagactcacacttttggccctgtttgatagaaatcgtgagatcctggaaaatgtgttagctgtcatcctggctattctcgtggcctttttgggatctattcttctcatacaaggattcttcagagatatctgggtcttccagttctgcctcgtcatagccagctgtcaatactcactgcttaagagtgttcaaccagattcttcttctcccagacatggtcataatcgtatcattgcctacagtagaccagtttatttctgcatatgttgcggtcttatttggctcttggattatggtagcagaaacctgactgcaaccaagttcaaattatatggaataactttcaccaatccactggtgtttatatcagccagggatttagttatagtgtttacactctgtttcccaatagtgtttttcattggtctcctgcctcaggtgaatacatttgtaatgtacctttgtgaacaattggatattcatatttttggtggtaatgccactacaagcctgcttgcagcactttacagttttatctgtagcattgttgcagtagccttattgtatggattatgttatggggctttaaaggattcttgggatggccagcatattccagtacttttctccattttttgtggtttattagtggcagtgtcttaccatctcagccgacaaagcagtgatccatctgtacttttctctttagtgcaatccaagatttttccaaaaacggaagagaaaaatccagaagaccctctatctgaagtaaaagatccactgcctgaaaaacttagaaattctgttagtgagcgattacagtctgacctggtagtatgcattgtaattggtgtgctgtattttgctattcatgtaagcacagtcttcacagtattgcagcctgccctcaagtatgtgttgtatacattggttggctttgtgggttttgtaacccattatgtgctgcctcaagttagaaaacagctaccatggcactgtttctctcatcctctgctaaagacactagagtataatcagtatgaagttcgaaatgcagccactatgatgtggtttgagaaacttcatgtgtggcttctttttgtggagaagaatataatctatccattgattgttctcaatgaactgagcagcagtgcagagacaattgctagtccaaagaaactgaatacagaattaggtgctttaatgatcactgttgctggtttgaagttgctacgatcctcttttagcagccctacatatcagtatgttacagtcatctttactgtgctgtttttcaaatttgactatgaagctttttcagagaccatgctgttggatctcttctttatgtccatactcttcaacaagctttgggaactactttataaattgcagtttgtgtatacctatattgccccatggcagatcacatggggttctgctttccatgcttttgctcagccttttgcagtgcctcattcagccatgctgtttattcaggctgctgtctcggccttcttctctactccactgaacccctttctgggaagtgcaatattcatcacttcatatgtccgacctgtgaaattctgggagagagactataacacaaaacgagtggatcattcaaataccagattggcttcccagcttgatagaaatccaggatcagatgacaacaatctgaattccatcttttatgagcatttaactagatccctacagcacagcctctgtggtgatttgctactaggacggtggggaaactacagtacaggggactgtttcatccttgcctctgactatctcaatgcattagtacaccttatagagataggcaatggtctggtcacttttcagctgcggggacttgaattcagaggtacctactgtcaacaacgggaagtggaggccattactgaaggtgtagaggaagatgaaggattttgctgttgtgaacctggccatattcctcacatgctttcatttaatgctgcatttagccagcgatggctagcttgggaagtgatagtcacaaagtacattctggagggttatagcatcactgataacagtgctgcttctatgcttcaagtctttgatcttcggaaagtactcaccacttactatgtcaagggtatcatttattatgttacgacctcgtctaagctagaggagtggctagctaatgagacaatgcaggaaggacttcgtctgtgtgctgatcgcaattatgtcgatgtggacccgacctttaatccaaacattgatgaagactatgaccaccgactggcaggcatatctagggagagtttctgtgtgatttacctcaactggatagagtactgctcttcccgaagagcaaagcctgtggatgtggacaaagattcatccctagtgactctctgttatggactctgtgttctgggacggagagctttggggactgcatcccatcatatgtccagtaatttagagtcattcctctatggattgcatgccctatttaaaggagatttccgtatttcttcaattcgagatgaatggatctttgctgacatggaattgctaagaaaagtagtagtccctgggatccgtatgtccattaaacttcatcaggatcattttacttctccagatgaatatgatgaccctactgtgctctatgaagccatagtatctcatgagaagaacctcgtaatagcccatgaaggggaccctgcatggcggagtgcagtacttgccaactctccctccttgcttgctctgcggcatgtcatggatgatggcaccaatgaatataaaatcatcatgctcaacagacgctacctgagcttcagggtcattaaagtgaataaggaatgtgtccgaggtctttgggcagggcaacagcaggagcttgtttttctacgtaaccgtaacccagagagaggtagcatccaaaatgcaaagcaagccctgagaaacatgataaactcatcttgtgatcaacctattggctacccaatctttgtctcacccctgacaacttcttactctgacagccacgaacagcttaaagacattcttgggggtcctatcagcttgggaaatatcaggaacttcatagtgtcaacctggcacaggcttaggaaaggttgcggagctggatgtaacagtggtggcaatattgaagattctgatactggaggtgggacttcctgcactggtaacaatgcaacaactgccaacaatccccacagcaacgtgacccagggaagcattggaaatcctgggcagggatcaggaactggactccacccacctgtcacatcttatcctccaacactaggcactagccacagctctcactctgtgcagtcgggcctggtcagacagtctcctgcccgggcctcagtagccagccagtcttcctactgctatagcagccggcattcatccctccggatgtccaccactgggtttgtgccttgtcggcgctcttctactagtcagatatcgcttcgaaacttgccatcatccatccaatcccgactgtcgatggtgaaccaaatggaaccctcaggtcagagcggcctggcctgtgtgcagcacggcctgccttcctccagcagctccagccaaagcatcccagcctgcaaacatcacactctcgtgggctttcttgcgacagagggaggtcagagcagtgccactgatgcacagccaggcaacaccttaagtcctgccaacaattcacactccagaaaggcagaagtgatttacagagtccaaattgtggatcccagtcaaattctggaagggatcaacctgtctaaaaggaaagagctacagtggcctgatgaaggaatccggttaaaagctgggagaaatagctggaaagactggagtccgcaggagggcatggaaggccatgtgattcaccgatgggtgccttgcagcagagatccaggtaccagatcccacatcgacaaggcagtgcttctggtccagattgatgataaatatgtgactgtaattgaaactggggtactagaacttggggctgaagtgtgagccagtgtttattataaagacatttctttttccctctcaattccaaggcattggaaaaagagaggaacaagcagaagatgcctgcaggtatcactttgatcctatgtgggagcgactgaaaatagaatgagcttggttaagcacctctcctttgcccttcaccctgactcctgtcactgtctccatccccaaataaagctgaaatatttttttaagttagctgccgagaaaacattttgcatgaaggataaagttctgttaaaatacatccttaaaaaaagtttttcctatgcattgcctatgctttaaatcaacaaactcttcatttctaaactatgatctcatatttttctaatttctttgccaaaaataattgccatgttttgtcatagaacatgaaattcatttaccttgatttttaagaacagaccagtgtagaaatgttccttttgacttatagcagtataaaagtttaatgtacagtgaaagagactatgaacagacatagatttatcttattccttgagcgctaaaaactttaataaaaaaaactgcactaattttttacagcaatgcactaaagtctgagatttctcagaacatttatttatatataaaaataaaataccattatttaaattgcctttgggattagccccttccctttccttataaacacaggtagcaggaactgtgctgctcatttttctgttagtagtgtgtacttcatgccaggacattgggtattttctttaaagtgaatatagaatctcaagatatacgtagcttcatcattgacatttcccagagccaatagtcagcggatcggtcttgtgaacaccactgccagctcctgtgtctacatctcagaggagcccatgtgctctgcttctctccaccagagcaagctctgctgggcgtgcttctgggaagaaaacaattttctttaagaagaagatgaatgtccaggaatttaaagaaaggatcgattgccttttatttatgagtttctagctcttgaagttattcacatgcagttcagttagtcaagtaaaattttttttcaaataaaagtatccaagtggtgcagttattattatatccctctttaataattttgctttttatttttcccctcttctttttctgttacttgaattttatttcctgtaatttatagtgtgtagctgtaaattgaaatatttataactgtgaaattgacttaattcatatgttgtctcataactttattttttttaaatgcatattcagggaaatatattactcatatttacaattgggcgatataggaacttcaatttagatttaatttgcaactcttagcattttttaaatccttgataaaattttcccttttggtgtgaaactccaaagaaaattgtacatctcctctgagcatttaggagcagccatctttctaccccttgtgaataaatcattgaaagaaacaggtaaaattaattttaatgatacattttgtttcacccagtatagtcaaagtattactatttcatcatatgtcactagccatatttcaagtactcaatagctacatgtacctagtggctactgtattagacagtacagatttaaagtatcttttgttgaggtgacagaagagagaagctgtttttcctaccaattctgatgtagatctcacattatagcataacattacagtagaaggaatgaaaactaagaaagtaaatagtgaacatacagaacttactgcatttccactttaaaacctatttattttccctttttctaattttaaacttttgtggtcattcagaacctaatgtgccttgtgttgacatttccatagacttcacactttacaaaatttactgtttaaaaatacttgtcaaatgatttactgaacctttatacaaaagtaccctttctaaattgaccatttaaaaatgtatttttgtgataccgtcattatgttctgcatttgcctcattttggcagatctacagtatgccattaaagtttagtgttgtttttggttttggagggtttttttctgaaactgaatttataatctatttctctgtatacgtatatttttaaaatcttctgaaaggaactatgttccctgctgcttcttccctttctgaagtgaatatgatcttttcatggtcattgcctagataaaagtagagccttttcaatcttagatggaagataattcattttcccacacagaaaaaaaatctgacctttacatgatttaatctgaagggctagaattttttaatttctagcccctcctccaaaaaaattttaaacacatcacatactctgaaaagtcagatttcaaatgcaagactagactttatatggaacatatatgttgggttttgattttgggtagcaattgacatatatttttctcaaaacaagttgaattttgttaacatatataattctttagtgaatttataaattaggacccctgagaagaagccctgttgtttttcttaagagtctaaaactgacaatcttttaaaaatcataatacttttctagtaattgcatcagggaattggtgataattgaagaaagatccatttcttaagaataatttgatctaaattattatatggaaataaacatacttgtgttaactaaattgatcataaattcttgttcctgcctcacccctcaccccccagagaatagtgagtgactcgtttagattctctgctttttttcagttatgtacaagacttcagcatacattaatgtctttagtttataaatttgccaatgctttaatttccataatttgaaagttaaaagatgtaactaaaatactagcttttttattcatttccttttggtggagttgtatgattgaaaactttgctttttcttgtttaattcttccgccaccccctcttttgagagaaaggtaatcgtggaatgagttataaattattgcctttttttcctttatttctttcattcagtggcaaaaaacattttataactcctaagtttttggttaatcttccaacttataccttggtgtgaactctctttttacaccattttcaacactggataaaactttaatgttgactttttgctaaagaactttaatttttccaagaatctagattaacataagatgttgatatttaaggaacttggaagagtaagtggtgaggctgtatgtatattttttaagagattaccttttaggaaattagtgaacaaacttaaccagtgttctgccttctttgactttgttactggaggatgataatctatttctattagattcgaagtattttggaaaatatttcaagtatatctgaactacttataattcttaaaacagaagtagtcagacaatatttgtatcctaagtgagatatggaaaattactctgtatactaaatgtcaggcaatgaaaatgtaagtttttgtgtagaaaacccattaagaagatgtgtttttctttctgaattagtttatttttccatcacataccaaaatataaaaatcagcctcacatttttcagcaagtttagcttatagccttgataaattcctctgtgcttctgagcagcatccttctgcctctgcttagcagctctgcatttggtggattgctgttgtgagtcattcatccagcactgggccttttaagctgaagattcacccagtgtctaaagttgtccttttcttatagctagctttcaagcatctttcctcctaaataaatatgtgacttgagaaaaaggtaataatgattttgtcagaattctttgaatttatatttactagctacttaaccataaactgctgtccgagattgttaatttcatttatatttattttaattaatttgtcatgaatatggacaaagccttttctggggtgtgtgtgtgtgtgtatgtttgttttttaagtcgtcattattcattcgtattctttttctgtgtaatgtaatcatataaagttactttggacagagacccagttaattttctcttttgataggatacatggtttagataaggtataaagtgtccctttttattctagaggcttttcctttaattcagagattagtggagataataacgtcagtcaaggctaatgtggtacatggaacttgctaatggaggttggacattctgtttcagtcttacatggatattgtttcattggtgttgaggaagaaaaaaattagatactaccatgcattgggacagcataattctaatattacattgaatatggctttttaaaaataagtattaaaaagccaatcgttttctccatttatctatcttttttgtttgtttttaatttggttgattgatatgcacccaggccgtcttatttttacttgttaaatgtctgtctaggaagaactgtgattggaaaggaattaattattatacaaataaatctggtaggatatgagtggagtaagtttgcttgaaacagaagtatattttctactttgaatcacctcaccagagtcatctgtcaagaattatgtataacaatttatctttattgcctacatacaacatactttttctgaattaagataacttctatttgtgagttgaacttcattatctgccattttgtggaatcaaccttacattctttggtggaactagagctgattgtcaccacaaggttatatgacaactctgttctaagacttatacctattatatagggttataccttttttcttatgcctcagctctgtacctgacaatttatgattcagtggagccaagctagaaggaacaaaggtcatctaacactgtgatggggatgaattcctgagttttacctgcacaatgaggtggtgccccggaattcacaacagagtagtgatagagcataagatggctgctccagatgactcttgggtttagtgtacttgtgattgaacaagattttttatctatgaagcttgattctacaaccaaaataatagaaatggggggggggggggaatcatgtctgcttatgctttttaaaagcttatagtttaagtaaaagtaaaatgtaaaaactgattaaacctatacaagtctggcaatgagctctgcatgaggaaatggaaggaggaatattgaaaatgattctaggaaagtgaacgtaagaaaggaaaatgggttttccttttctgatcatgggctctggaaagtattcatggcctttaccagcattcagtataaaccagagataaggacatatgtacttacgtgtgtctgtgagtgtgtgtgtgtctgagtgttattctgaacagcttgtaaatattgtagttgtttaaaatggaaaataaaagctgagttcttttggcaaatatattgcatcaaaaatacag

SEQ ID NO: 453457 - DNA, 2307 bp, Homo sapiens
ccctgccccgcgccgccaagcggttcccgccctcgcccagcgcccaggtagctgcgaggaaacttttgcagcggctgggtagcagcacgtctcttgctcctcagggccactgccaggcttgccgagtcctgggactgctctcgctccggctgccactctcccgcgctctcctagctccctgcgaagcaggatggccgggaccgtgcgcaccgcgtgcttggtggtggcgatgctgctcagcttggacttcccgggacaggcgcagcccccgccgccgccgccggacgccacctgtcaccaagtccgctccttcttccagagactgcagcccggactcaagtgggtgccagaaactcccgtgccaggatcagatttgcaagtatgtctccctaagggcccaacatgctgctcaagaaagatggaagaaaaataccaactaacagcacgattgaacatggaacagctgcttcagtctgcaagtatggagctcaagttcttaattattcagaatgctgcggttttccaagaggcctttgaaattgttgttcgccatgccaagaactacaccaatgccatgttcaagaacaactacccaagcctgactccacaagcttttgagtttgtgggtgaatttttcacagatgtgtctctctacatcttgggttctgacatcaatgtagatgacatggtcaatgaattgtttgacagcctgtttccagtcatctatacccagctaatgaacccaggcctgcctgattcagccttggacatcaatgagtgcctccgaggagcaagacgtgacctgaaagtatttgggaatttccccaagcttattatgacccaggtttccaagtcactgcaagtcactaggatcttccttcaggctctgaatcttggaattgaagtgatcaacacaactgatcacctgaagttcagtaaggactgtggccgaatgctcaccagaatgtggtactgctcttactgccagggactgatgatggttaaaccctgtggcggttactgcaatgtggtcatgcaaggctgtatggcaggtgtggtggagattgacaagtactggagagaatacattctgtcccttgaagaacttgtgaatggcatgtacagaatctatgacatggagaacgtactgcttggtctcttttcaacaatccatgattctatccagtatgtccagaagaatgcaggaaagctgaccaccactattggcaagttatgtgcccattctcaacaacgccaatatagatctgcttattatcctgaagatctctttattgacaagaaagtattaaaagttgctcatgtagaacatgaagaaaccttatccagccgaagaagggaactaattcagaagttgaagtctttcatcagcttctatagtgctttgcctggctacatctgcagccatagccctgtggcggaaaacgacaccctttgctggaatggacaagaactcgtggagagatacagccaaaaggcagcaaggaatggaatgaaaaaccagttcaatctccatgagctgaaaatgaagggccctgagccagtggtcagtcaaattattgacaaactgaagcacattaaccagctcctgagaaccatgtctatgcccaaaggtagagttctggataaaaacctggatgaggaagggtttgaaagtggagactgcggtgatgatgaagatgagtgcattggaggctctggtgatggaatgataaaagtgaagaatcagctccgcttccttgcagaactggcctatgatctggatgtggatgatgcgcctggaaacagtcagcaggcaactccgaaggacaacgagataagcacctttcacaacctcgggaacgttcattccccgctgaagcttctcaccagcatggccatctcggtggtgtgcttcttcttcctggtgcactgactgcctggtgcccagcacatgtgctgccctacagcaccctgtggtcttcctcgataaagggaaccactttcttatttttttctatttttttttttttgttatcctgtatacctcctccagccatgaagtagaggactaaccatgtgttatgttttcgaaaatcaaatggtatcttttggaggaagatacattttagtggtagcatatagattgtccttttgcaaagaaagaaaaaaaaccatcaagttgtgccaaattattctcctatgtttggctgctagaacatggttaccatgtctttctctctcactccctccctttctatcgttctctctttgcatggatttctttgaaaaaaaataaattgctcaaat

SEQ ID NO: 453458 - DNA, 2333 bp, Homo sapiens
ccctgccccgcgccgccaagcggttcccgccctcgcccagcgcccaggtagctgcgaggaaacttttgcagcggctgggtagcagcacgtctcttgctcctcagggccactgccaggcttgccgagtcctgggactgctctcgctccggctgccactctcccgcgctctcctagctccctgcgaagcaggatggccgggaccgtgcgcaccgcgtgcttggtggtggcgatgctgctcagcttggacttcccgggacaggcgcagcccccgccgccgccgccggacgccacctgtcaccaagtccgctccttcttccagagactgcagcccggactcaagtgggtgccagaaactcccgtgccaggatcagatttgcaagtatgtctccctaagggcccaacatgctgctcaagaaagatggaagaaaaataccaactaacagcacgattgaacatggaacagctgcttcagtctgcaagtatggagctcaagttcttaattattcagaatgctgcggttttccaagaggcctttgaaattgttgttcgccatgccaagaactacaccaatgccatgttcaagaacaactacccaagcctgactccacaagcttttgagtttgtgggtgaatttttcacagatgtgtctctctacatcttgggttctgacatcaatgtagatgacatggtcaatgaattgtttgacagcctgtttccagtcatctatacccagctaatgaacccaggcctgcctgattcagccttggacatcaatgagtgcctccgaggagcaagacgtgacctgaaagtatttgggaatttccccaagcttattatgacccaggtttccaagtcactgcaagtcactaggatcttccttcaggctctgaatcttggaattgaagtgatcaacacaactgatcacctgaagttcagtaaggactgtggccgaatgctcaccagaatgtggtactgctcttactgccagggactgatgatggttaaaccctgtggcggttactgcaatgtggtcatgcaaggctgtatggcaggtgtggtggagattgacaagtactggagagaatacattctgtcccttgaagaacttgtgaatggcatgtacagaatctatgacatggagaacgtactgcttggtctcttttcaacaatccatgattctatccagtatgtccagaagaatgcaggaaagctgaccaccactattggcaagttatgtgcccattctcaacaacgccaatatagatctgcttattatcctgaagatctctttattgacaagaaagtattaaaagttgctcatgtagaacatgaagaaaccttatccagccgaagaagggaactaattcagaagttgaagtctttcatcagcttctatagtgctttgcctggctacatctgcagccatagccctgtggcggaaaacgacaccctttgctggaatggacaagaactcgtggagagatacagccaaaaggcagcaaggaatggaatgaaaaaccagttcaatctccatgagctgaaaatgaagggccctgagccagtggtcagtcaaattattgacaaactgaagcacattaaccagctcctgagaaccatgtctatgcccaaaggtagagttctggataaaaacctggatgaggaagggtttgaaagtggagactgcggtgatgatgaagatgagtgcattggaggctctggtgatggaatgataaaagtgaagaatcagctccgcttccttgcagaactggcctatgatctggatgtggatgatgcgcctggaaacagtcagcaggcaactccgaaggacaacgagataagcacctttcacaacctcgggaacgttcattccccgctgaagcttctcaccagcatggccatctcggtggtgtgcttcttcttcctggtgcactgactgcctggtgcccagcacatgtgctgccctacagcaccctgtggtcttcctcgataaagggaaccactttcttatttttttctatttttttttttttgttatcctgtatacctcctccagccatgaagtagaggactaaccatgtgttatgttttcgaaaatcaaatggtatcttttggaggaagatacattttagtggtagcatatagattgtccttttgcaaagaaagaaaaaaaaccatcaagttgtgccaaattattctcctatgtttggctgctagaacatggttaccatgtctttctctctcactccctccctttctatcgttctctctttgcatggatttctttgaaaaaaaataaattgctcaaatatgtattggccctttttttgcaaacc

SEQ ID NO: 453459 - DNA, 2253 bp, Homo sapiens
ccctgccccgcgccgccaagcggttcccgccctcgcccagcgcccaggtagctgcgaggaaacttttgcagcggctgggtagcagcacgtctcttgctcctcagggccactgccaggcttgccgagtcctgggactgctctcgctccggctgccactctcccgcgctctcctagctccctgcgaagcaggatggccgggaccgtgcgcaccgcgtgcttggtggtggcgatgctgctcagcttggacttcccgggacaggcgcagcccccgccgccgccgccggacgccacctgtcaccaagtccgctccttcttccagagactgcagcccggactcaagtgggtgccagaaactcccgtgccaggatcagatttgcaagtatgtctccctaagggcccaacatgctgctcaagaaagatggaagatatggagctcaagttcttaattattcagaatgctgcggttttccaagaggcctttgaaattgttgttcgccatgccaagaactacaccaatgccatgttcaagaacaactacccaagcctgactccacaagcttttgagtttgtgggtgaatttttcacagatgtgtctctctacatcttgggttctgacatcaatgtagatgacatggtcaatgaattgtttgacagcctgtttccagtcatctatacccagctaatgaacccaggcctgcctgattcagccttggacatcaatgagtgcctccgaggagcaagacgtgacctgaaagtatttgggaatttccccaagcttattatgacccaggtttccaagtcactgcaagtcactaggatcttccttcaggctctgaatcttggaattgaagtgatcaacacaactgatcacctgaagttcagtaaggactgtggccgaatgctcaccagaatgtggtactgctcttactgccagggactgatgatggttaaaccctgtggcggttactgcaatgtggtcatgcaaggctgtatggcaggtgtggtggagattgacaagtactggagagaatacattctgtcccttgaagaacttgtgaatggcatgtacagaatctatgacatggagaacgtactgcttggtctcttttcaacaatccatgattctatccagtatgtccagaagaatgcaggaaagctgaccaccactattggcaagttatgtgcccattctcaacaacgccaatatagatctgcttattatcctgaagatctctttattgacaagaaagtattaaaagttgctcatgtagaacatgaagaaaccttatccagccgaagaagggaactaattcagaagttgaagtctttcatcagcttctatagtgctttgcctggctacatctgcagccatagccctgtggcggaaaacgacaccctttgctggaatggacaagaactcgtggagagatacagccaaaaggcagcaaggaatggaatgaaaaaccagttcaatctccatgagctgaaaatgaagggccctgagccagtggtcagtcaaattattgacaaactgaagcacattaaccagctcctgagaaccatgtctatgcccaaaggtagagttctggataaaaacctggatgaggaagggtttgaaagtggagactgcggtgatgatgaagatgagtgcattggaggctctggtgatggaatgataaaagtgaagaatcagctccgcttccttgcagaactggcctatgatctggatgtggatgatgcgcctggaaacagtcagcaggcaactccgaaggacaacgagataagcacctttcacaacctcgggaacgttcattccccgctgaagcttctcaccagcatggccatctcggtggtgtgcttcttcttcctggtgcactgactgcctggtgcccagcacatgtgctgccctacagcaccctgtggtcttcctcgataaagggaaccactttcttatttttttctatttttttttttttgttatcctgtatacctcctccagccatgaagtagaggactaaccatgtgttatgttttcgaaaatcaaatggtatcttttggaggaagatacattttagtggtagcatatagattgtccttttgcaaagaaagaaaaaaaaccatcaagttgtgccaaattattctcctatgtttggctgctagaacatggttaccatgtctttctctctcactccctccctttctatcgttctctctttgcatggatttctttgaaaaaaaataaattgctcaaat

SEQ ID NO: 453460 - DNA, 2286 bp, Homo sapiens
ccctgccccgcgccgccaagcggttcccgccctcgcccagcgcccaggtagctgcgaggaaacttttgcagcggctgggtagcagcacgtctcttgctcctcagggccactgccaggcttgccgagtcctgggactgctctcgctccggctgccactctcccgcgctctcctagctccctgcgaagcaggatggccgggaccgtgcgcaccgcgtgcttggtggtggcgatgctgctcagcttggacttcccgggacaggcgcagcccccgccgccgccgccggacgccacctgtcaccaagtccgctccttcttccagagactgcagcccggactcaagtgggtgccagaaactcccgtgccaggatcagatttgcaagtatgtctccctaagggcccaacatgctgctcaagaaagatggaagaaaaataccaactaacagcacgattgaacatggaacagctgcttcagtctgcaagtatggagctcaagttcttaattattcagaatgctgcggttttccaagaggcctttgaaattgttgttcgccatgccaagaactacaccaatgccatgttcaagaacaactacccaagcctgactccacaagcttttgagtttgtgggtgaatttttcacagatgtgtctctctacatcttgggttctgacatcaatgtagatgacatggtcaatgaattgtttgacagcctgtttccagtcatctatacccagctaatgaacccaggcctgcctgattcagccttggacatcaatgagtgcctccgaggagcaagacgtgacctgaaagtatttgggaatttccccaagcttattatgacccaggtttccaagtcactgcaagtcactaggatcttccttcaggctctgaatcttggaattgaagtgatcaacacaactgatcacctgaagttcagtaaggactgtggccgaatgctcaccagaatgtggtactgctcttactgccagggactgatgatggttaaaccctgtggcggttactgcaatgtggtcatgcaaggctgtatggcaggtgtggtggagattgacaagtactggagagaatacattctgtcccttgaagaacttgtgaatggcatgtacagaatctatgacatggagaacgtactgcttggtctcttttcaacaatccatgattctatccagtatgtccagaagaatgcaggaaagctgaccaccactattggcaagttatgtgcccattctcaacaacgccaatatagatctgcttattatcctgaagatctctttattgacaagaaagtattaaaagttgctcatgtagaacatgaagaaaccttatccagccgaagaagggaactaattcagaagttgaagtctttcatcagcttctatagtgctttgcctggctacatctgcagccatagccctgtggcggaaaacgacaccctttgctggaatggacaagaactcgtggagaggaatggaatgaaaaaccagttcaatctccatgagctgaaaatgaagggccctgagccagtggtcagtcaaattattgacaaactgaagcacattaaccagctcctgagaaccatgtctatgcccaaaggtagagttctggataaaaacctggatgaggaagggtttgaaagtggagactgcggtgatgatgaagatgagtgcattggaggctctggtgatggaatgataaaagtgaagaatcagctccgcttccttgcagaactggcctatgatctggatgtggatgatgcgcctggaaacagtcagcaggcaactccgaaggacaacgagataagcacctttcacaacctcgggaacgttcattccccgctgaagcttctcaccagcatggccatctcggtggtgtgcttcttcttcctggtgcactgactgcctggtgcccagcacatgtgctgccctacagcaccctgtggtcttcctcgataaagggaaccactttcttatttttttctatttttttttttttgttatcctgtatacctcctccagccatgaagtagaggactaaccatgtgttatgttttcgaaaatcaaatggtatcttttggaggaagatacattttagtggtagcatatagattgtccttttgcaaagaaagaaaaaaaaccatcaagttgtgccaaattattctcctatgtttggctgctagaacatggttaccatgtctttctctctcactccctccctttctatcgttctctctttgcatggatttctttgaaaaaaaataaattgctcaaat

SEQ ID NO: 453461 - DNA, 693 bp, Homo sapiens
gctttgccagtacatttgcagcgtcttcaatccctgagtggagagagaagggtttgaaagtggagactgcggtgatgatgaagatgagtgcattggaggctctggtgatggaatgataaaagtgaagaatcagctccgcttccttgcagaactggcctatgatctggatgtggatgatgcgcctggaaacagtcagcaggcaactccgaaggacaacgagataagcacctttcacaacctcgggaacgttcattccccgctgaagcttctcaccagcatggccatctcggtggtgtgcttcttcttcctggtgcactgactgcctggtgcccagcacatgtgctgccctacagcaccctgtggtcttcctcgataaagggaaccactttcttatttttttctatttttttttttttgttatcctgtatacctcctccagccatgaagtagaggactaaccatgtgttatgttttcgaaaatcaaatggtatcttttggaggaagatacattttagtggtagcatatagattgtccttttgcaaagaaagaaaaaaaaccatcaagttgtgccaaattattctcctatgtttggctgctagaacatggttaccatgtctttctctctcactccctccctttctatcgttctctctttgcatggatttctttgaaaaaaaataaattgctcaaat

SEQ ID NO: 453462 - DNA, 831 bp, Homo sapiens
aaccctgtctctactaaaaatacataaacttagccgggtgtgctggcacgtgcctgtagttccagctacttgggaggcagaggcaggagaatcgcttgaacccaggaggtggaggttgcagtgagccgagatcgcgccactgcactccagcctgggcgacagagcaagactccatctcgtctcttctctacaagagaagagacgagatgtacaaggaagagatgagtgcattggaggctctggtgatggaatgataaaagtgaagaatcagctccgcttccttgcagaactggcctatgatctggatgtggatgatgcgcctggaaacagtcagcaggcaactccgaaggacaacgagataagcacctttcacaacctcgggaacgttcattccccgctgaagcttctcaccagcatggccatctcggtggtgtgcttcttcttcctggtgcactgactgcctggtgcccagcacatgtgctgccctacagcaccctgtggtcttcctcgataaagggaaccactttcttatttttttctatttttttttttttgttatcctgtatacctcctccagccatgaagtagaggactaaccatgtgttatgttttcgaaaatcaaatggtatcttttggaggaagatacattttagtggtagcatatagattgtccttttgcaaagaaagaaaaaaaaccatcaagttgtgccaaattattctcctatgtttggctgctagaacatggttaccatgtctttctctctcactccctccctttctatcgttctctctttgcatggatttctttgaaaaaaaataaattgctcaaat

SEQ ID NO: 453463 - DNA, 1845 bp, Homo sapiens
ccctgccccgcgccgccaagcggttcccgccctcgcccagcgcccaggtagctgcgaggaaacttttgcagcggctgggtagcagcacgtctcttgctcctcagggccactgccaggcttgccgagtcctgggactgctctcgctccggctgccactctcccgcgctctcctagctccctgcgaagcaggatggccgggaccgtgcgcaccgcgtgcttggtggtggcgatgctgctcagcttggacttcccgggacaggcgcagcccccgccgccgccgccggacgccacctgtcaccaagtccgctccttcttccagagactgcagcccggactcaagtgggtgccagaaactcccgtgccaggatcagatttgcaagtatgtctccctaagggcccaacatgctgctcaagaaagatggaagaaaaataccaactaacagcacgattgaacatggaacagctgcttcagtctgcaagtatggagctcaagttcttaattattcagaatgctgcggttttccaagaggcctttgaaattgttgttcgccatgccaagaactacaccaatgccatgttcaagaacaactacccaagcctgactccacaagcttttgagtttgtgggtgaatttttcacagatgtgtctctctacatcttgggttctgacatcaatgtagatgacatggtcaatgaattgtttgacagcctgtttccagtcatctatacccagctaatgaacccaggcctgcctgattcagccttggacatcaatgagtgcctccgaggagcaagacgtgacctgaaagtatttgggaatttccccaagcttattatgacccaggtttccaagtcactgcaagtcactaggatcttccttcaggctctgaatcttggaattgaagtgatcaacacaactgatcacctgaagttcagtaaggactgtggccgaatgctcaccagaatgtggtactgctcttactgccagggactgatgatggttaaaccctgtggcggttactgcaatgtggtcatgcaaggctgtatggcaggtgtggtggagattgacaagtactggagagaatacattctgtcccttgaagaacttgtgaatggcatgtacagaatctatgacatggagaacgtactgcttggtctcttttcaacaatccatgattctatccagtatgtccagaagaatgcaggaaagctgaccaccactattggcaagttatgtgcccattctcaacaacgccaatatagatctgcttattatcctgaagatctctttattgacaagaaagtattaaaagttgctcatgtagaacatgaagaaaccttatccagccgaagaagggaactaattcagaagttgaagtctttcatcagcttctatagtgctttgcctggctacatctgcagccatagccctgtggcggaaaacgacaccctttgctggaatggacaagaactcgtggagagatacagccaaaaggcagcaaggaatggaatgaaaaaccagttcaatctccatgagctgaaaatgaagggccctgagccagtggtcagtcaaattattgacaaactgaagcacattaaccagctctgagacccatgtctaatgcccaagggtggagttcttgatcctgggataagaagggtgtgaagtggagactgcggtgatgatgcgttgcctgcctgggctatgaactggatgtggatgagcggctggaaccggtagcggcgacttcgagggcggccagggagggccgtgtgcaacgtggggaggttatggcgcggggaagtgggtcgcgagagggcgtggggagggccggttggtggggg

SEQ ID NO: 453464 - DNA, 2401 bp, Homo sapiens
ccctgccccgcgccgccaagcggttcccgccctcgcccagcgcccaggtagctgcgaggaaacttttgcagcggctgggtagcagcacgtctcttgctcctcagggccactgccaggcttgccgagtcctgggactgctctcgctccggctgccactctcccgcgctctcctagctccctgcgaagcaggatggccgggaccgtgcgcaccgcgtgcttggtggtggcgatgctgctcagcttggacttcccgggacaggcgcagcccccgccgccgccgccggacgccacctgtcaccaagtccgctccttcttccagagactgcagcccggactcaagtgggtgccagaaactcccgtgccaggatcagatttgcaagtatgtctccctaagggcccaacatgctgctcaagaaagatggaagaaaaataccaactaacagcacgattgaacatggaacagctgcttcagtctgcaagtatggagctcaagttcttaattattcagaatgctgcggttttccaagaggcctttgaaattgttgttcgccatgccaagaactacaccaatgccatgttcaagaacaactacccaagcctgactccacaagcttttgagtttgtgggtgaatttttcacagatgtgtctctctacatcttgggttctgacatcaatgtagatgacatggtcaatgaattgtttgacagcctgtttccagtcatctatacccagctaatgaacccaggcctgcctgattcagccttggacatcaatgagtgcctccgaggagcaagacgtgacctgaaagtatttgggaatttccccaagcttattatgacccaggtttccaagtcactgcaagtcactaggatcttccttcaggctctgaatcttggaattgaagtgatcaacacaactgatcacctgaagttcagtaaggactgtggccgaatgctcaccagaatgtggtactgctcttactgccagggactgatgatggttaaaccctgtggcggttactgcaatgtggtcatgcaaggctgtatggcaggtgtggtggagattgacaagtactggagagaatacattctgtcccttgaagaacttgtgaatggcatgtacagaatctatgacatggagaacgtactgcttggtctcttttcaacaatccatgattctatccagtatgtccagaagaatgcaggaaagctgaccaccactattggcaagttatgtgcccattctcaacaacgccaatatagatctgcttattatcctgaagatctctttattgacaagaaagtattaaaagttgctcatgtagaacatgaagaaaccttatccagccgaagaagggaactaattcagaagttgaagtctttcatcagcttctatagtgctttgcctggctacatctgcagccatagccctgtggcggaaaacgacaccctttgctggaatggacaagaactcgtggagagatacagccaaaaggcagcaaggaatggaatgaaaaaccagttcaatctccatgagctgaaaatgaagggccctgagccagtggtcagtcaaattattgacaaactgaagcacattaaccagctcctgagaaccatgtctatgcccaaaggtagagttctggataaaaacctggatgaggaagggtttgaaagtggagactgcggtgatgatgaagatgagtgcattggaggctctggtgatggaatgataaaagtgaagaatcagctccgcttccttgcagaactggcctatgatctggatgtggatgatgcgcctggaaacagtcagcaggcaactccgaaggacaacgagataagcacctttcacaacctcgggaacgttcattccccgctgaagcttctcaccagcatggccatctcggtggtgtgcttcttcttcctggtgcactgactgcctggtgcccagcacatgtgctgccctacagcaccctgtggtcttcctcgataaagggaaccactttcttatttttttctatttttttttttttgttatcctgtatacctcctccagccatgaagtagaggactaaccatgtgttatgttttcgaaaatcaaatggtatcttttggaggaagatacattttagtggtagcatatagattgtccttttgcaaagaaagaaaaaaaaccatcaagttgtgccaaattattctcctatgtttggctgctagaacatggttaccatgtctttctctctcactccctccctttctatcgttctctctttgcatggatttctttgaaaaaaaataaattgctcaaataaaaaaaaaaaaaaaaaaaaaaaaaaaaaaaaaaaaaaaaaaaaaaaaaaaaccagaaagaaagaaagaaaataaagaaagaaagaaagagaaa

SEQ ID NO: 453465 - DNA, 2237 bp, Homo sapiens
ccctgccccgcgccgccaagcggttcccgccctcgcccagcgcccaggtagctgcgaggaaacttttgcagcggctgggtagcagcacgtctcttgctcctcagggccactgccaggcttgccgagtcctgggactgctctcgctccggctgccactctcccgcgctctcctagctccctgcgaagcaggatggccgggaccgtgcgcaccgcgtgcttggtggtggcgatgctgctcagcttggacttcccgggacaggcgcagcccccgccgccgccgccggacgccacctgtcaccaagtccgctccttcttccagagactgcagcccggactcaagtgggtgccagaaactcccgtgccaggatcagatttgcaagtatgtctccctaagggcccaacatgctgctcaagaaagatggaagaaaaataccaactaacagcacgattgaacatggaacagctgcttcagtctgcaagtatggagctcaagttcttaattattcagaatgctgcggttttccaagcctgactccacaagcttttgagtttgtgggtgaatttttcacagatgtgtctctctacatcttgggttctgacatcaatgtagatgacatggtcaatgaattgtttgacagcctgtttccagtcatctatacccagctaatgaacccaggcctgcctgattcagccttggacatcaatgagtgcctccgaggagcaagacgtgacctgaaagtatttgggaatttccccaagcttattatgacccaggtttccaagtcactgcaagtcactaggatcttccttcaggctctgaatcttggaattgaagtgatcaacacaactgatcacctgaagttcagtaaggactgtggccgaatgctcaccagaatgtggtactgctcttactgccagggactgatgatggttaaaccctgtggcggttactgcaatgtggtcatgcaaggctgtatggcaggtgtggtggagattgacaagtactggagagaatacattctgtcccttgaagaacttgtgaatggcatgtacagaatctatgacatggagaacgtactgcttggtctcttttcaacaatccatgattctatccagtatgtccagaagaatgcaggaaagctgaccaccactattggcaagttatgtgcccattctcaacaacgccaatatagatctgcttattatcctgaagatctctttattgacaagaaagtattaaaagttgctcatgtagaacatgaagaaaccttatccagccgaagaagggaactaattcagaagttgaagtctttcatcagcttctatagtgctttgcctggctacatctgcagccatagccctgtggcggaaaacgacaccctttgctggaatggacaagaactcgtggagagatacagccaaaaggcagcaaggaatggaatgaaaaaccagttcaatctccatgagctgaaaatgaagggccctgagccagtggtcagtcaaattattgacaaactgaagcacattaaccagctcctgagaaccatgtctatgcccaaaggtagagttctggataaaaacctggatgaggaagggtttgaaagtggagactgcggtgatgatgaagatgagtgcattggaggctctggtgatggaatgataaaagtgaagaatcagctccgcttccttgcagaactggcctatgatctggatgtggatgatgcgcctggaaacagtcagcaggcaactccgaaggacaacgagataagcacctttcacaacctcgggaacgttcattccccgctgaagcttctcaccagcatggccatctcggtggtgtgcttcttcttcctggtgcactgactgcctggtgcccagcacatgtgctgccctacagcaccctgtggtcttcctcgataaagggaaccactttcttatttttttctatttttttttttttgttatcctgtatacctcctccagccatgaagtagaggactaaccatgtgttatgttttcgaaaatcaaatggtatcttttggaggaagatacattttagtggtagcatatagattgtccttttgcaaagaaagaaaaaaaaccatcaagttgtgccaaattattctcctatgtttggctgctagaacatggttaccatgtctttctctctcactccctccctttctatcgttctctctttgcatggatttctttgaaaaaaaataaattgctcaaat

SEQ ID NO: 453466 - DNA, 2239 bp, Homo sapiens
ccctgccccgcgccgccaagcggttcccgccctcgcccagcgcccaggtagctgcgaggaaacttttgcagcggctgggtagcagcacgtctcttgctcctcagggccactgccaggcttgccgagtcctgggactgctctcgctccggctgccactctcccgcgctctcctagctccctgcgaagcaggatggccgggaccgtgcgcaccgcgtgcttggtggtggcgatgctgctcagcttggacttcccgggacaggcgcagcccccgccgccgccgccggacgccacctgtcaccaagtccgctccttcttccagagactgcagcccggactcaagtgggtgccagaaactcccgtgccaggatcagatttgcaagtatgtctccctaagggcccaacatgctgctcaagaaagatggaagaaaaataccaactaacagcacgattgaacatggaacagctgcttcagtctgcaagtatggagctcaagttcttaattattcagaatgctgcggttttccaagaggcctttgaaattgttgttcgccatgccaagaactacaccaatgccatgttcaagaacaactacccaagcctgactccacaagcttttgagtttgtgggtgaatttttcacagatgtgtctctctacatcttgggttctgacatcaatgtagatgacatggtcaatgaattgtttgacagcctgtttccagtcatctatacccagctaatgaacccaggcctgcctgattcagccttggacatcaatgagtgcctccgaggagcaagacgtgacctgaaagtatttgggaatttccccaagcttattatgacccaggtttccaagtcactgcaagtcactaggatcttccttcaggctctgaatcttggaattgaagtgatcaacacaactgatcacctgaagttcagtaaggactgtggccgaatgctcaccagaatgtggtactgctcttactgccagggactgatgatggttaaaccctgtggcggttactgcaatgtggtcatgcaaggctgtatggcaggtgtggtggagattgacaagtactggagagaatacattctgtcccttgaagaacttgtgaatggcatgtacagaatctatgacatggagaacgtactgcttggtctcttttcaacaatccatgattctatccagtatgtccagaagaatgcaggaaagctgaccaccactattggcaagttatgtgcccattctcaacaacgccaatatagatctgcttattatcctgaagatctctttattgacaagaaagtattaaaagttgctcatgtagaacatgaagaaaccttatccagccgaagaagggaactaattcagaagttgaagtctttcatcagcttctatagtgctttgcctggctacatctgcagccatagccctgtggcggaaaacgacaccctttgctggaatggacaagaactcgtggagagatacagccaaaaggcagcaaggaatggaatgaaaaaccagttcaatctccatgagctgaaaatgaagggccctgagccagtggtcagtcaaattattgacaaactgaagcacattaaccagctcctgagaaccatgtctatgcccaaaggtagagttctggataaaaacctggatgaggaagggtttgaaagtggagactgcggtgatgatgaagatgagtgcattggaggctctggatgatgcgcctggaaacagtcagcaggcaactccgaaggacaacgagataagcacctttcacaacctcgggaacgttcattccccgctgaagcttctcaccagcatggccatctcggtggtgtgcttcttcttcctggtgcactgactgcctggtgcccagcacatgtgctgccctacagcaccctgtggtcttcctcgataaagggaaccactttcttatttttttctatttttttttttttgttatcctgtatacctcctccagccatgaagtagaggactaaccatgtgttatgttttcgaaaatcaaatggtatcttttggaggaagatacattttagtggtagcatatagattgtccttttgcaaagaaagaaaaaaaaccatcaagttgtgccaaattattctcctatgtttggctgctagaacatggttaccatgtctttctctctcactccctccctttctatcgttctctctttgcatggatttctttgaaaaaaaataaattgctcaaat

SEQ ID NO: 453467 - DNA, 1788 bp, Homo sapiens
ccctgccccgcgccgccaagcggttcccgccctcgcccagcgcccaggtagctgcgaggaaacttttgcagcggctgggtagcagcacgtctcttgctcctcagggccactgccaggcttgccgagtcctgggactgctctcgctccggctgccactctcccgcgctctcctagctccctgcgaagcaggatggccgggaccgtgcgcaccgcgtgcttggtggtggcgatgctgctcagcttggacttcccgggacaggcgcagcccccgccgccgccgccggacgccacctgtcaccaagtccgctccttcttccagagactgcagcccggactcaagtgggtgccagaaactcccgtgccaggatcagatttgcaagtatgtctccctaagggcccaacatgctgctcaagaaagatggaagaaaaataccaactaacagcacgattgaacatggaacagctgcttcagtctgcaagtatggagctcaagttcttaattattcagaatgctgcggttttccaagaggcctttgaaattgttgttcgccatgccaagaactacaccaatgccatgttcaagaacaactacccaagcctgactccacaagcttttgagtttgtgggtgaatttttcacagatgtgtctctctacatcttgggttctgacatcaatgtagatgacatggtcaatgaattgtttgacagcctgtttccagtcatctatacccagctaatgaacccaggcctgcctgattcagccttggacatcaatgagtgcctccgaggagcaagacgtgacctgaaagtatttgggaatttccccaagcttattatgacccaggtttccaagtcactgcaagtcactaggatcttccttcaggctctgaatcttggaattgaagtgatcaacacaactgatcacctgaagttcagtaaggactgtggccgaatgctcaccagaatgtggtactgctcttactgccagggactgatgatggttaaaccctgtggcggttactgcaatgtggtcatgcaaggctgtatggcaggtgtggtggagattgacaagtactggagagaatacattctgtcccttgaagaacttgtgaatggcatgtacagaatctatgacatggagaacgtactgcttggtctcttttcaacaatccatgattctatccagtatgtccagaagaatgcaggaaagctgaccaccactattggcaagttatgtgcccattctcaacaacgccaatatagatctgcttattatcctgaagatctctttattgacaagaaagtattaaaagttgctcatgtagaacatgaagaaaccttatccagccgaagaagggaactaattcagaagttgaagtctttcatcagcttctatagtgctttgcctggctacatctgcagccatagccctgtggcggaaaacgacaccctttgctggaatggacaagaactcgtggagagatacagccaaaaggcagcaaggaatggaatgaaaaaccagttcaatctccatgagctgaaaatgaagggccctgagccagtggtcagtcaaattattgacaaactgaagcacattaaccagctcctgagaaccatgtctatgcccaaaggtagagttctggataaaaacctggatgaggaagggtttgaaagtggagactgcggtgatgatgaagatgagtgcattggaggctcatttaacttttttaatgggtctcaaaattctgtgacaaatttttggtcaagttgtttccattaaaaagtact

SEQ ID NO: 453468 - DNA, 1414 bp, Homo sapiens
ggaagaggttgcagtgagccaagactgagccactgcactccagcatgggtgacagagaaaactctgtctcaaacaaaaaaataataaaatttattcagtaggctggattctacacaaagtaatctgtatttgggccatgatttaagcacatctgaaggtatatcactcttttcaggctataattatttgggtaatcttcattctgagacaaacttaatctatatcatttactttgcaacagaacaaccctacagcattttggttcccagactaagggaactaatatctatataattaaacttgttcatttatcattcatgaaatataaaatacttgtcatttaaaccgtttaaaaatgtggtagcataatgtcaccccaaaaagcattcagaaagcaatgtaactgtgaagaccagggtttaaaggtaattcatttatagtttataactccttagatgtttgatgttgaaaactgctttaacatgaaaattatcttcctctgctctgtgtgaacaatagcttttaatttaagattgctcactactgtactagactactggtaggtttttttggggggggtgggtagggatatgtgggtaatgaagcatttacttacaggctatcatactctgaggccaattttatctccaaagcaataatatcattaagtgattcacttcatagaaggctaagtttctctaggacagatagaaaacatgaattttgaaatatatagaacagtagttaaaatactatatatttcaaccctggctggtagattgcttattttactatcagaaactaaaagatagatttttacccaaacagaagtatctgtaatttttataattcatcaattctggaatgctatatataatatttaaaagactttttaaatgtgtttaatttcatcatcgtaaaaagggatcatctcagagagaacagcagtattctgcgtatttttaaaaatgctctagagtaacatttgaagtaattcactgtagtgtatgccagtcctagaaataatttttttaatttctggtgtctgtttctaatacactaaccaagttttcaaaatatatttacaaagatgcatctttacccattattttaaaatgattaaggaggatagttgcttcaggtaacaagctaatttttcaaatattaggcccttacagaactatttagtcaaaaagtaagatattcctttaaaatatataacccaaagctttcagttaaacatgatatatcacaaatactattaaaatgttaaagagaaatgcaaatagcattaaatgatgaccaaaatgtaaaatattgtagatttcaaaagctgtgtctctattaggtgggataccaaatgtaaatgatgtaacaaaactgtcttatctccaagtaatcatatctcctgcta

SEQ ID NO: 453469 - DNA, 2443 bp, Homo sapiens
ggaagaggttgcagtgagccaagactgagccactgcactccagcatgggtgacagagaaaactctgtctcaaacaaaaaaataataaaatttattcagtaggctggattctacacaaagtaatctgtatttgggccatgatttaagcacatctgaaggtatatcactcttttcaggctataattatttgggtaatcttcattctgagacaaacttaatctatatcatttactttgcaacagaacaaccctacagcattttggttcccagactaagggaactaatatctatataattaaacttgttcatttatcattcatgaaatataaaatacttgtcatttaaaccgtttaaaaatgtggtagcataatgtcaccccaaaaagcattcagaaagcaatgtaactgtgaagaccagggtttaaaggtaattcatttatagtttataactccttagatgtttgatgttgaaaactgctttaacatgaaaattatcttcctctgctctgtgtgaacaatagcttttaatttaagattgctcactactgtactagactactggtaggtttttttggggggggtgggtagggatatgtgggtaatgaagcatttacttacaggctatcatactctgaggccaattttatctccaaagcaataatatcattaagtgattcacttcatagaaggctaagtttctctaggacagatagaaaacatgaattttgaaatatatagaacagtagttaaaatactatatatttcaaccctggctggtagattgcttattttactatcagaaactaaaagatagatttttacccaaacagaagtatctgtaatttttataattcatcaattctggaatgctatatataatatttaaaagactttttaaatgtgtttaatttcatcatcgtaaaaagggatcatctcagagagaacagcagtattctgcgtatttttaaaaatgctctagagtaacatttgaagtaattcactgtagtgtatgccagtcctagaaataatttttttaatttctggtgtctgtttctaatacactaaccaagttttcaaaatatatttacaaagatgcatctttacccattattttaaaatgattaaggaggatagttgcttcaggtaacaagctaatttttcaaatattaggcccttacagaactatttagtcaaaaagtaagatattcctttaaaatatataacccaaagctttcagttaaacatgatatatcacaaatactattaaaatgttaaagagaaatgcaaatagcattaaatgatgaccaaaatgtaaaatattgtagatttcaaaagctgtgtctctattaggtgggataccaaatgtaaatgatgtaactgacgttgttttttactttttactttttaaaaaagactaaaaacgttttgatattatacaatgtatttgtttcagataaggtcattgtcatttagtatatataattaatatatgtacaagtttaagtaaattcctgtgagtaaaaatggacttatcacaaaacatagttctaaagaaaggtatatgctcatatacacggtgtccattaatttaatgggaactaggtataacttcaggagaatttggcaaataattcattaatccatgtaaatattcaaaagcttgttctatccacattatttcaagggatcactttatttttcattatactttcacagcacttttctagtaaattctgtaacacagaaattccattttggaatcatttcatgttaccaataattctagacttttataacatttaacatgttgatggaaatagattacatctgctagaaccttttgccttaactattcaccaatatatgctaatattcataaatatggattgactgtttacaaacattagaatcttgtcttggttccattttgatggctaatatttgttatcttaattaagactatttctgaggtcatgattacttgaaaatattgactaaaactgggtccttagaaattccaggtggagctgatttacctatgactgaggggaaaaaaaaatcaaattttactgataatagtaatgctccaaatgaattaatgacacatctgttcaataaataaagagcttaaatatacaaaacataagaaatctgggcaacaaaacttgtggtctttacttttgaatagctacccaagaaaaggttttaaaggtaaaagttatgagtaatgtcatcacaataagctcttgtttaaaattcttttcttttatgtataattaggtttatgtttcatgtctttttaaaaccttataaaagatttaattatcacatctattcttcaatgtggaaatattaaatattgttggttgtaaaataatatttatgtacttgtgtctgaaaagttgtaaaatgcttacctcagctatacaatatctgtgactctga

SEQ ID NO: 453470 - DNA, 1145 bp, Homo sapiens
tgcgtataatggctgttacctaatggctgttacataaatggtacctaacatggctgtaccaaatgtaaatgatgtaactgacgttgttttttactttttactttttaaaaaagactaaaaacgttttgatattatacaatgtatttgtttcagataaggtcattgtcatttagtatatataattaatatatgtacaagtttaagtaaattcctgtgagtaaaaatggacttatcacaaaacatagttctaaagaaaggtatatgctcatatacacggtgtccattaatttaatgggaactaggtataacttcaggagaatttggcaaataattcattaatccatgtaaatattcaaaagcttgttctatccacattatttcaagggatcactttatttttcattatactttcacagcacttttctagtaaattctgtaacacagaaattccattttggaatcatttcatgttaccaataattctagacttttataacatttaacatgttgatggaaatagattacatctgctagaaccttttgccttaactattcaccaatatatgctaatattcataaatatggattgactgtttacaaacattagaatcttgtcttggttccattttgatggctaatatttgttatcttaattaagactatttctgaggtcatgattacttgaaaatattgactaaaactgggtccttagaaattccaggtggagctgatttacctatgactgaggggaaaaaaaaatcaaattttactgataatagtaatgctccaaatgaattaatgacacatctgttcaataaataaagagcttaaatatacaaaacataagaaatctgggcaacaaaacttgtggtctttacttttgaatagctacccaagaaaaggttttaaaggtaaaagttatgagtaatgtcatcacaataagctcttgtttaaaattcttttcttttatgtataattaggtttatgtttcatgtctttttaaaaccttataaaagatttaattatcacatctattcttcaatgtggaaatattaaatattgttggttgtaaaataatatttatgtacttgtgtctgaaaagttgtaaaatgcttacctcagctatacaatatctgtgactctga

SEQ ID NO: 453471 - DNA, 1441 bp, Homo sapiens
agctaaaaatcgaggcggggctgagaggctgcggcggctgactaggttttcggaccgcggcgcggcggggaagagagactgcggcgggagggccaggccgtgggagagacgcgggaaagtgcgggtcgcagaggcacttgaccaccccgccctaggccgacccggcggacgcggcgtctggtgtgcgggcgctggggcgggtcccaggtctccccgctgcgctgcttgaggctcagccatggcccagcagagagccctgccccagagcaaggagacgctgctgcagtcctacaacaagcggctgaaggacgacattaagtccatcatggacaacttcaccgagatcatcaagaccgccaagattgaggacgagacgcaggtgtcacgggccactcagggtgaacaggacaattacgagatgcatgtgcgagccgccaacatcgtccgagccggcgagtccctgatgaagctggtgtccgacctcaagcagttcctgatcctcaatgacttcccctccgtgaacgaggccattgaccagcgcaaccagcagctgcgcacactgcaggaggagtgcgaccggaagctcatcacgctgcgagacgagatctccattgacctctacgagctggaggaggagtattactcgtccagctcaagcctttgcgaagctaatgacctgcctctgtgcgaagcttacgggaggctggacctcgacacagactctgctgatggcctctcggcccctctgctggcgtccccggagcccagtgctggccccctacaggtggcagcccctgcccactcccatgctggtggccctggccccactgagcacgcctgagcctccggggccacgcttcgttctcaggaacaaaacctgaggcagccctttggatgccctcacagccttgcttctctcagcctaggttcccatttggggacttcaggaccccagagccactaggacttccttgggaagcccgttagcccagggtgggtcccgccaggacagtagggaaacagttgtttccctagccatttccgaatagcccatcattccgagtcatcatctctgtttgctgccttcctggccagccaggtggaagaaagtttccaagctaggtctggcccgttggggatctcagcagtggggcaggagggtgcctgatttcggggagtcctgacccgagcctgttgtcagagttgggaggggctctgagcagtgttgggcaggccgggtctcccatcccgaggccagcgttcctgtgcagagccccatccactggttcttgccctgagccacatatgtctgtgccatgggctgagtgccacgacaggcccgtgtgacagctgctgcccacgcatgtggaagctaggtgggactcattcctaattctgccgttgtaatgagacttgattaaaacaccgccacttttttgca

SEQ ID NO: 453472 - DNA, 2620 bp, Homo sapiens
agctaaaaatcgaggcggggctgagaggctgcggcggctgactaggttttcggaccgcggcgcggcggggaagagagactgcggcgggagggccaggccgtgggagagacgcgggaaagtgcgggtcgcagaggcacttgaccaccccgccctaggccgacccggcggacgcggcgtctggtgtgcgggcgctggggcgggtcccaggtctccccgctgcgctgcttgaggctcagccatggcccagcagagagccctgccccagagcaaggagacgctgctgcagtcctacaacaagcggctgaaggacgacattaagtccatcatggacaacttcaccgagatcatcaagaccgccaagattgaggacgagacgcaggtgtcacgggccactcagggtgaacaggacaattacgagatgcatgtgcgagccgccaacatcgtccgagccggcgagtccctgatgaagctggtgtccgacctcaagcagttcctgatcctcaatgacttcccctccgtgaacgaggccattgaccagcgcaaccagcagctgcgcacactgcaggaggagtgcgaccggaagctcatcacgctgcgagacgagatctccattgacctctacgagctggaggaggagtattactcgtccaggtataaatagcgctggactccccatgcagagcgggagcctgcctacctgggcctggccagcaggcagggctgccttctgctttttcaaattcttgctggtcttagcagtggagccatgcctgggtttcagagcagagctcctggccagagcgtttgaccgacagacaattcacatccatatgccaggccctgggcctttcccacagtgcaatgtgatgaaaaccacaggactcacgccagtcggataggccgagtctggagaagggaggcgcctggctgtatcccccgcaggccctcttccgagagccttcctcctcgggcagtgcgttctggggctgtgctgctcctgttaccttctgaaaccttcgaccgtttgagctggaggggccctgagaaatcagagtctacgtatcatttacttagggggaaacttaggctggagacagggaggccttccactctgccccattagcttagaaaatcaagattcagtccagcagatgcagagtccatgtccatcttgtgccttctcctggacaaacctttccttcctggtggtggatttaaaatactcctttctgcccattggccatgctgggagccacagatatccagagccagcatgacctggggcttggtttccctgccctgggctcagtggcactgctgagctgcagcagtcctagagttttccagggggttctgagggaatctttggtccccagtactcattaactcagcagacatgaggcagcatttcctccacactagggtggctgagaggggtcctggggtgtttcagacccttctgggcatctccttccacagctgttcagtttgtcggtctctttgaggcagccaccgtccctgagggcccctgcacagagcagctgtgggcctgtaattcagcctgcctgccttgccttggggcagggagagagggaacctgctcacggccctgcagcagagcagggcgcaaacccaggacatctgtgccaggcttcccatgccctcccccaacagtccctcagcttcacccagcggggcttccaggccagcctgtgtcccctcccgcaggcctcctgtccacaccagcgccccctggggggcctcacacagcccctggctttcctctctgcctgctcctgtctctccctggggtttctggtggtggaaaagctcaagcctttgcgaagctaatgacctgcctctgtgcgaagcttacgggaggctggacctcgacacagactctgctgatggcctctcggcccctctgctggcgtccccggagcccagtgctggccccctacaggtggcagcccctgcccactcccatgctggtggccctggccccactgagcacgcctgagcctccggggccacgcttcgttctcaggaacaaaacctgaggcagccctttggatgccctcacagccttgcttctctcagcctaggttcccatttggggacttcaggaccccagagccactaggacttccttgggaagcccgttagcccagggtgggtcccgccaggacagtagggaaacagttgtttccctagccatttccgaatagcccatcattccgagtcatcatctctgtttgctgccttcctggccagccaggtggaagaaagtttccaagctaggtctggcccgttggggatctcagcagtggggcaggagggtgcctgatttcggggagtcctgacccgagcctgttgtcagagttgggaggggctctgagcagtgttgggcaggccgggtctcccatcccgaggccagcgttcctgtgcagagccccatccactggttcttgccctgagccacatatgtctgtgccatgggctgagtgccacgacaggcccgtgtgacagctgctgcccacgcatgtggaagctaggtgggactcattcctaattctgccgttgtaatgagacttgattaaaacaccgccacttttttgca

SEQ ID NO: 453473 - DNA, 3011 bp, Homo sapiens
agctaaaaatcgaggcggggctgagaggctgcggcggctgactaggttttcggaccgcggcgcggcggggaagagagactgcggcgggagggccaggccgtgggagagacgcgggaaagtgcgggtcgcagaggcacttgaccaccccgccctaggccgacccggcggacgcggcgtctggtgtgcgggcgctggggcgggtcccaggtctccccgctgcgctgcttgaggctcagccatggcccagcagagagccctgccccagagcaaggagacgctgctgcagtcctacaacaagcggctgaaggacgacattaagtccatcatggacaacttcaccgagatcatcaagaccgccaagattgaggacgagacgcaggtgtcacgggccactcagggtgaacaggacaattacgagatgcatgtgcgagccgccaacatcgtccgagccggcgagtccctgatgaagctggtgtccgacctcaagcagttcctgatcctcaatgacttcccctccgtgaacgaggccattgaccagcgcaaccagcagctgcgcacactgcaggaggagtgcgaccggaagctcatcacgctgcgagacgagatctccattgacctctacgagctggaggaggagtattactcgtccaggtataaatagcgctggactccccatgcagagcgggagcctgcctacctgggcctggccagcaggcagggctgccttctgctttttcaaattcttgctggtcttagcagtggagccatgcctgggtttcagagcagagctcctggccagagcgtttgaccgacagacaattcacatccatatgccaggccctgggcctttcccacagtgcaatgtgatgaaaaccacaggactcacgccagtcggataggccgagtctggagaagggaggcgcctggctgtatcccccgcaggccctcttccgagagccttcctcctcgggcagtgcgttctggggctgtgctgctcctgttaccttctgaaaccttcgaccgtttgagctggaggggccctgagaaatcagagtctacgtatcatttacttagggggaaacttaggctggagacagggaggccttccactctgccccattagcttagaaaatcaagattcagtccagcagatgcagagtccatgtccatcttgtgccttctcctggacaaacctttccttcctggtggtggatttaaaatactcctttctgcccattggccatgctgggagccacagatatccagagccagcatgacctggggcttggtttccctgccctgggctcagtggcactgctgagctgcagcagtcctagagttttccagggggttctgagggaatctttggtccccagtactcattaactcagcagacatgaggcagcatttcctccacactagggtggctgagaggggtcctggggtgtttcagacccttctgggcatctccttccacagctgttcagtttgtcggtctctttgaggcagccaccgtccctgagggcccctgcacagagcagctgtgggcctgtaattcagcctgcctgccttgccttggggcagggagagagggaacctgctcacggccctgcagcagagcagggcgcaaacccaggacatctgtgccaggcttcccatgccctcccccaacagtccctcagcttcacccagcggggcttccaggccagcctgtgtcccctcccgcaggcctcctgtccacaccagcgccccctggggggcctcacacagcccctggctttcctctctgcctgctcctgtctctccctggggtttctggtggtggaaaagctcaagcctttgcgaagctaatgacctgcctctgtgcgaagcttacgggaggctggacctcgacacagactctgctgatggcctctcggcccctctgctggcgtccccggagcccagtgctggccccctacaggtggcagcccctgcccactcccatgctggtggccctggccccactgagcacgcctgagcctccggggccacgcttcgttctcaggaacaaaacctgaggcagccctttggatgccctcacagccttgcttctctcagcctaggttcccatttggggacttcaggaccccagagccactaggacttccttgggaagcccgttagcccagggtgggtcccgccaggacagtagggaaacagttgtttccctagccatttccgaatagcccatcattccgagtcatcatctctgtttgctgccttcctggccagccaggtggaagaaagtttccaagctaggtctggcccgttggggatctcagcagtggggcaggagggtgcctgatttcggggagtcctgacccgagcctgttgtcagagttgggaggggctctgagcagtgttgggcaggccgggtctcccatcccgaggccagcgttcctgtgcagagccccatccactggttcttgccctgagccacatatgtctgtgccatgggctgagtgccacgacaggcccgtgtgacagctgctgcccacgcatgtggaagctaggtgggactcattcctaattctgccgttgtaatgagacttgattaaaacaccgccacttttttgcaaaaaaaaaaaaaaaaaaagaaaaaaaaaaaaagaagaaaaatagaaaacaaaaaaagaaaaaaaaaaaaaaagagaaaaaaaaaaaaagaaaacagaaaaaaacaggggggggggcaaaaaaaatacggaacggcggggggagaggagcccagagaagaaagccgaaacagcacgcgggtcgttgaggaagaaaagacgggcgcacccgactaagagggacgatatattcaaaaacctgaccaagagggggggggcgcacaatacaaagcaagaacgcgagttggagaagaaacaaaacgcgtcagatactggcacacaaatgagagagcgagcgacacaaaacaagggagggggcgaggagcaacaagacggagcacggacatacagcaa

SEQ ID NO: 453474 - DNA, 2742 bp, Homo sapiens
agctaaaaatcgaggcggggctgagaggctgcggcggctgactaggttttcggaccgcggcgcggcggggaagagagactgcggcgggagggccaggccgtgggagagacgcgggaaagtgcgggtcgcagaggcacttgaccaccccgccctaggccgacccggcggacgcggcgtctggtgtgcgggcgctggggcgggtcccaggtctccccgctgcgctgcttgaggctcagccatggcccagcagagagccctgccccagagcaaggagacgctgctgcagtcctacaacaagcggctgaaggacgacattaagtccatcatggacaacttcaccgagatcatcaagaccgccaagattgaggacgagacgcaggtgtcacgggccactcagggtgaacaggacaattacgagatgcatgtgcgagccgccaacatcgtccgagccggcgagtccctgatgaagctggtgtccgacctcaagcagttcctgatcctcaatgacttcccctccgtgaacgaggccattgaccagcgcaaccagcagctgcgcacactgcaggaggagtgcgaccggaagctcatcacgctgcgagacgagatctccattgacctctacgagctggaggaggagtattactcgtccaggtataaatagcgctggactccccatgcagagcgggagcctgcctacctgggcctggccagcaggcagggctgccttctgctttttcaaattcttgctggtcttagcagtggagccatgcctgggtttcagagcagagctcctggccagagcgtttgaccgacagacaattcacatccatatgccaggccctgggcctttcccacagtgcaatgtgatgaaaaccacaggactcacgccagtcggataggccgagtctggagaagggaggcgcctggctgtatcccccgcaggccctcttccgagagccttcctcctcgggcagtgcgttctggggctgtgctgctcctgttaccttctgaatccatatgtagagatttcagccaaggctgggccagccttttttgggcagtcaggtccacacctatgtccagggcaccagggatgcaattccatgtggatgtcaccaaaccccagtgtggaggcagggacagtcatgggaatgtgggggatgaagcccaggcagggaaatggccttgaaagccattggagctccaattcgtgacccactcagccttatccacggagctggagccaacctacgtgccaggccccgtgctgggtcccagggatgcagaagggtcaaaacccatcatcctgacccttgtggggctccgtaagaagcctgaaaccttcgaccgtttgagctggaggggccctgagaaatcagagtctacgtatcatttacttagggggaaacttaggctggagacagggaggccttccactctgccccattagcttagaaaatcaagattcagtccagcagatgcagagtccatgtccatcttgtgccttctcctggacaaacctttccttcctggtggtggatttaaaatactcctttctgcccattggccatgctgggagccacagatatccagagccagcatgacctggggcttggtttccctgccctgggctcagtggcactgctgagctgcagcagtcctagagttttccagggggttctgagggaatctttggtccccagtactcattaactcagcagacatgaggcagcatttcctccacactagggtggctgagaggggtcctggggtgtttcagacccttctgggcatctccttccacagctgttcagtttgtcggtctctttgaggcagccaccgtccctgagggcccctgcacagagcagctgtgggcctgtaattcagcctgcctgccttgccttggggcagggagagagggaacctgctcacggccctgcagcagagcagggcgcaaacccaggacatctgtgccaggcttcccatgccctcccccaacagtccctcagcttcacccagcggggcttccaggccagcctgtgtcccctcccgcaggcctcctgtccacaccagcgccccctacaggtggcagcccctgcccactcccatgctggtggccctggccccactgagcacgcctgagcctccggggccacgcttcgttctcaggaacaaaacctgaggcagccctttggatgccctcacagccttgcttctctcagcctaggttcccatttggggacttcaggaccccagagccactaggacttccttgggaagcccgttagcccagggtgggtcccgccaggacagtagggaaacagttgtttccctagccatttccgaatagcccatcattccgagtcatcatctctgtttgctgccttcctggccagccaggtggaagaaagtttccaagctaggtctggcccgttggggatctcagcagtggggcaggagggtgcctgatttcggggagtcctgacccgagcctgttgtcagagttgggaggggctctgagcagtgttgggcaggccgggtctcccatcccgaggccagcgttcctgtgcagagccccatccactggttcttgccctgagccacatatgtctgtgccatgggctgagtgccacgacaggcccgtgtgacagctgctgcccacgcatgtggaagctaggtgggactcattcctaattctgccgttgtaatgagacttgattaaaacaccgccacttttttgca

SEQ ID NO: 453475 - DNA, 1630 bp, Homo sapiens
gcctctgtgctcgcctgccccctctctgcttgttagttgctctttctggctctgcctctcctttgctttcctcgggatgccactctgtgcccaggacggttctgagactgaacactgagggcaggagcaagggaggaagccaggggcgaggcaggccgcgggaaagccaggcccctgcctgcaggttagaaagaggcgagcgtggattgtcacagctgcgggcatgggaagggctagctgagctcttcacctgcatcctggctgccgtgaggattccccgtgttagaggtggggacgcctgctggaggccgcctggctgatgtagggctatcgggaagtgccagggcctgtgttcccaactgtcgcccccttcaggctaagtctcaggcagggacagacccagaaagaacacagtctgccctcagagagctctttgcagtgtagtgacactggggtttctgcagtcagggaggagggagggtggccaggctgacagctttttgcaagaggagggggaccagcaccagctgggaggcataggctaggacaggcccacgtggaggctgggcaggaagggcctgctgaggtcacacagctgttggtggttgggccagggcggcttcctcctttcagaatgctagggtggctctcaccactggccgcctctccttgccaggcctgccaactcaggggacagatggagcaggagtggagaaagggaaaggcaggtctggggtgtggtcgtgttttcttaactctgcttctgtcttgctctcccctcccctggctttcctctctgcctgctcctgtctctccctggggtttctggtggtggaaaagctcaagcctttgcgaagctaatgacctgcctctgtgcgaagcttacgggaggctggacctcgacacagactctgctgatggcctctcggcccctctgctggcgtccccggagcccagtgctggccccctacaggtggcagcccctgcccactcccatgctggtggccctggccccactgagcacgcctgagcctccggggccacgcttcgttctcaggaacaaaacctgaggcagccctttggatgccctcacagccttgcttctctcagcctaggttcccatttggggacttcaggaccccagagccactaggacttccttgggaagcccgttagcccagggtgggtcccgccaggacagtagggaaacagttgtttccctagccatttccgaatagcccatcattccgagtcatcatctctgtttgctgccttcctggccagccaggtggaagaaagtttccaagctaggtctggcccgttggggatctcagcagtggggcaggagggtgcctgatttcggggagtcctgacccgagcctgttgtcagagttgggaggggctctgagcagtgttgggcaggccgggtctcccatcccgaggccagcgttcctgtgcagagccccatccactggttcttgccctgagccacatatgtctgtgccatgggctgagtgccacgacaggcccgtgtgacagctgctgcccacgcatgtggaagctaggtgggactcattcctaattctgccgttgtaatgagacttgattaaaacaccgccacttttttgca

SEQ ID NO: 453476 - DNA, 4665 bp, Homo sapiens
tgaactgaggcgaactccgccgccaagtgagtgaggaggaggaggaggagaaggaggaggaggaagaggaggagcgcagtcggagcgcggcggcagcggcagaggcgccgcggcggggaccagcccagagagaccccccgagcccgcggcacaggcggcggcggcgctgagcgggctcgaccagccgagcgagcggcggccccggctcctcctcgtccggcgccagcagcccgcgccccgcgcccgcactcggccagccgagacccgcctcccgcccgcccgccggcctcgtgagggacgcgccgagccgggcggccgagagcggcggcggctgggagcgcgtcgggcccgggcggaaagtgcctgcggggggcgggcgagcgcgcggtgccggccgccccggggctcggcgcgggagccagagcgggagccggcgcggagcgggacgccgggtcccgagcggcccgcggccggggctcagcccccgcccctccctcctctccggcggcggcggcggcggcggcgggcggagtgagctgcggagcctggaatatggtcggggaaatggaaacgaaggagaagccgaagcccaccccagattacctgatgcagctgatgaacgacaagaagctcatgagcagcctgcccaacttctgcgggatcttcaaccacctcgagcggctgctggacgaagaaattagcagagtacggaaagacatgtacaatgacacattaaatggcagtacagagaaaaggagtgcagaattgcctgatgctgtgggacctattgttcagttacaagagaaactttatgtgcctgtaaaagaatacccagattttaattttgttgggagaatccttggacctagaggacttacagccaaacaacttgaagcagaaaccggatgtaaaatcatggtccgaggcaaaggctcaatgagggataaaaaaaaggaggagcaaaatagaggcaagcccaattgggagcatctaaatgaagatttacatgtactaatcactgtggaagatgctcagaacagagcagaaatcaaattgaagagagcagttgaagaagtgaagaaattattggtacctgcagcagaaggagaagacagcctgaagaagatgcagctgatggagcttgcgattctgaatggcacctacagagatgccaacattaaatcaccagcccttgccttttctcttgcagcaacagcccaggctgctccaaggatcattactgggcctgcgccggttctcccaccagctgccctgcgtactcctacgccagctggccctaccataatgcctttgatcagacaaatacagaccgctgtcatgccaaacggaactcctcacccaactgctgcaatagttcctccagggcccgaagctggtttaatctatacaccctatgagtacccctacacattggcaccagctacatcaatccttgagtatcctattgaacctagtggtgtattaggtgcggtggctactaaagttcgaaggcacgatatgcgtgtccatccttaccaaaggattgtgaccgcagaccgagccgccaccggcaactaacctatgaccttctgacctctgaactcttcacccaatgatgacctgaccatgcctgcctgctgatcagttaactggtaatcgcctttgcttgcctgtcgtcagtgcagcgagctgaggcacttgtccgttcgtcttaccatctaaccaaacaaaagacaaagaaattgttgtcctccaactcagctttttttttttttttttcctgtttgggtgaaagtggttctagaaactgcactgaatagtagtaaagcaataaggcccaattcatcccacagcactgatcatcttttaatatcccaccctaagcgaacggtaagaaggcctctcttaagaaggggagacagatggtccttaactactcaatgacagaggcagttactgtgagagacttctaggaatctttttcttctcatagcgaagtcaaagctctctctgaatgtactgtgtgatgatgcatcatgcatgaaccttcggtcagggatatcattggtgaagtgatttcaaaaagtattcaaaatttgatatgctgtttagtcactacagtgccctcaaagggcagaagttgcagccttttttatattgcctgccaaaatttgaagtattagaagaaagtgtgccatgagagaaaaacttaaggagttttgaaaagtaatgcaaataacaaaactgcaacactatttttaaaaagataaatatctgagttaaaattactgaatctttattttacacctaaaaaaatatgagaacaaggtacatgcattatgtgtcacattactgggcaaactgttcaagtatttttttttaaacctccctgtatagaaaaaaatcattaaggatgtaaaagccatgcttgcctatttgctgtatacatgtaatgaaattgtagataaagtgtagtgcattgaaacaaatgaacaaaaagtagatacttttactatacaagggtgctggtgcagaaaaaaatatatatatttttggaaatgtagcattttatactttcaagtgttataaaaaaaaagaaaaagaacaaagaaaccctttatttcattaaatgattttttctggtggttgtcaagaaacaaaagaccaaaagagcctttttgtctttcttttttattttttaagtattggaataagtctaaagaaaagaaagtgccttattttccttcatggtcattcagtcaagtgtctcataaagatcagctcctccctcagaatacaagttaatgcatgttactcagtcgcccagtatgtgaaagaagatatgagggagacaaatgagttgatagtttgaattataggatttttgccacgttaccttgatgcaaatttgccaaatctgatactgtgaaaagatttgataacttttctaatgcctgactagtaagttttaaaacatcattctttaaaagaatagtttaatacttttggttattccaatcttcaatgttaacccaaaggattctgagataaaaattatgtgtcatctaaacttcagtttacagacaaaattagagctttgttttatttggagaagggggatgcattcatttgattttgttttttgtttttaattaattgaatataataggatacctagcaaatgttttcacaaaagtgaatctttgtgattttcattctagaaaacaatgttttaaatcacccaaatttaatcacatgtctttatatcataccagataactggtgtagtgtatccttttactgtttcaataacctctgcctcccccaccccttaactttaaaagaatgtgaaaaactagcatcatagtgcatataaatactcaaccacatttcagcttaagcttctaatttctcaagaagttgaaacagttagttatgtagttgaagcaatttgtgtgcaaagcctacatctaaacacttgagtgaataatcattaactgctcagtaccagacgtggcaaatctcaagtgacagtggaccccccccccccgcccagcttatcaactcgtcccctcttccacaccttcccagcatcacagtcagaggtcagcaggaagctgagtcattaccttcttggtgacctcccccaccatcttgtctcacttggaaaccgttgtcagtttatttactatgcaatagacattcattgttttgtatccagctagctttggtttaatatgccactgctttgtctttctgttacacatacagttttgatttatttacaatatatgctgtgccattttgatttttatattgtttggttggttgaataaatttgcgacactcaaacacttgaggtgatagttgttaaaaacaataccagtatttgatccagtttcatctcaactatgttatacctggacattttagatgtttatcaaaggtcttttatggggaagaaagtaaatgtatgaaataataaatgtgtgacatttatagggaatgttggctctgaacaaacttttgaaaacttggttgacaaaattttggatcaactgaaaaaagcatgacttttgaaatctctgaatgccttggttctcagtattatcattctttattgaatttatttcttattaaaatatgtagtttttaagactttttttctgacagtattatgtaattttttagcgtgggtagatgggagtgtcgcttgtatgttatcgtacagctgacatgtatttttgtctattctttattatcttagtttcatgctatgtatgtaccataaccaacctattgcctatgagaaacatgtaagataatgtatttacagccattgttacaagtttataatgtatttttctatcttgttttatatgtatgttatataacattcaaaaagaatttttttcttgattgagaaaaggatacaaaatgcaaaatccacaattttgataactgaaaattgccaattgttttgcagtactttattatattgggtgtcttgtcttttttgggcttttagttagctaatgaatgaatacattagacacttttgggttttagttgggattttacatagcttgcattttaattctttggttctttgctgtttctattaacccacagcattattttaataaatgttataataccacctac

SEQ ID NO: 453477 - DNA, 6965 bp, Homo sapiens
tgaactgaggcgaactccgccgccaagtgagtgaggaggaggaggaggagaaggaggaggaggaagaggaggagcgcagtcggagcgcggcggcagcggcagaggcgccgcggcggggaccagcccagagagaccccccgagcccgcggcacaggcggcggcggcgctgagcgggctcgaccagccgagcgagcggcggccccggctcctcctcgtccggcgccagcagcccgcgccccgcgcccgcactcggccagccgagacccgcctcccgcccgcccgccggcctcgtgagggacgcgccgagccgggcggccgagagcggcggcggctgggagcgcgtcgggcccgggcggaaagtgcctgcggggggcgggcgagcgcgcggtgccggccgccccggggctcggcgcgggagccagagcgggagccggcgcggagcgggacgccgggtcccgagcggcccgcggccggggctcagcccccgcccctccctcctctccggcggcggcggcggcggcggcgggcggagtgagctgcggagcctggaatatggtcggggaaatggaaacgaaggagaagccgaagcccaccccagattacctgatgcagctgatgaacgacaagaagctcatgagcagcctgcccaacttctgcgggatcttcaaccacctcgagcggctgctggacgaagaaattagcagagtacggaaagacatgtacaatgacacattaaatggcagtacagagaaaaggagtgcagaattgcctgatgctgtgggacctattgttcagttacaagagaaactttatgtgcctgtaaaagaatacccagattttaattttgttgggagaatccttggacctagaggacttacagccaaacaacttgaagcagaaaccggatgtaaaatcatggtccgaggcaaaggctcaatgagggataaaaaaaaggaggagcaaaatagaggcaagcccaattgggagcatctaaatgaagatttacatgtactaatcactgtggaagatgctcagaacagagcagaaatcaaattgaagagagcagttgaagaagtgaagaaattattggtacctgcagcagaaggagaagacagcctgaagaagatgcagctgatggagcttgcgattctgaatggcacctacagagatgccaacattaaatcaccagcccttgccttttctcttgcagcaacagcccaggctgctccaaggatcattactgggcctgcgccggttctcccaccagctgccctgcgtactcctacgccagctggccctaccataatgcctttgatcagacaaatacagaccgctgtcatgccaaacggaactcctcacccaactgctgcaatagttcctccagggcccgaagctggtttaatctatacaccctatgagtacccctacacattggcaccagctacatcaatccttgagtatcctattgaacctagtggtgtattagagtggattgaaatgccagtcatgcctgatatttcagcccattgacttgctggatgaaggactagaatacagcagctgttataacacgaccagtcaatgtggaacaaactgtttctgtgcaacccctttgttttaccagacaaaatttgaatactttttttcctgaattgtatatgaccttggtgctgcatgcatgctgttgacttttaggactttgatcttttaaggttttttttccccagcattaatattgatttataaagatttgaaaatctttaatgaactggagaacactaagatttaaactcgaaaattcgttgttcaagtaaagaaagccatgatgctctgtatgttatctgtgtgtgtgcatgcactcaggtgccctttgtttcatgaacaaatacatttcattgtacatgttttctgtttaaatcattgtataaagtaattgcaggtcagaattataccacagaactgtttatgagaggcttgtgtctgttgcacatttcttgaagcatttttaaaataacatgtaacctgtaaccttgttgtttaagttttcttttctattaatactctgtcctgtggtcccgtgcatgctccttttcccagaactcctctctgctgcacccacagcatctgttcccgaggagttatgactcttgacttcctgcagggctggggctcttagccaccagctgctgttccagcactttcagcgcaagatctccctgattttgccacgtggaattgtacttgtatatgattaccttatctaaaatgaataagaggtgatggaccagtttactgcttagaaatagcaagaggcactgcagtaaaacttgtttctcattgtaaagcttcatgtcttttgtttgttggaaaatttttacttatagaaacttaattattagactggtaaaataaagaccaaaatatgcagatttctaattggcattcataaggtgaataataataagtgcccaatgaaaaaatctattatggttaatttcatttcttgctttgccacctaagcagtaaaacatgatattgaccacttggagaactcagaaaattattttaaatttctaagttataataaatttgcacacagataacatgcatgctatttatgtcacatctcacattaaattattttaaaataagcagtgcccttcaaaacagatgcagacatgtgtgttggtagtagtgaggagattggtattagcatcaagtcttcattgatgactaatttttaattcccttccttttatctttaggtatggctttcccaacgaaaggctaagaattcaagaacggtcttaactgaaccctcatcagatctgaatttaacaaatgcttagtctcagcagcctccgggggaaaaaagcttagcctagcagtcagtgacttacttgcactttttgcacatagatataaagtaaaattatgttattaatttggtttagtctgtaatattacacagtaatggtaatttataaaggagtgtatagtagtatactgactgctaagtgtactatactgtttgctttactaatcacctaattcattgcagttcatacttattgactcagagtttaaaaccacaatctgtaggctttaagaattgcttttaaacctttttaagtgataaactcttgaagtggtcttaaggttagcaaataattgtctgtattaaacatggcgttatttaagtagtcctgctgcaagaaaggcacttcagtgaatatgtgactagtaaagcttaaatatgtttggatctaatagagctcatgaaatactgtaacttggggattgtaaatgaatggatacaataggttaaggcccaagatgtttgaaatgaatgcaatattaatagatgcatatatacatgacatattgtggttaattttaaaactactgtgccttaacgtgtttcttaaacttttgtagtaaatgaacatttgaaatccattttgataaacctgctgttaatgttttttccccccttgtgaatgttttctaactttgtcttggtaattgcaatttaactaggtgcggtggctactaaagttcgaaggcacgatatgcgtgtccatccttaccaaaggattgtgaccgcagaccgaggttagtttagttctgcagttcttgtctataagaaatgcgttgggtgtccataaaatttgcaacaccacacctgatggaaaaatgtaattgcttacctgcacacagttttttttccttttctaaatttgtttgtgatcattgacagatttaagggttgggttttttgttttggtttggttttttctcccttcatattttaacttattaaatcttctattattatgtactatgatttattcctactaaaacataaattagtcaatttggggagctattaaattttgatgttgcctcagttattttcattaataacttttgctaaaatttaccttttaaaagttctgaaatttggggttggtattgcaaaatgaattgaacggatggtgctttaatgagagaagtaaaggaatatatgcctcctgtgtacttttggagaaaactgaagatttagtttccatttttctttataataaaatatttgagccactgtataaacatgagggtgcacatgtcaagtacttagctaaaatcaacaaagtgaggactgtgaagataactttcatgtagttggatttttttatataaattagagcgtcaattcccttttattcttacattctcttgccaaaatggatcctttgatttttgtcatttgctgctaaaatatattatctgaaggtaaactgtctcttgaagttctgtggtggtatgagatccagctgtgtgaatataatttttgactaacctgtgactggaaaataagtcttcatttttctcctttacaacttttataatttgtgtcctgtatatgcccttggacccttttataaattatttttgcttattgaggaatggtattttcggtttattgacattgaattgttttctaagtttttccatcacaagataggaatatcaagcatggtagtaaaaaaggattttttacaagtttctattatggcacatttgtttcctacaaattaaattgatcaaagtctcaaatattagtggaggaaaaagtgctggatttgtacttcaattgtacatcttctatgaatttatgaaggacctacctgctttatgtgattaccttgagtactgatgataaatactagacacagctgttgtccacatcagaaataacatgcctttcccaaagacattgttaatatttgtttagcataatccataaagaacgttgaagacttttaaactaatgtattcatcactaacagtgattgttcagtgaacaaaatagaccccagctccgtggtcgtctatgaggatggtattccttgtaagtgttctgtatgagcacgtctcatagggatggggaagttttttggaaagtcacttgagttttaaagaaactggacaattccatgaataatttgaggttttattcatattgctaatgtctacaattgttctaaagagtattttaaagtagtttttttcccccagctaatctttccctatgtatgcccccttttaggagatttctcaccattttgctttaacacaataattattggcctacttaatactccagtgccttgagatagttggacatattttaggaagattttattgtatttggaaaattacgacacattccatgcatggatcttttgtagttacgtgttttgattagtcctgtcactgtttttatttaaaatgcagtgtcagcaaaccgaaatgctcatttcttttttagtaacagagtactcgtatacttatcactgtatgcactcattgggtctaagggagatgtctgaagtccttcacttaaattattttatgatactactgttttctctatttttgaggttaaaattattttaaaaaaatattttgaagagaagtttattagtataagcattcatttaatgcaaaaaaactcagcccttggacatataaccatgtaattctatatgaacgtttagagtactacatggttgaccaatatctagttctttactaaaagtaaactcacctctttatatatatttcaaaactgaatttgaagcctattagagaccaactgaccttttagttgtaatgaactgtatggtcttgcatggtgacacacctgtgtaggaggccaagacttggcagaggatgtagtctaggtgtcctggtatatataaatggtcactcacttcgtttatatattccacactcagaaaagaagtcagagttttttctgagtaatacaaaaaccatcacttacataatttgtataagaaactttaaacagttttaatcaaaactatgagtaacatcaaaaatgctttaagattctatattttggaatacctgtgaagtagtatgactacatcatgttaaatatttattttcttctatgattttggagcagcaatttttattttaaataaaattccacttttaagaaattcagggaagatttggtcacattgaagatacagtatttttgtagtatttataaactgttctaaatgatagactatagaaaacatttttgtcatatgaaggtaaatcagtccattattttggatcatttaaactgaacattacaccttctgggctttgatttatgaagtggcacagaatctaactttgcactgaatatcttttcattcacatctcctctgccttagtcacaatggcaacagtacagaaaattctatcaaacctcagaatatagtagaaataattaagctgttgaatgagtcttaaaaattatactactgttaagtggaccaagtttggtgaagcagaatgtgacaaaggttgattaaggaaggaacaactcaaggacattgggaatgataacttttccacttgagaactactttatgttttactgtaatttttaaagtttttttgtcctttttgttattttgcaaaagaaaatagtatttacaggtggcttcttttaaaatataaaaatataaagcaggaatgtatatgaaatgtcagattttattgtatttgcagagtattagctttgaaattgaataaagaaagctgtttgtagttttaaaatgccttattggtatcaattagaaatttcttctattttttgatgtacttagagctttttgagtgtagaattttaaatggcaggattttacagtgtttacatgcaagtgcattttataagtgttctatatgtgtaaaatagtattttcaactggaaagtgttggctagtgcaaaaggcctggccattttctggttcccatgatgttgcctacactgctagactacagtttagtatcgctttgtatcatgaggccaagaaattccatgttgtttgtaaatagaataattgaaaaagcaataaacatttattgaacaaaagaaa

SEQ ID NO: 453478 - DNA, 10308 bp, Homo sapiens
ccgggggcttctcagttttattttatcaatctatatgcatatccttatgccagtctcacacagtgttaattactgtagctttgtagtcagttttgaaatcaagaagtatgagtccttcgttcttatttttcaaaattatcttggctgttctgtgtcccgtgtgtttctagataaattttaggatcatcttgtcaatttctggggatattggctgggttcttggtttacttccatgtgttctctttaaatggctagactgggctttggttttttcagtatcgggcggagcctggaatatggtcggggaaatggaaacgaaggagaagccgaagcccaccccagattacctgatgcagctgatgaacgacaagaagctcatgagcagcctgcccaacttctgcgggatcttcaaccacctcgagcggctgctggacgaagaaattagcagagtacggaaagacatgtacaatgacacattaaatggcagtacagagaaaaggagtgcagaattgcctgatgctgtgggacctattgttcagttacaagagaaactttatgtgcctgtaaaagaatacccagattttaattttgttgggagaatccttggacctagaggacttacagccaaacaacttgaagcagaaaccggatgtaaaatcatggtccgaggcaaaggctcaatgagggataaaaaaaaggaggagcaaaatagaggcaagcccaattgggagcatctaaatgaagatttacatgtactaatcactgtggaagatgctcagaacagagcagaaatcaaattgaagagagcagttgaagaagtgaagaaattattggtacctgcagcagaaggagaagacagcctgaagaagatgcagctgatggagcttgcgattctgaatggcacctacagagatgccaacattaaatcaccagcccttgccttttctcttgcagcaacagcccaggctgctccaaggatcattactgggcctgcgccggttctcccaccagctgccctgcgtactcctacgccagctggccctaccataatgcctttgatcagacaaatacagaccgctgtcatgccaaacggaactcctcacccaactgctgcaatagttcctccagggcccgaagctggtttaatctatacaccctatgagtacccctacacattggcaccagctacatcaatccttgagtatcctattgaacctagtggtgtattagagtggattgaaatgccagtcatgcctgatatttcagcccattgacttgctggatgaaggactagaatacagcagcttttaccagacaaaatttgaatactttttttcctgaattgtatatgaccttggtgctgcatgcatgctgttgacttttaggactttgatcttttaaggttttttttccccagcattaatattgatttataaagatttgaaaatctttaatgaactggagaacactaagatttaaactcgaaaattcgttgttcaagtaaagaaagccatgatgctctgtatgttatctgtgtgtgtgcatgcactcaggtgccctttgtttcatgaacaaatacatttcattgtacatgttttctgtttaaatcattgtataaagtaattgcaggtcagaattataccacagaactgtttatgagaggcttgtgtctgttgcacatttcttgaagcatttttaaaataacatgtaacctgtaaccttgttgtttaagttttcttttctattaatactctgtcctgtggtcccgtgcatgctccttttcccagaactcctctctgctgcacccacagcatctgttcccgaggagttatgactcttgacttcctgcagggctggggctcttagccaccagctgctgttccagcactttcagcgcaagatctccctgattttgccacgtggaattgtacttgtatatgattaccttatctaaaatgaataagaggtgatggaccagtttactgcttagaaatagcaagaggcactgcagtaaaacttgtttctcattgtaaagcttcatgtcttttgtttgttggaaaatttttacttatagaaacttaattattagactggtaaaataaagaccaaaatatgcagatttctaattggcattcataaggtgaataataataagtgcccaatgaaaaaatctattatggttaatttcatttcttgctttgccacctaagcagtaaaacatgatattgaccacttggagaactcagaaaattattttaaatttctaagttataataaatttgcacacagataacatgcatgctatttatgtcacatctcacattaaattattttaaaataagcagtgcccttcaaaacagatgcagacatgtgtgttggtagtagtgaggagattggtattagcatcaagtcttcattgatgactaatttttaattcccttccttttatctttaggtatggctttcccaacgaaaggctaagaattcaagaacggtcttaactgaaccctcatcagatctgaatttaacaaatgcttagtctcagcagcctccgggggaaaaaagcttagcctagcagtcagtgacttacttgcactttttgcacatagatataaagtaaaattatgttattaatttggtttagtctgtaatattacacagtaatggtaatttataaaggagtgtatagtagtatactgactgctaagtgtactatactgtttgctttactaatcacctaattcattgcagttcatacttattgactcagagtttaaaaccacaatctgtaggctttaagaattgcttttaaacctttttaagtgataaactcttgaagtggtcttaaggttagcaaataattgtctgtattaaacatggcgttatttaagtagtcctgctgcaagaaaggcacttcagtgaatatgtgactagtaaagcttaaatatgtttggatctaatagagctcatgaaatactgtaacttggggattgtaaatgaatggatacaataggttaaggcccaagatgtttgaaatgaatgcaatattaatagatgcatatatacatgacatattgtggttaattttaaaactactgtgccttaacgtgtttcttaaacttttgtagtaaatgaacatttgaaatccattttgataaacctgctgttaatgttttttccccccttgtgaatgttttctaactttgtcttggtaattgcaatttaactaggtgcggtggctactaaagttcgaaggcacgatatgcgtgtccatccttaccaaaggattgtgaccgcagaccgaggttagtttagttctgcagttcttgtctataagaaatgcgttgggtgtccataaaatttgcaacaccacacctgatggaaaaatgtaattgcttacctgcacacagttttttttccttttctaaatttgtttgtgatcattgacagatttaagggttgggttttttgttttggtttggttttttctcccttcatattttaacttattaaatcttctattattatgtactatgatttattcctactaaaacataaattagtcaatttggggagctattaaattttgatgttgcctcagttattttcattaataacttttgctaaaatttaccttttaaaagttctgaaatttggggttggtattgcaaaatgaattgaacggatggtgctttaatgagagaagtaaaggaatatatgcctcctgtgtacttttggagaaaactgaagatttagtttccatttttctttataataaaatatttgagccactgtataaacatgagggtgcacatgtcaagtacttagctaaaatcaacaaagtgaggactgtgaagataactttcatgtagttggatttttttatataaattagagcgtcaattcccttttattcttacattctcttgccaaaatggatcctttgatttttgtcatttgctgctaaaatatattatctgaaggtaaactgtctcttgaagttctgtggtggtatgagatccagctgtgtgaatataatttttgactaacctgtgactggaaaataagtcttcatttttctcctttacaacttttataatttgtgtcctgtatatgcccttggacccttttataaattatttttgcttattgaggaatggtattttcggtttattgacattgaattgttttctaagtttttccatcacaagataggaatatcaagcatggtagtaaaaaaggattttttacaagtttctattatggcacatttgtttcctacaaattaaattgatcaaagtctcaaatattagtggaggaaaaagtgctggatttgtacttcaattgtacatcttctatgaatttatgaaggacctacctgctttatgtgattaccttgagtactgatgataaatactagacacagctgttgtccacatcagaaataacatgcctttcccaaagacattgttaatatttgtttagcataatccataaagaacgttgaagacttttaaactaatgtattcatcactaacagtgattgttcagtgaacaaaatagaccccagctccgtggtcgtctatgaggatggtattccttgtaagtgttctgtatgagcacgtctcatagggatggggaagttttttggaaagtcacttgagttttaaagaaactggacaattccatgaataatttgaggttttattcatattgctaatgtctacaattgttctaaagagtattttaaagtagtttttttcccccagctaatctttccctatgtatgcccccttttaggagatttctcaccattttgctttaacacaataattattggcctacttaatactccagtgccttgagatagttggacatattttaggaagattttattgtatttggaaaattacgacacattccatgcatggatcttttgtagttacgtgttttgattagtcctgtcactgtttttatttaaaatgcagtgtcagcaaaccgaaatgctcatttcttttttagtaacagagtactcgtatacttatcactgtatgcactcattgggtctaagggagatgtctgaagtccttcacttaaattattttatgatactactgttttctctatttttgaggttaaaattattttaaaaaaatattttgaagagaagtttattagtataagcattcatttaatgcaaaaaaactcagcccttggacatataaccatgtaattctatatgaacgtttagagtactacatggttgaccaatatctagttctttactaaaagtaaactcacctctttatatatatttcaaaactgaatttgaagcctattagagaccaactgaccttttagttgtaatgaactgtatggtcttgcatggtgacacacctgtgtaggaggccaagacttggcagaggatgtagtctaggtgtcctggtatatataaatggtcactcacttcgtttatatattccacactcagaaaagaagtcagagttttttctgagtaatacaaaaaccatcacttacataatttgtataagaaactttaaacagttttaatcaaaactatgagtaacatcaaaaatgctttaagattctatattttggaatacctgtgaagtagtatgactacatcatgttaaatatttattttcttctatgattttggagcagcaatttttattttaaataaaattccacttttaagaaattcagggaagatttggtcacattgaagatacagtatttttgtagtatttataaactgttctaaatgatagactatagaaaacatttttgtcatatgaaggtaaatcagtccattattttggatcatttaaactgaacattacaccttctgggctttgatttatgaagtggcacagaatctaactttgcactgaatatcttttcattcacatctcctctgccttagtcacaatggcaacagtacagaaaattctatcaaacctcagaatatagtagaaataattaagctgttgaatgagtcttaaaaattatactactgttaagtggaccaagtttggtgaagcagaatgtgacaaaggttgattaaggaaggaacaactcaaggacattgggaatgataacttttccacttgagaactactttatgttttactgtaatttttaaagtttttttgtcctttttgttattttgcaaaagaaaatagtatttacaggtggcttcttttaaaatataaaaatataaagcaggaatgtatatgaaatgtcagattttattgtatttgcagagtattagctttgaaattgaataaagaaagctgtttgtagttttaaaatgccttattggtatcaattagaaatttcttctattttttgatgtacttagagctttttgagtgtagaattttaaatggcaggattttacagtgtttacatgcaagtgcattttataagtgttctatatgtgtaaaatagtattttcaactggaaagtgttggctagtgcaaaaggcctggccattttctggttcccatgatgttgcctacactgctagactacagtttagtatcgctttgtatcatgaggccaagaaattccatgttgtttgtaaatagaataattgaaaaagcaataaacatttattgaacaaaagaaaccttgtttggcccagagtttatgttgaaccaaatggttcatagaattttgaatttctttagattcatttctgttaatcatcagttattaataatcacatccatcattaatagttgctttaatgcttgcatcttagagaatactaatgcttaatagcagtcagatactgataactgcactgactgtttaaaaattctgtataccaaacctattcattgttgtttttcaatttccttcattgactgctactaactattagttgttagttgtattttatttctattttttcttgttaaccagtttttttctttttcattgggggagtgggctcttcttcatttgttcaaatcatgatacgaaattgtcatgattttaattgtattctgtagatggtgtcaatcagtttgtcagaattaaacatgcttttttttttattagttgtgattagtttttcatgttgtcattaagccgtcactagctgaaactaatctcttctctatcttttcttttcttttttttgttttgtttttttttgtttctaaccacccagccgccaccggcaactaacctatgaccttctgacctctgaactcttcacccaatgatgacctgaccatgcctgcctgctgatcagttaactggtaatcgcctttgcttgcctgtcgtcagtgcagcgagctgaggcacttgtccgttcgtcttaccatctaaccaaacaaaagacaaagaaattgttgtcctccaactcagctttttttttttttttttcctgtttgggtgaaagtggttctagaaactgcactgaatagtagtaaagcaataaggcccaattcatcccacagcactgatcatcttttaatatcccaccctaagcgaacggtaagaaggcctctcttaagaaggggagacagatggtccttaactactcaatgacagaggcagttactgtgagagacttctaggaatctttttcttctcatagcgaagtcaaagctctctctgaatgtactgtgtgatgatgcatcatgcatgaaccttcggtcagggatatcattggtgaagtgatttcaaaaagtattcaaaatttgatatgctgtttagtcactacagtgccctcaaagggcagaagttgcagccttttttatattgcctgccaaaatttgaagtattagaagaaagtgtgccatgagagaaaaacttaaggagttttgaaaagtaatgcaaataacaaaactgcaacactatttttaaaaagataaatatctgagttaaaattactgaatctttattttacacctaaaaaaatatgagaacaaggtacatgcattatgtgtcacattactgggcaaactgttcaagtatttttttttaaacctccctgtatagaaaaaaatcattaaggatgtaaaagccatgcttgcctatttgctgtatacatgtaatgaaattgtagataaagtgtagtgcattgaaacaaatgaacaaaaagtagatacttttactatacaagggtgctggtgcagaaaaaaatatatatatttttggaaatgtagcattttatactttcaagtgttataaaaaaaaagaaaaagaacaaagaaaccctttatttcattaaatgattttttctggtggttgtcaagaaacaaaagaccaaaagagcctttttgtctttcttttttattttttaagtattggaataagtctaaagaaaagaaagtgccttattttccttcatggtcattcagtcaagtgtctcataaagatcagctcctccctcagaatacaagttaatgcatgttactcagtcgcccagtatgtgaaagaagatatgagggagacaaatgagttgatagtttgaattataggatttttgccacgttaccttgatgcaaatttgccaaatctgatactgtgaaaagatttgataacttttctaatgcctgactagtaagttttaaaacatcattctttaaaagaatagtttaatacttttggttattccaatcttcaatgttaacccaaaggattctgagataaaaattatgtgtcatctaaacttcagtttacagacaaaattagagctttgttttatttggagaagggggatgcattcatttgattttgttttttgtttttaattaattgaatataataggatacctagcaaatgttttcacaaaagtgaatctttgtgattttcattctagaaaacaatgttttaaatcacccaaatttaatcacatgtctttatatcataccagataactggtgtagtgtatccttttactgtttcaataacctctgcctcccccaccccttaactttaaaagaatgtgaaaaactagcatcatagtgcatataaatactcaaccacatttcagcttaagcttctaatttctcaagaagttgaaacagttagttatgtagttgaagcaatttgtgtgcaaagcctacatctaaacacttgagtgaataatcattaactgctcagtaccagacgtggcaaatctcaagtgacagtggaccccccccccccgcccagcttatcaactcgtcccctcttccacaccttcccagcatcacagtcagaggtcagcaggaagctgagtcattaccttcttggtgacctcccccaccatcttgtctcacttggaaaccgttgtcagtttatttactatgcaatagacattcattgttttgtatccagctagctttggtttaatatgccactgctttgtctttctgttacacatacagttttgatttatttacaatatatgctgtgccattttgatttttatattgtttggttggttgaataaatttgcgacactcaaacacttgaggtgatagttgttaaaaacaataccagtatttgatccagtttcatctcaactatgttatacctggacattttagatgtttatcaaaggtcttttatggggaagaaagtaaatgtatgaaataataaatgtgtgacatttatagggaatgttggctctgaacaaacttttgaaaacttggttgacaaaattttggatcaactgaaaaaagcatgacttttgaaatctctgaatgccttggttctcagtattatcattctttattgaatttatttcttattaaaatatgtagtttttaagactttttttctgacagtattatgtaattttttagcgtgggtagatgggagtgtcgcttgtatgttatcgtacagctgacatgtatttttgtctattctttattatcttagtttcatgctatgtatgtaccataaccaacctattgcctatgagaaacatgtaagataatgtatttacagccattgttacaagtttataatgtatttttctatcttgttttatatgtatgttatataacattcaaaaagaatttttttcttgattgagaaaaggatacaaaatgcaaaatccacaattttgataactgaaaattgccaattgttttgcagtactttattatattgggtgtcttgtcttttttgggcttttagttagctaatgaatgaatacattagacacttttgggttttagttgggattttacatagcttgcattttaattctttggttctttgctgtttctattaacccacagcattattttaataaatgttataataccacctac

SEQ ID NO: 453479 - DNA, 11309 bp, Homo sapiens
ccgggggcttctcagttttattttatcaatctatatgcatatccttatgccagtctcacacagtgttaattactgtagctttgtagtcagttttgaaatcaagaagtatgagtccttcgttcttatttttcaaaattatcttggctgttctgtgtcccgtgtgtttctagataaattttaggatcatcttgtcaatttctggggatattggctgggttcttggtttacttccatgtgttctctttaaatggctagactgggctttggttttttcagtatcgggcggagcctggaatatggtcggggaaatggaaacgaaggagaagccgaagcccaccccagattacctgatgcagctgatgaacgacaagaagctcatgagcagcctgcccaacttctgcgggatcttcaaccacctcgagcggctgctggacgaagaaattagcagagtacggaaagacatgtacaatgacacattaaatggcagtacagagaaaaggagtgcagaattgcctgatgctgtgggacctattgttcagttacaagagaaactttatgtgcctgtaaaagaatacccagattttaattttgttgggagaatccttggacctagaggacttacagccaaacaacttgaagcagaaaccggatgtaaaatcatggtccgaggcaaaggctcaatgagggataaaaaaaaggaggagcaaaatagaggcaagcccaattgggagcatctaaatgaagatttacatgtactaatcactgtggaagatgctcagaacagagcagaaatcaaattgaagagagcagttgaagaagtgaagaaattattggtacctgcagcagaaggagaagacagcctgaagaagatgcagctgatggagcttgcgattctgaatggcacctacagagatgccaacattaaatcaccagcccttgccttttctcttgcagcaacagcccaggctgctccaaggatcattactgggcctgcgccggttctcccaccagctgccctgcgtactcctacgccagctggccctaccataatgcctttgatcagacaaatacagaccgctgtcatgccaaacggaactcctcacccaactgctgcaatagttcctccagggcccgaagctggtttaatctatacaccctatgagtacccctacacattggcaccagctacatcaatccttgagtatcctattgaacctagtggtgtattaggtaagttcttctccccatggggttaacaacattctctttataaatatttttgctccctcagattttgaaatgattttatcagttttagagaggcaagacaagtttgcattagggaagaccgaaaactaaattttgttttatttcagcctctcataagggttcccctttgaaataattgcaccttaaatttattcagatccactttggtaactgaggttcagtttggttgggtaaatctgttgtgtacatttcaacaaatacttttacatttgacattactgaggtcattctgagttttaggtcccaccccattggcccgtcacctccatcagctccacttctcaaactttatttgagatttattttatctcacaggtttgtgtaattgttggaaaatttttaaacttctaagtgaaagtagtctgagcgctttataaaattcatattattgtgtgtgttttgtaatatttgcgatcacttaaaatatcagataaatacagtcatgcatcgcttaacaacggggatacagtctaagaattgccttgtctggcagtttcatcatttggtgtacatcatagagtgtacttacacagacatagatgatatcgtttactacacacctaggctgtgtggtatagccattataatcttatgggaccacatagtataagtggtccgttgttgaccaaaatgttgttatgcaggcatgactgtagttgtattcttaagatttttcagttcttgtgttttggagtcctagtcatattaaacatgagagatactcttaatttcagtagtacagtatggaatagttaaataaatagcaaatcactgaattcagaatctcacttaaggcagaaattaaaatcataatataaacgcttggttttacatgaacaaaaagtggtgtgctcgaaaaagacattactgatgccttttttttatagagtggattgaaatgccagtcatgcctgatatttcagcccattgacttgctggatgaaggactagaatacagcagctgttataacacgaccagtcaatgtggaacaaactgtttctgtgcaacccctttgttttaccagacaaaatttgaatactttttttcctgaattgtatatgaccttggtgctgcatgcatgctgttgacttttaggactttgatcttttaaggttttttttccccagcattaatattgatttataaagatttgaaaatctttaatgaactggagaacactaagatttaaactcgaaaattcgttgttcaagtaaagaaagccatgatgctctgtatgttatctgtgtgtgtgcatgcactcaggtgccctttgtttcatgaacaaatacatttcattgtacatgttttctgtttaaatcattgtataaagtaattgcaggtcagaattataccacagaactgtttatgagaggcttgtgtctgttgcacatttcttgaagcatttttaaaataacatgtaacctgtaaccttgttgtttaagttttcttttctattaatactctgtcctgtggtcccgtgcatgctccttttcccagaactcctctctgctgcacccacagcatctgttcccgaggagttatgactcttgacttcctgcagggctggggctcttagccaccagctgctgttccagcactttcagcgcaagatctccctgattttgccacgtggaattgtacttgtatatgattaccttatctaaaatgaataagaggtgatggaccagtttactgcttagaaatagcaagaggcactgcagtaaaacttgtttctcattgtaaagcttcatgtcttttgtttgttggaaaatttttacttatagaaacttaattattagactggtaaaataaagaccaaaatatgcagatttctaattggcattcataaggtgaataataataagtgcccaatgaaaaaatctattatggttaatttcatttcttgctttgccacctaagcagtaaaacatgatattgaccacttggagaactcagaaaattattttaaatttctaagttataataaatttgcacacagataacatgcatgctatttatgtcacatctcacattaaattattttaaaataagcagtgcccttcaaaacagatgcagacatgtgtgttggtagtagtgaggagattggtattagcatcaagtcttcattgatgactaatttttaattcccttccttttatctttaggtatggctttcccaacgaaaggctaagaattcaagaacggtcttaactgaaccctcatcagatctgaatttaacaaatgcttagtctcagcagcctccgggggaaaaaagcttagcctagcagtcagtgacttacttgcactttttgcacatagatataaagtaaaattatgttattaatttggtttagtctgtaatattacacagtaatggtaatttataaaggagtgtatagtagtatactgactgctaagtgtactatactgtttgctttactaatcacctaattcattgcagttcatacttattgactcagagtttaaaaccacaatctgtaggctttaagaattgcttttaaacctttttaagtgataaactcttgaagtggtcttaaggttagcaaataattgtctgtattaaacatggcgttatttaagtagtcctgctgcaagaaaggcacttcagtgaatatgtgactagtaaagcttaaatatgtttggatctaatagagctcatgaaatactgtaacttggggattgtaaatgaatggatacaataggttaaggcccaagatgtttgaaatgaatgcaatattaatagatgcatatatacatgacatattgtggttaattttaaaactactgtgccttaacgtgtttcttaaacttttgtagtaaatgaacatttgaaatccattttgataaacctgctgttaatgttttttccccccttgtgaatgttttctaactttgtcttggtaattgcaatttaactaggtgcggtggctactaaagttcgaaggcacgatatgcgtgtccatccttaccaaaggattgtgaccgcagaccgaggttagtttagttctgcagttcttgtctataagaaatgcgttgggtgtccataaaatttgcaacaccacacctgatggaaaaatgtaattgcttacctgcacacagttttttttccttttctaaatttgtttgtgatcattgacagatttaagggttgggttttttgttttggtttggttttttctcccttcatattttaacttattaaatcttctattattatgtactatgatttattcctactaaaacataaattagtcaatttggggagctattaaattttgatgttgcctcagttattttcattaataacttttgctaaaatttaccttttaaaagttctgaaatttggggttggtattgcaaaatgaattgaacggatggtgctttaatgagagaagtaaaggaatatatgcctcctgtgtacttttggagaaaactgaagatttagtttccatttttctttataataaaatatttgagccactgtataaacatgagggtgcacatgtcaagtacttagctaaaatcaacaaagtgaggactgtgaagataactttcatgtagttggatttttttatataaattagagcgtcaattcccttttattcttacattctcttgccaaaatggatcctttgatttttgtcatttgctgctaaaatatattatctgaaggtaaactgtctcttgaagttctgtggtggtatgagatccagctgtgtgaatataatttttgactaacctgtgactggaaaataagtcttcatttttctcctttacaacttttataatttgtgtcctgtatatgcccttggacccttttataaattatttttgcttattgaggaatggtattttcggtttattgacattgaattgttttctaagtttttccatcacaagataggaatatcaagcatggtagtaaaaaaggattttttacaagtttctattatggcacatttgtttcctacaaattaaattgatcaaagtctcaaatattagtggaggaaaaagtgctggatttgtacttcaattgtacatcttctatgaatttatgaaggacctacctgctttatgtgattaccttgagtactgatgataaatactagacacagctgttgtccacatcagaaataacatgcctttcccaaagacattgttaatatttgtttagcataatccataaagaacgttgaagacttttaaactaatgtattcatcactaacagtgattgttcagtgaacaaaatagaccccagctccgtggtcgtctatgaggatggtattccttgtaagtgttctgtatgagcacgtctcatagggatggggaagttttttggaaagtcacttgagttttaaagaaactggacaattccatgaataatttgaggttttattcatattgctaatgtctacaattgttctaaagagtattttaaagtagtttttttcccccagctaatctttccctatgtatgcccccttttaggagatttctcaccattttgctttaacacaataattattggcctacttaatactccagtgccttgagatagttggacatattttaggaagattttattgtatttggaaaattacgacacattccatgcatggatcttttgtagttacgtgttttgattagtcctgtcactgtttttatttaaaatgcagtgtcagcaaaccgaaatgctcatttcttttttagtaacagagtactcgtatacttatcactgtatgcactcattgggtctaagggagatgtctgaagtccttcacttaaattattttatgatactactgttttctctatttttgaggttaaaattattttaaaaaaatattttgaagagaagtttattagtataagcattcatttaatgcaaaaaaactcagcccttggacatataaccatgtaattctatatgaacgtttagagtactacatggttgaccaatatctagttctttactaaaagtaaactcacctctttatatatatttcaaaactgaatttgaagcctattagagaccaactgaccttttagttgtaatgaactgtatggtcttgcatggtgacacacctgtgtaggaggccaagacttggcagaggatgtagtctaggtgtcctggtatatataaatggtcactcacttcgtttatatattccacactcagaaaagaagtcagagttttttctgagtaatacaaaaaccatcacttacataatttgtataagaaactttaaacagttttaatcaaaactatgagtaacatcaaaaatgctttaagattctatattttggaatacctgtgaagtagtatgactacatcatgttaaatatttattttcttctatgattttggagcagcaatttttattttaaataaaattccacttttaagaaattcagggaagatttggtcacattgaagatacagtatttttgtagtatttataaactgttctaaatgatagactatagaaaacatttttgtcatatgaaggtaaatcagtccattattttggatcatttaaactgaacattacaccttctgggctttgatttatgaagtggcacagaatctaactttgcactgaatatcttttcattcacatctcctctgccttagtcacaatggcaacagtacagaaaattctatcaaacctcagaatatagtagaaataattaagctgttgaatgagtcttaaaaattatactactgttaagtggaccaagtttggtgaagcagaatgtgacaaaggttgattaaggaaggaacaactcaaggacattgggaatgataacttttccacttgagaactactttatgttttactgtaatttttaaagtttttttgtcctttttgttattttgcaaaagaaaatagtatttacaggtggcttcttttaaaatataaaaatataaagcaggaatgtatatgaaatgtcagattttattgtatttgcagagtattagctttgaaattgaataaagaaagctgtttgtagttttaaaatgccttattggtatcaattagaaatttcttctattttttgatgtacttagagctttttgagtgtagaattttaaatggcaggattttacagtgtttacatgcaagtgcattttataagtgttctatatgtgtaaaatagtattttcaactggaaagtgttggctagtgcaaaaggcctggccattttctggttcccatgatgttgcctacactgctagactacagtttagtatcgctttgtatcatgaggccaagaaattccatgttgtttgtaaatagaataattgaaaaagcaataaacatttattgaacaaaagaaaccttgtttggcccagagtttatgttgaaccaaatggttcatagaattttgaatttctttagattcatttctgttaatcatcagttattaataatcacatccatcattaatagttgctttaatgcttgcatcttagagaatactaatgcttaatagcagtcagatactgataactgcactgactgtttaaaaattctgtataccaaacctattcattgttgtttttcaatttccttcattgactgctactaactattagttgttagttgtattttatttctattttttcttgttaaccagtttttttctttttcattgggggagtgggctcttcttcatttgttcaaatcatgatacgaaattgtcatgattttaattgtattctgtagatggtgtcaatcagtttgtcagaattaaacatgcttttttttttattagttgtgattagtttttcatgttgtcattaagccgtcactagctgaaactaatctcttctctatcttttcttttcttttttttgttttgtttttttttgtttctaaccacccagccgccaccggcaactaacctatgaccttctgacctctgaactcttcacccaatgatgacctgaccatgcctgcctgctgatcagttaactggtaatcgcctttgcttgcctgtcgtcagtgcagcgagctgaggcacttgtccgttcgtcttaccatctaaccaaacaaaagacaaagaaattgttgtcctccaactcagctttttttttttttttttcctgtttgggtgaaagtggttctagaaactgcactgaatagtagtaaagcaataaggcccaattcatcccacagcactgatcatcttttaatatcccaccctaagcgaacggtaagaaggcctctcttaagaaggggagacagatggtccttaactactcaatgacagaggcagttactgtgagagacttctaggaatctttttcttctcatagcgaagtcaaagctctctctgaatgtactgtgtgatgatgcatcatgcatgaaccttcggtcagggatatcattggtgaagtgatttcaaaaagtattcaaaatttgatatgctgtttagtcactacagtgccctcaaagggcagaagttgcagccttttttatattgcctgccaaaatttgaagtattagaagaaagtgtgccatgagagaaaaacttaaggagttttgaaaagtaatgcaaataacaaaactgcaacactatttttaaaaagataaatatctgagttaaaattactgaatctttattttacacctaaaaaaatatgagaacaaggtacatgcattatgtgtcacattactgggcaaactgttcaagtatttttttttaaacctccctgtatagaaaaaaatcattaaggatgtaaaagccatgcttgcctatttgctgtatacatgtaatgaaattgtagataaagtgtagtgcattgaaacaaatgaacaaaaagtagatacttttactatacaagggtgctggtgcagaaaaaaatatatatatttttggaaatgtagcattttatactttcaagtgttataaaaaaaaagaaaaagaacaaagaaaccctttatttcattaaatgattttttctggtggttgtcaagaaacaaaagaccaaaagagcctttttgtctttcttttttattttttaagtattggaataagtctaaagaaaagaaagtgccttattttccttcatggtcattcagtcaagtgtctcataaagatcagctcctccctcagaatacaagttaatgcatgttactcagtcgcccagtatgtgaaagaagatatgagggagacaaatgagttgatagtttgaattataggatttttgccacgttaccttgatgcaaatttgccaaatctgatactgtgaaaagatttgataacttttctaatgcctgactagtaagttttaaaacatcattctttaaaagaatagtttaatacttttggttattccaatcttcaatgttaacccaaaggattctgagataaaaattatgtgtcatctaaacttcagtttacagacaaaattagagctttgttttatttggagaagggggatgcattcatttgattttgttttttgtttttaattaattgaatataataggatacctagcaaatgttttcacaaaagtgaatctttgtgattttcattctagaaaacaatgttttaaatcacccaaatttaatcacatgtctttatatcataccagataactggtgtagtgtatccttttactgtttcaataacctctgcctcccccaccccttaactttaaaagaatgtgaaaaactagcatcatagtgcatataaatactcaaccacatttcagcttaagcttctaatttctcaagaagttgaaacagttagttatgtagttgaagcaatttgtgtgcaaagcctacatctaaacacttgagtgaataatcattaactgctcagtaccagacgtggcaaatctcaagtgacagtggaccccccccccccgcccagcttatcaactcgtcccctcttccacaccttcccagcatcacagtcagaggtcagcaggaagctgagtcattaccttcttggtgacctcccccaccatcttgtctcacttggaaaccgttgtcagtttatttactatgcaatagacattcattgttttgtatccagctagctttggtttaatatgccactgctttgtctttctgttacacatacagttttgatttatttacaatatatgctgtgccattttgatttttatattgtttggttggttgaataaatttgcgacactcaaacacttgaggtgatagttgttaaaaacaataccagtatttgatccagtttcatctcaactatgttatacctggacattttagatgtttatcaaaggtcttttatggggaagaaagtaaatgtatgaaataataaatgtgtgacatttatagggaatgttggctctgaacaaacttttgaaaacttggttgacaaaattttggatcaactgaaaaaagcatgacttttgaaatctctgaatgccttggttctcagtattatcattctttattgaatttatttcttattaaaatatgtagtttttaagactttttttctgacagtattatgtaattttttagcgtgggtagatgggagtgtcgcttgtatgttatcgtacagctgacatgtatttttgtctattctttattatcttagtttcatgctatgtatgtaccataaccaacctattgcctatgagaaacatgtaagataatgtatttacagccattgttacaagtttataatgtatttttctatcttgttttatatgtatgttatataacattcaaaaagaatttttttcttgattgagaaaaggatacaaaatgcaaaatccacaattttgataactgaaaattgccaattgttttgcagtactttattatattgggtgtcttgtcttttttgggcttttagttagctaatgaatgaatacattagacacttttgggttttagttgggattttacatagcttgcattttaattctttggttctttgctgtttctattaacccacagcattattttaataaatgttataataccacctac

SEQ ID NO: 453480 - DNA, 10362 bp, Homo sapiens
ccgggggcttctcagttttattttatcaatctatatgcatatccttatgccagtctcacacagtgttaattactgtagctttgtagtcagttttgaaatcaagaagtatgagtccttcgttcttatttttcaaaattatcttggctgttctgtgtcccgtgtgtttctagataaattttaggatcatcttgtcaatttctggggatattggctgggttcttggtttacttccatgtgttctctttaaatggctagactgggctttggttttttcagtatcgggcggagcctggaatatggtcggggaaatggaaacgaaggagaagccgaagcccaccccagattacctgatgcagctgatgaacgacaagaagctcatgagcagcctgcccaacttctgcgggatcttcaaccacctcgagcggctgctggacgaagaaattagcagagtacggaaagacatgtacaatgacacattaaatggcagtacagagaaaaggagtgcagaattgcctgatgctgtgggacctattgttcagttacaagagaaactttatgtgcctgtaaaagaatacccagattttaattttgttgggagaatccttggacctagaggacttacagccaaacaacttgaagcagaaaccggatgtaaaatcatggtccgaggcaaaggctcaatgagggataaaaaaaaggaggagcaaaatagaggcaagcccaattgggagcatctaaatgaagatttacatgtactaatcactgtggaagatgctcagaacagagcagaaatcaaattgaagagagcagttgaagaagtgaagaaattattggtacctgcagcagaaggagaagacagcctgaagaagatgcagctgatggagcttgcgattctgaatggcacctacagagatgccaacattaaatcaccagcccttgccttttctcttgcagcaacagcccaggctgctccaaggatcattactgggcctgcgccggttctcccaccagctgccctgcgtactcctacgccagctggccctaccataatgcctttgatcagacaaatacagaccgctgtcatgccaaacggaactcctcacccaactgctgcaatagttcctccagggcccgaagctggtttaatctatacaccctatgagtacccctacacattggcaccagctacatcaatccttgagtatcctattgaacctagtggtgtattagagtggattgaaatgccagtcatgcctgatatttcagcccattgacttgctggatgaaggactagaatacagcagctgttataacacgaccagtcaatgtggaacaaactgtttctgtgcaacccctttgttttaccagacaaaatttgaatactttttttcctgaattgtatatgaccttggtgctgcatgcatgctgttgacttttaggactttgatcttttaaggttttttttccccagcattaatattgatttataaagatttgaaaatctttaatgaactggagaacactaagatttaaactcgaaaattcgttgttcaagtaaagaaagccatgatgctctgtatgttatctgtgtgtgtgcatgcactcaggtgccctttgtttcatgaacaaatacatttcattgtacatgttttctgtttaaatcattgtataaagtaattgcaggtcagaattataccacagaactgtttatgagaggcttgtgtctgttgcacatttcttgaagcatttttaaaataacatgtaacctgtaaccttgttgtttaagttttcttttctattaatactctgtcctgtggtcccgtgcatgctccttttcccagaactcctctctgctgcacccacagcatctgttcccgaggagttatgactcttgacttcctgcagggctggggctcttagccaccagctgctgttccagcactttcagcgcaagatctccctgattttgccacgtggaattgtacttgtatatgattaccttatctaaaatgaataagaggtgatggaccagtttactgcttagaaatagcaagaggcactgcagtaaaacttgtttctcattgtaaagcttcatgtcttttgtttgttggaaaatttttacttatagaaacttaattattagactggtaaaataaagaccaaaatatgcagatttctaattggcattcataaggtgaataataataagtgcccaatgaaaaaatctattatggttaatttcatttcttgctttgccacctaagcagtaaaacatgatattgaccacttggagaactcagaaaattattttaaatttctaagttataataaatttgcacacagataacatgcatgctatttatgtcacatctcacattaaattattttaaaataagcagtgcccttcaaaacagatgcagacatgtgtgttggtagtagtgaggagattggtattagcatcaagtcttcattgatgactaatttttaattcccttccttttatctttaggtatggctttcccaacgaaaggctaagaattcaagaacggtcttaactgaaccctcatcagatctgaatttaacaaatgcttagtctcagcagcctccgggggaaaaaagcttagcctagcagtcagtgacttacttgcactttttgcacatagatataaagtaaaattatgttattaatttggtttagtctgtaatattacacagtaatggtaatttataaaggagtgtatagtagtatactgactgctaagtgtactatactgtttgctttactaatcacctaattcattgcagttcatacttattgactcagagtttaaaaccacaatctgtaggctttaagaattgcttttaaacctttttaagtgataaactcttgaagtggtcttaaggttagcaaataattgtctgtattaaacatggcgttatttaagtagtcctgctgcaagaaaggcacttcagtgaatatgtgactagtaaagcttaaatatgtttggatctaatagagctcatgaaatactgtaacttggggattgtaaatgaatggatacaataggttaaggcccaagatgtttgaaatgaatgcaatattaatagatgcatatatacatgacatattgtggttaattttaaaactactgtgccttaacgtgtttcttaaacttttgtagtaaatgaacatttgaaatccattttgataaacctgctgttaatgttttttccccccttgtgaatgttttctaactttgtcttggtaattgcaatttaactaggtgcggtggctactaaagttcgaaggcacgatatgcgtgtccatccttaccaaaggattgtgaccgcagaccgaggttagtttagttctgcagttcttgtctataagaaatgcgttgggtgtccataaaatttgcaacaccacacctgatggaaaaatgtaattgcttacctgcacacagttttttttccttttctaaatttgtttgtgatcattgacagatttaagggttgggttttttgttttggtttggttttttctcccttcatattttaacttattaaatcttctattattatgtactatgatttattcctactaaaacataaattagtcaatttggggagctattaaattttgatgttgcctcagttattttcattaataacttttgctaaaatttaccttttaaaagttctgaaatttggggttggtattgcaaaatgaattgaacggatggtgctttaatgagagaagtaaaggaatatatgcctcctgtgtacttttggagaaaactgaagatttagtttccatttttctttataataaaatatttgagccactgtataaacatgagggtgcacatgtcaagtacttagctaaaatcaacaaagtgaggactgtgaagataactttcatgtagttggatttttttatataaattagagcgtcaattcccttttattcttacattctcttgccaaaatggatcctttgatttttgtcatttgctgctaaaatatattatctgaaggtaaactgtctcttgaagttctgtggtggtatgagatccagctgtgtgaatataatttttgactaacctgtgactggaaaataagtcttcatttttctcctttacaacttttataatttgtgtcctgtatatgcccttggacccttttataaattatttttgcttattgaggaatggtattttcggtttattgacattgaattgttttctaagtttttccatcacaagataggaatatcaagcatggtagtaaaaaaggattttttacaagtttctattatggcacatttgtttcctacaaattaaattgatcaaagtctcaaatattagtggaggaaaaagtgctggatttgtacttcaattgtacatcttctatgaatttatgaaggacctacctgctttatgtgattaccttgagtactgatgataaatactagacacagctgttgtccacatcagaaataacatgcctttcccaaagacattgttaatatttgtttagcataatccataaagaacgttgaagacttttaaactaatgtattcatcactaacagtgattgttcagtgaacaaaatagaccccagctccgtggtcgtctatgaggatggtattccttgtaagtgttctgtatgagcacgtctcatagggatggggaagttttttggaaagtcacttgagttttaaagaaactggacaattccatgaataatttgaggttttattcatattgctaatgtctacaattgttctaaagagtattttaaagtagtttttttcccccagctaatctttccctatgtatgcccccttttaggagatttctcaccattttgctttaacacaataattattggcctacttaatactccagtgccttgagatagttggacatattttaggaagattttattgtatttggaaaattacgacacattccatgcatggatcttttgtagttacgtgttttgattagtcctgtcactgtttttatttaaaatgcagtgtcagcaaaccgaaatgctcatttcttttttagtaacagagtactcgtatacttatcactgtatgcactcattgggtctaagggagatgtctgaagtccttcacttaaattattttatgatactactgttttctctatttttgaggttaaaattattttaaaaaaatattttgaagagaagtttattagtataagcattcatttaatgcaaaaaaactcagcccttggacatataaccatgtaattctatatgaacgtttagagtactacatggttgaccaatatctagttctttactaaaagtaaactcacctctttatatatatttcaaaactgaatttgaagcctattagagaccaactgaccttttagttgtaatgaactgtatggtcttgcatggtgacacacctgtgtaggaggccaagacttggcagaggatgtagtctaggtgtcctggtatatataaatggtcactcacttcgtttatatattccacactcagaaaagaagtcagagttttttctgagtaatacaaaaaccatcacttacataatttgtataagaaactttaaacagttttaatcaaaactatgagtaacatcaaaaatgctttaagattctatattttggaatacctgtgaagtagtatgactacatcatgttaaatatttattttcttctatgattttggagcagcaatttttattttaaataaaattccacttttaagaaattcagggaagatttggtcacattgaagatacagtatttttgtagtatttataaactgttctaaatgatagactatagaaaacatttttgtcatatgaaggtaaatcagtccattattttggatcatttaaactgaacattacaccttctgggctttgatttatgaagtggcacagaatctaactttgcactgaatatcttttcattcacatctcctctgccttagtcacaatggcaacagtacagaaaattctatcaaacctcagaatatagtagaaataattaagctgttgaatgagtcttaaaaattatactactgttaagtggaccaagtttggtgaagcagaatgtgacaaaggttgattaaggaaggaacaactcaaggacattgggaatgataacttttccacttgagaactactttatgttttactgtaatttttaaagtttttttgtcctttttgttattttgcaaaagaaaatagtatttacaggtggcttcttttaaaatataaaaatataaagcaggaatgtatatgaaatgtcagattttattgtatttgcagagtattagctttgaaattgaataaagaaagctgtttgtagttttaaaatgccttattggtatcaattagaaatttcttctattttttgatgtacttagagctttttgagtgtagaattttaaatggcaggattttacagtgtttacatgcaagtgcattttataagtgttctatatgtgtaaaatagtattttcaactggaaagtgttggctagtgcaaaaggcctggccattttctggttcccatgatgttgcctacactgctagactacagtttagtatcgctttgtatcatgaggccaagaaattccatgttgtttgtaaatagaataattgaaaaagcaataaacatttattgaacaaaagaaaccttgtttggcccagagtttatgttgaaccaaatggttcatagaattttgaatttctttagattcatttctgttaatcatcagttattaataatcacatccatcattaatagttgctttaatgcttgcatcttagagaatactaatgcttaatagcagtcagatactgataactgcactgactgtttaaaaattctgtataccaaacctattcattgttgtttttcaatttccttcattgactgctactaactattagttgttagttgtattttatttctattttttcttgttaaccagtttttttctttttcattgggggagtgggctcttcttcatttgttcaaatcatgatacgaaattgtcatgattttaattgtattctgtagatggtgtcaatcagtttgtcagaattaaacatgcttttttttttattagttgtgattagtttttcatgttgtcattaagccgtcactagctgaaactaatctcttctctatcttttcttttcttttttttgttttgtttttttttgtttctaaccacccagccgccaccggcaactaacctatgaccttctgacctctgaactcttcacccaatgatgacctgaccatgcctgcctgctgatcagttaactggtaatcgcctttgcttgcctgtcgtcagtgcagcgagctgaggcacttgtccgttcgtcttaccatctaaccaaacaaaagacaaagaaattgttgtcctccaactcagctttttttttttttttttcctgtttgggtgaaagtggttctagaaactgcactgaatagtagtaaagcaataaggcccaattcatcccacagcactgatcatcttttaatatcccaccctaagcgaacggtaagaaggcctctcttaagaaggggagacagatggtccttaactactcaatgacagaggcagttactgtgagagacttctaggaatctttttcttctcatagcgaagtcaaagctctctctgaatgtactgtgtgatgatgcatcatgcatgaaccttcggtcagggatatcattggtgaagtgatttcaaaaagtattcaaaatttgatatgctgtttagtcactacagtgccctcaaagggcagaagttgcagccttttttatattgcctgccaaaatttgaagtattagaagaaagtgtgccatgagagaaaaacttaaggagttttgaaaagtaatgcaaataacaaaactgcaacactatttttaaaaagataaatatctgagttaaaattactgaatctttattttacacctaaaaaaatatgagaacaaggtacatgcattatgtgtcacattactgggcaaactgttcaagtatttttttttaaacctccctgtatagaaaaaaatcattaaggatgtaaaagccatgcttgcctatttgctgtatacatgtaatgaaattgtagataaagtgtagtgcattgaaacaaatgaacaaaaagtagatacttttactatacaagggtgctggtgcagaaaaaaatatatatatttttggaaatgtagcattttatactttcaagtgttataaaaaaaaagaaaaagaacaaagaaaccctttatttcattaaatgattttttctggtggttgtcaagaaacaaaagaccaaaagagcctttttgtctttcttttttattttttaagtattggaataagtctaaagaaaagaaagtgccttattttccttcatggtcattcagtcaagtgtctcataaagatcagctcctccctcagaatacaagttaatgcatgttactcagtcgcccagtatgtgaaagaagatatgagggagacaaatgagttgatagtttgaattataggatttttgccacgttaccttgatgcaaatttgccaaatctgatactgtgaaaagatttgataacttttctaatgcctgactagtaagttttaaaacatcattctttaaaagaatagtttaatacttttggttattccaatcttcaatgttaacccaaaggattctgagataaaaattatgtgtcatctaaacttcagtttacagacaaaattagagctttgttttatttggagaagggggatgcattcatttgattttgttttttgtttttaattaattgaatataataggatacctagcaaatgttttcacaaaagtgaatctttgtgattttcattctagaaaacaatgttttaaatcacccaaatttaatcacatgtctttatatcataccagataactggtgtagtgtatccttttactgtttcaataacctctgcctcccccaccccttaactttaaaagaatgtgaaaaactagcatcatagtgcatataaatactcaaccacatttcagcttaagcttctaatttctcaagaagttgaaacagttagttatgtagttgaagcaatttgtgtgcaaagcctacatctaaacacttgagtgaataatcattaactgctcagtaccagacgtggcaaatctcaagtgacagtggaccccccccccccgcccagcttatcaactcgtcccctcttccacaccttcccagcatcacagtcagaggtcagcaggaagctgagtcattaccttcttggtgacctcccccaccatcttgtctcacttggaaaccgttgtcagtttatttactatgcaatagacattcattgttttgtatccagctagctttggtttaatatgccactgctttgtctttctgttacacatacagttttgatttatttacaatatatgctgtgccattttgatttttatattgtttggttggttgaataaatttgcgacactcaaacacttgaggtgatagttgttaaaaacaataccagtatttgatccagtttcatctcaactatgttatacctggacattttagatgtttatcaaaggtcttttatggggaagaaagtaaatgtatgaaataataaatgtgtgacatttatagggaatgttggctctgaacaaacttttgaaaacttggttgacaaaattttggatcaactgaaaaaagcatgacttttgaaatctctgaatgccttggttctcagtattatcattctttattgaatttatttcttattaaaatatgtagtttttaagactttttttctgacagtattatgtaattttttagcgtgggtagatgggagtgtcgcttgtatgttatcgtacagctgacatgtatttttgtctattctttattatcttagtttcatgctatgtatgtaccataaccaacctattgcctatgagaaacatgtaagataatgtatttacagccattgttacaagtttataatgtatttttctatcttgttttatatgtatgttatataacattcaaaaagaatttttttcttgattgagaaaaggatacaaaatgcaaaatccacaattttgataactgaaaattgccaattgttttgcagtactttattatattgggtgtcttgtcttttttgggcttttagttagctaatgaatgaatacattagacacttttgggttttagttgggattttacatagcttgcattttaattctttggttctttgctgtttctattaacccacagcattattttaataaatgttataataccacctac

SEQ ID NO: 453481 - DNA, 11118 bp, Homo sapiens
caagaacggtcttaactgaaccctcatcagatctgaatttaacaaatgcttagtctcagcagcctccgccggaattccggccggaattccggcggagcctggaatatggtcggggaaatggaaacgaaggagaagccgaagcccaccccagattacctgatgcagctgatgaacgacaagaagctcatgagcagcctgcccaacttctgcgggatcttcaaccacctcgagcggctgctggacgaagaaattagcagagtacggaaagacatgtacaatgacacattaaatggcagtacagagaaaaggagtgcagaattgcctgatgctgtgggacctattgttcagttacaagagaaactttatgtgcctgtaaaagaatacccagattttaattttgttgggagaatccttggacctagaggacttacagccaaacaacttgaagcagaaaccggatgtaaaatcatggtccgaggcaaaggctcaatgagggataaaaaaaaggaggagcaaaatagaggcaagcccaattgggagcatctaaatgaagatttacatgtactaatcactgtggaagatgctcagaacagagcagaaatcaaattgaagagagcagttgaagaagtgaagaaattattggtacctgcagcagaaggagaagacagcctgaagaagatgcagctgatggagcttgcgattctgaatggcacctacagagatgccaacattaaatcaccagcccttgccttttctcttgcagcaacagcccaggctgctccaaggatcattactgggcctgcgccggttctcccaccagctgccctgcgtactcctacgccagctggccctaccataatgcctttgatcagacaaatacagaccgctgtcatgccaaacggaactcctcacccaactgctgcaatagttcctccagggcccgaagctggtttaatctatacaccctatgagtacccctacacattggcaccagctacatcaatccttgagtatcctattgaacctagtggtgtattaggtaagttcttctccccatggggttaacaacattctctttataaatatttttgctccctcagattttgaaatgattttatcagttttagagaggcaagacaagtttgcattagggaagaccgaaaactaaattttgttttatttcagcctctcataagggttcccctttgaaataattgcaccttaaatttattcagatccactttggtaactgaggttcagtttggttgggtaaatctgttgtgtacatttcaacaaatacttttacatttgacattactgaggtcattctgagttttaggtcccaccccattggcccgtcacctccatcagctccacttctcaaactttatttgagatttattttatctcacaggtttgtgtaattgttggaaaatttttaaacttctaagtgaaagtagtctgagcgctttataaaattcatattattgtgtgtgttttgtaatatttgcgatcacttaaaatatcagataaatacagtcatgcatcgcttaacaacggggatacagtctaagaattgccttgtctggcagtttcatcatttggtgtacatcatagagtgtacttacacagacatagatgatatcgtttactacacacctaggctgtgtggtatagccattataatcttatgggaccacatagtataagtggtccgttgttgaccaaaatgttgttatgcaggcatgactgtagttgtattcttaagatttttcagttcttgtgttttggagtcctagtcatattaaacatgagagatactcttaatttcagtagtacagtatggaatagttaaataaatagcaaatcactgaattcagaatctcacttaaggcagaaattaaaatcataatataaacgcttggttttacatgaacaaaaagtggtgtgctcgaaaaagacattactgatgccttttttttatagagtggattgaaatgccagtcatgcctgatatttcagcccattgacttgctggatgaaggactagaatacagcagctgttataacacgaccagtcaatgtggaacaaactgtttctgtgcaacccctttgttttaccagacaaaatttgaatactttttttcctgaattgtatatgaccttggtgctgcatgcatgctgttgacttttaggactttgatcttttaaggttttttttccccagcattaatattgatttataaagatttgaaaatctttaatgaactggagaacactaagatttaaactcgaaaattcgttgttcaagtaaagaaagccatgatgctctgtatgttatctgtgtgtgtgcatgcactcaggtgccctttgtttcatgaacaaatacatttcattgtacatgttttctgtttaaatcattgtataaagtaattgcaggtcagaattataccacagaactgtttatgagaggcttgtgtctgttgcacatttcttgaagcatttttaaaataacatgtaacctgtaaccttgttgtttaagttttcttttctattaatactctgtcctgtggtcccgtgcatgctccttttcccagaactcctctctgctgcacccacagcatctgttcccgaggagttatgactcttgacttcctgcagggctggggctcttagccaccagctgctgttccagcactttcagcgcaagatctccctgattttgccacgtggaattgtacttgtatatgattaccttatctaaaatgaataagaggtgatggaccagtttactgcttagaaatagcaagaggcactgcagtaaaacttgtttctcattgtaaagcttcatgtcttttgtttgttggaaaatttttacttatagaaacttaattattagactggtaaaataaagaccaaaatatgcagatttctaattggcattcataaggtgaataataataagtgcccaatgaaaaaatctattatggttaatttcatttcttgctttgccacctaagcagtaaaacatgatattgaccacttggagaactcagaaaattattttaaatttctaagttataataaatttgcacacagataacatgcatgctatttatgtcacatctcacattaaattattttaaaataagcagtgcccttcaaaacagatgcagacatgtgtgttggtagtagtgaggagattggtattagcatcaagtcttcattgatgactaatttttaattcccttccttttatctttaggtatggctttcccaacgaaaggctaagaattcaagaacggtcttaactgaaccctcatcagatctgaatttaacaaatgcttagtctcagcagcctccgggggaaaaaagcttagcctagcagtcagtgacttacttgcactttttgcacatagatataaagtaaaattatgttattaatttggtttagtctgtaatattacacagtaatggtaatttataaaggagtgtatagtagtatactgactgctaagtgtactatactgtttgctttactaatcacctaattcattgcagttcatacttattgactcagagtttaaaaccacaatctgtaggctttaagaattgcttttaaacctttttaagtgataaactcttgaagtggtcttaaggttagcaaataattgtctgtattaaacatggcgttatttaagtagtcctgctgcaagaaaggcacttcagtgaatatgtgactagtaaagcttaaatatgtttggatctaatagagctcatgaaatactgtaacttggggattgtaaatgaatggatacaataggttaaggcccaagatgtttgaaatgaatgcaatattaatagatgcatatatacatgacatattgtggttaattttaaaactactgtgccttaacgtgtttcttaaacttttgtagtaaatgaacatttgaaatccattttgataaacctgctgttaatgttttttccccccttgtgaatgttttctaactttgtcttggtaattgcaatttaactaggtgcggtggctactaaagttcgaaggcacgatatgcgtgtccatccttaccaaaggattgtgaccgcagaccgaggttagtttagttctgcagttcttgtctataagaaatgcgttgggtgtccataaaatttgcaacaccacacctgatggaaaaatgtaattgcttacctgcacacagttttttttccttttctaaatttgtttgtgatcattgacagatttaagggttgggttttttgttttggtttggttttttctcccttcatattttaacttattaaatcttctattattatgtactatgatttattcctactaaaacataaattagtcaatttggggagctattaaattttgatgttgcctcagttattttcattaataacttttgctaaaatttaccttttaaaagttctgaaatttggggttggtattgcaaaatgaattgaacggatggtgctttaatgagagaagtaaaggaatatatgcctcctgtgtacttttggagaaaactgaagatttagtttccatttttctttataataaaatatttgagccactgtataaacatgagggtgcacatgtcaagtacttagctaaaatcaacaaagtgaggactgtgaagataactttcatgtagttggatttttttatataaattagagcgtcaattcccttttattcttacattctcttgccaaaatggatcctttgatttttgtcatttgctgctaaaatatattatctgaaggtaaactgtctcttgaagttctgtggtggtatgagatccagctgtgtgaatataatttttgactaacctgtgactggaaaataagtcttcatttttctcctttacaacttttataatttgtgtcctgtatatgcccttggacccttttataaattatttttgcttattgaggaatggtattttcggtttattgacattgaattgttttctaagtttttccatcacaagataggaatatcaagcatggtagtaaaaaaggattttttacaagtttctattatggcacatttgtttcctacaaattaaattgatcaaagtctcaaatattagtggaggaaaaagtgctggatttgtacttcaattgtacatcttctatgaatttatgaaggacctacctgctttatgtgattaccttgagtactgatgataaatactagacacagctgttgtccacatcagaaataacatgcctttcccaaagacattgttaatatttgtttagcataatccataaagaacgttgaagacttttaaactaatgtattcatcactaacagtgattgttcagtgaacaaaatagaccccagctccgtggtcgtctatgaggatggtattccttgtaagtgttctgtatgagcacgtctcatagggatggggaagttttttggaaagtcacttgagttttaaagaaactggacaattccatgaataatttgaggttttattcatattgctaatgtctacaattgttctaaagagtattttaaagtagtttttttcccccagctaatctttccctatgtatgcccccttttaggagatttctcaccattttgctttaacacaataattattggcctacttaatactccagtgccttgagatagttggacatattttaggaagattttattgtatttggaaaattacgacacattccatgcatggatcttttgtagttacgtgttttgattagtcctgtcactgtttttatttaaaatgcagtgtcagcaaaccgaaatgctcatttcttttttagtaacagagtactcgtatacttatcactgtatgcactcattgggtctaagggagatgtctgaagtccttcacttaaattattttatgatactactgttttctctatttttgaggttaaaattattttaaaaaaatattttgaagagaagtttattagtataagcattcatttaatgcaaaaaaactcagcccttggacatataaccatgtaattctatatgaacgtttagagtactacatggttgaccaatatctagttctttactaaaagtaaactcacctctttatatatatttcaaaactgaatttgaagcctattagagaccaactgaccttttagttgtaatgaactgtatggtcttgcatggtgacacacctgtgtaggaggccaagacttggcagaggatgtagtctaggtgtcctggtatatataaatggtcactcacttcgtttatatattccacactcagaaaagaagtcagagttttttctgagtaatacaaaaaccatcacttacataatttgtataagaaactttaaacagttttaatcaaaactatgagtaacatcaaaaatgctttaagattctatattttggaatacctgtgaagtagtatgactacatcatgttaaatatttattttcttctatgattttggagcagcaatttttattttaaataaaattccacttttaagaaattcagggaagatttggtcacattgaagatacagtatttttgtagtatttataaactgttctaaatgatagactatagaaaacatttttgtcatatgaaggtaaatcagtccattattttggatcatttaaactgaacattacaccttctgggctttgatttatgaagtggcacagaatctaactttgcactgaatatcttttcattcacatctcctctgccttagtcacaatggcaacagtacagaaaattctatcaaacctcagaatatagtagaaataattaagctgttgaatgagtcttaaaaattatactactgttaagtggaccaagtttggtgaagcagaatgtgacaaaggttgattaaggaaggaacaactcaaggacattgggaatgataacttttccacttgagaactactttatgttttactgtaatttttaaagtttttttgtcctttttgttattttgcaaaagaaaatagtatttacaggtggcttcttttaaaatataaaaatataaagcaggaatgtatatgaaatgtcagattttattgtatttgcagagtattagctttgaaattgaataaagaaagctgtttgtagttttaaaatgccttattggtatcaattagaaatttcttctattttttgatgtacttagagctttttgagtgtagaattttaaatggcaggattttacagtgtttacatgcaagtgcattttataagtgttctatatgtgtaaaatagtattttcaactggaaagtgttggctagtgcaaaaggcctggccattttctggttcccatgatgttgcctacactgctagactacagtttagtatcgctttgtatcatgaggccaagaaattccatgttgtttgtaaatagaataattgaaaaagcaataaacatttattgaacaaaagaaaccttgtttggcccagagtttatgttgaaccaaatggttcatagaattttgaatttctttagattcatttctgttaatcatcagttattaataatcacatccatcattaatagttgctttaatgcttgcatcttagagaatactaatgcttaatagcagtcagatactgataactgcactgactgtttaaaaattctgtataccaaacctattcattgttgtttttcaatttccttcattgactgctactaactattagttgttagttgtattttatttctattttttcttgttaaccagtttttttctttttcattgggggagtgggctcttcttcatttgttcaaatcatgatacgaaattgtcatgattttaattgtattctgtagatggtgtcaatcagtttgtcagaattaaacatgcttttttttttattagttgtgattagtttttcatgttgtcattaagccgtcactagctgaaactaatctcttctctatcttttcttttcttttttttgttttgtttttttttgtttctaaccacccagccgccaccggcaactaacctatgaccttctgacctctgaactcttcacccaatgatgacctgaccatgcctgcctgctgatcagttaactggtaatcgcctttgcttgcctgtcgtcagtgcagcgagctgaggcacttgtccgttcgtcttaccatctaaccaaacaaaagacaaagaaattgttgtcctccaactcagctttttttttttttttttcctgtttgggtgaaagtggttctagaaactgcactgaatagtagtaaagcaataaggcccaattcatcccacagcactgatcatcttttaatatcccaccctaagcgaacggtaagaaggcctctcttaagaaggggagacagatggtccttaactactcaatgacagaggcagttactgtgagagacttctaggaatctttttcttctcatagcgaagtcaaagctctctctgaatgtactgtgtgatgatgcatcatgcatgaaccttcggtcagggatatcattggtgaagtgatttcaaaaagtattcaaaatttgatatgctgtttagtcactacagtgccctcaaagggcagaagttgcagccttttttatattgcctgccaaaatttgaagtattagaagaaagtgtgccatgagagaaaaacttaaggagttttgaaaagtaatgcaaataacaaaactgcaacactatttttaaaaagataaatatctgagttaaaattactgaatctttattttacacctaaaaaaatatgagaacaaggtacatgcattatgtgtcacattactgggcaaactgttcaagtatttttttttaaacctccctgtatagaaaaaaatcattaaggatgtaaaagccatgcttgcctatttgctgtatacatgtaatgaaattgtagataaagtgtagtgcattgaaacaaatgaacaaaaagtagatacttttactatacaagggtgctggtgcagaaaaaaatatatatatttttggaaatgtagcattttatactttcaagtgttataaaaaaaaagaaaaagaacaaagaaaccctttatttcattaaatgattttttctggtggttgtcaagaaacaaaagaccaaaagagcctttttgtctttcttttttattttttaagtattggaataagtctaaagaaaagaaagtgccttattttccttcatggtcattcagtcaagtgtctcataaagatcagctcctccctcagaatacaagttaatgcatgttactcagtcgcccagtatgtgaaagaagatatgagggagacaaatgagttgatagtttgaattataggatttttgccacgttaccttgatgcaaatttgccaaatctgatactgtgaaaagatttgataacttttctaatgcctgactagtaagttttaaaacatcattctttaaaagaatagtttaatacttttggttattccaatcttcaatgttaacccaaaggattctgagataaaaattatgtgtcatctaaacttcagtttacagacaaaattagagctttgttttatttggagaagggggatgcattcatttgattttgttttttgtttttaattaattgaatataataggatacctagcaaatgttttcacaaaagtgaatctttgtgattttcattctagaaaacaatgttttaaatcacccaaatttaatcacatgtctttatatcataccagataactggtgtagtgtatccttttactgtttcaataacctctgcctcccccaccccttaactttaaaagaatgtgaaaaactagcatcatagtgcatataaatactcaaccacatttcagcttaagcttctaatttctcaagaagttgaaacagttagttatgtagttgaagcaatttgtgtgcaaagcctacatctaaacacttgagtgaataatcattaactgctcagtaccagacgtggcaaatctcaagtgacagtggaccccccccccccgcccagcttatcaactcgtcccctcttccacaccttcccagcatcacagtcagaggtcagcaggaagctgagtcattaccttcttggtgacctcccccaccatcttgtctcacttggaaaccgttgtcagtttatttactatgcaatagacattcattgttttgtatccagctagctttggtttaatatgccactgctttgtctttctgttacacatacagttttgatttatttacaatatatgctgtgccattttgatttttatattgtttggttggttgaataaatttgcgacactcaaacacttgaggtgatagttgttaaaaacaataccagtatttgatccagtttcatctcaactatgttatacctggacattttagatgtttatcaaaggtcttttatggggaagaaagtaaatgtatgaaataataaatgtgtgacatttatagggaatgttggctctgaacaaacttttgaaaacttggttgacaaaattttggatcaactgaaaaaagcatgacttttgaaatctctgaatgccttggttctcagtattatcattctttattgaatttatttcttattaaaatatgtagtttttaagactttttttctgacagtattatgtaattttttagcgtgggtagatgggagtgtcgcttgtatgttatcgtacagctgacatgtatttttgtctattctttattatcttagtttcatgctatgtatgtaccataaccaacctattgcctatgagaaacatgtaagataatgtatttacagccattgttacaagtttataatgtatttttctatcttgttttatatgtatgttatataacattcaaaaagaatttttttcttgattgagaaaaggatacaaaatgcaaaatccacaattttgataactgaaaattgccaattgttttgcagtactttattatattgggtgtcttgtcttttttgggcttttagttagctaatgaatgaatacattagacacttttgggttttagttgggattttacatagcttgcattttaattctttggttctttgctgtttctattaacccacagcattattttaataaatgttataataccacctac

SEQ ID NO: 453482 - DNA, 9950 bp, Homo sapiens
ccgggggcttctcagttttattttatcaatctatatgcatatccttatgccagtctcacacagtgttaattactgtagctttgtagtcagttttgaaatcaagaagtatgagtccttcgttcttatttttcaaaattatcttggctgttctgtgtcccgtgtgtttctagataaattttaggatcatcttgtcaatttctggggatattggctgggttcttggtttacttccatgtgttctctttaaatggctagactgggctttggttttttcagtatcgggcggagcctggaatatggtcggggaaatggaaacgaaggagaagccgaagcccaccccagattacctgatgcagctgatgaacgacaagaagctcatgagcagcctgcccaacttctgcgggatcttcaaccacctcgagcggctgctggacgaagaaattagcagagtacggaaagacatgtacaatgacacattaaatggcagtacagagaaaaggagtgcagaattgcctgatgctgtgggacctattgttcagttacaagagaaactttatgtgcctgtaaaagaatacccagattttaattttgttgggagaatccttggacctagaggacttacagccaaacaacttgaagcagaaaccggatgtaaaatcatggtccgaggcaaaggctcaatgagggataaaaaaaaggaggagcaaaatagaggcaagcccaattgggagcatctaaatgaagatttacatgtactaatcactgtggaagatgctcagaacagagcagaaatcaaattgaagagagcagttgaagaagtgaagaaattattggtacctgcagcagaaggagaagacagcctgaagaagatgcagctgatggagcttgcgattctgaatggcacctacagagatgccaacattaaatcaccagcccttgccttttctcttgcagcaacagcccaggctgctccaaggatcattactgggcctgcgccggttctcccaccagctgccctgcgtactcctacgccagctggccctaccataatgcctttgatcagacaaatacagaccgctgtcatgccaaacggaactcctcacccaactgctgcaatagttcctccagggcccgaagctggtttaatctatacaccctatgagtacccctacacattggcaccagctacatcaatccttgagtatcctattgaacctagtggtgtattagagtggattgaaatgccagtcatgcctgatatttcagcccattgacttgctggatgaaggactagaatacagcagcttttaccagacaaaatttgaatactttttttcctgaattgtatatgaccttggtgctgcatgcatgctgttgacttttaggactttgatcttttaaggttttttttccccagcattaatattgatttataaagatttgaaaatctttaatgaactggagaacactaagatttaaactcgaaaattcgttgttcaagtaaagaaagccatgatgctctgtatgttatctgtgtgtgtgcatgcactcaggtgccctttgtttcatgaacaaatacatttcattgtacatgttttctgtttaaatcattgtataaagtaattgcaggtcagaattataccacagaactgtttatgagaggcttgtgtctgttgcacatttcttgaagcatttttaaaataacatgtaacctgtaaccttgttgtttaagttttcttttctattaatactctgtcctgtggtcccgtgcatgctccttttcccagaactcctctctgctgcacccacagcatctgttcccgaggagttatgactcttgacttcctgcagggctggggctcttagccaccagctgctgttccagcactttcagcgcaagatctccctgattttgccacgtggaattgtacttgtatatgattaccttatctaaaatgaataagaggtgatggaccagtttactgcttagaaatagcaagaggcactgcagtaaaacttgtttctcattgtaaagcttcatgtcttttgtttgttggaaaatttttacttatagaaacttaattattagactggtaaaataaagaccaaaatatgcagatttctaattggcattcataaggtgaataataataagtgcccaatgaaaaaatctattatggttaatttcatttcttgctttgccacctaagcagtaaaacatgatattgaccacttggagaactcagaaaattattttaaatttctaagttataataaatttgcacacagataacatgcatgctatttatgtcacatctcacattaaattattttaaaataagcagtgcccttcaaaacagatgcagacatgtgtgttggtagtagtgaggagattggtattagcatcaagtcttcattgatgactaatttttaattcccttccttttatctttaggtatggctttcccaacgaaaggctaagaattcaagaacggtcttaactgaaccctcatcagatctgaatttaacaaatgcttagtctcagcagcctccgggggaaaaaagcttagcctagcagtcagtgacttacttgcactttttgcacatagatataaagtaaaattatgttattaatttggtttagtctgtaatattacacagtaatggtaatttataaaggagtgtatagtagtatactgactgctaagtgtactatactgtttgctttactaatcacctaattcattgcagttcatacttattgactcagagtttaaaaccacaatctgtaggctttaagaattgcttttaaacctttttaagtgataaactcttgaagtggtcttaaggttagcaaataattgtctgtattaaacatggcgttatttaagtagtcctgctgcaagaaaggcacttcagtgaatatgtgactagtaaagcttaaatatgtttggatctaatagagctcatgaaatactgtaacttggggattgtaaatgaatggatacaataggttaaggcccaagatgtttgaaatgaatgcaatattaatagatgcatatatacatgacatattgtggttaattttaaaactactgtgccttaacgtgtttcttaaacttttgtagtaaatgaacatttgaaatccattttgataaacctgctgttaatgttttttccccccttgtgaatgttttctaactttgtcttggtaattgcaatttaactaggtgcggtggctactaaagttcgaaggcacgatatgcgtgtccatccttaccaaaggattgtgaccgcagaccgaggttagtttagttctgcagttcttgtctataagaaatgcgttgggtgtccataaaatttgcaacaccacacctgatggaaaaatgtaattgcttacctgcacacagttttttttccttttctaaatttgtttgtgatcattgacagatttaagggttgggttttttgttttggtttggttttttctcccttcatattttaacttattaaatcttctattattatgtactatgatttattcctactaaaacataaattagtcaatttggggagctattaaattttgatgttgcctcagttattttcattaataacttttgctaaaatttaccttttaaaagttctgaaatttggggttggtattgcaaaatgaattgaacggatggtgctttaatgagagaagtaaaggaatatatgcctcctttacaacttttataatttgtgtcctgtatatgcccttggacccttttataaattatttttgcttattgaggaatggtattttcggtttattgacattgaattgttttctaagtttttccatcacaagataggaatatcaagcatggtagtaaaaaaggattttttacaagtttctattatggcacatttgtttcctacaaattaaattgatcaaagtctcaaatattagtggaggaaaaagtgctggatttgtacttcaattgtacatcttctatgaatttatgaaggacctacctgctttatgtgattaccttgagtactgatgataaatactagacacagctgttgtccacatcagaaataacatgcctttcccaaagacattgttaatatttgtttagcataatccataaagaacgttgaagacttttaaactaatgtattcatcactaacagtgattgttcagtgaacaaaatagaccccagctccgtggtcgtctatgaggatggtattccttgtaagtgttctgtatgagcacgtctcatagggatggggaagttttttggaaagtcacttgagttttaaagaaactggacaattccatgaataatttgaggttttattcatattgctaatgtctacaattgttctaaagagtattttaaagtagtttttttcccccagctaatctttccctatgtatgcccccttttaggagatttctcaccattttgctttaacacaataattattggcctacttaatactccagtgccttgagatagttggacatattttaggaagattttattgtatttggaaaattacgacacattccatgcatggatcttttgtagttacgtgttttgattagtcctgtcactgtttttatttaaaatgcagtgtcagcaaaccgaaatgctcatttcttttttagtaacagagtactcgtatacttatcactgtatgcactcattgggtctaagggagatgtctgaagtccttcacttaaattattttatgatactactgttttctctatttttgaggttaaaattattttaaaaaaatattttgaagagaagtttattagtataagcattcatttaatgcaaaaaaactcagcccttggacatataaccatgtaattctatatgaacgtttagagtactacatggttgaccaatatctagttctttactaaaagtaaactcacctctttatatatatttcaaaactgaatttgaagcctattagagaccaactgaccttttagttgtaatgaactgtatggtcttgcatggtgacacacctgtgtaggaggccaagacttggcagaggatgtagtctaggtgtcctggtatatataaatggtcactcacttcgtttatatattccacactcagaaaagaagtcagagttttttctgagtaatacaaaaaccatcacttacataatttgtataagaaactttaaacagttttaatcaaaactatgagtaacatcaaaaatgctttaagattctatattttggaatacctgtgaagtagtatgactacatcatgttaaatatttattttcttctatgattttggagcagcaatttttattttaaataaaattccacttttaagaaattcagggaagatttggtcacattgaagatacagtatttttgtagtatttataaactgttctaaatgatagactatagaaaacatttttgtcatatgaaggtaaatcagtccattattttggatcatttaaactgaacattacaccttctgggctttgatttatgaagtggcacagaatctaactttgcactgaatatcttttcattcacatctcctctgccttagtcacaatggcaacagtacagaaaattctatcaaacctcagaatatagtagaaataattaagctgttgaatgagtcttaaaaattatactactgttaagtggaccaagtttggtgaagcagaatgtgacaaaggttgattaaggaaggaacaactcaaggacattgggaatgataacttttccacttgagaactactttatgttttactgtaatttttaaagtttttttgtcctttttgttattttgcaaaagaaaatagtatttacaggtggcttcttttaaaatataaaaatataaagcaggaatgtatatgaaatgtcagattttattgtatttgcagagtattagctttgaaattgaataaagaaagctgtttgtagttttaaaatgccttattggtatcaattagaaatttcttctattttttgatgtacttagagctttttgagtgtagaattttaaatggcaggattttacagtgtttacatgcaagtgcattttataagtgttctatatgtgtaaaatagtattttcaactggaaagtgttggctagtgcaaaaggcctggccattttctggttcccatgatgttgcctacactgctagactacagtttagtatcgctttgtatcatgaggccaagaaattccatgttgtttgtaaatagaataattgaaaaagcaataaacatttattgaacaaaagaaaccttgtttggcccagagtttatgttgaaccaaatggttcatagaattttgaatttctttagattcatttctgttaatcatcagttattaataatcacatccatcattaatagttgctttaatgcttgcatcttagagaatactaatgcttaatagcagtcagatactgataactgcactgactgtttaaaaattctgtataccaaacctattcattgttgtttttcaatttccttcattgactgctactaactattagttgttagttgtattttatttctattttttcttgttaaccagtttttttctttttcattgggggagtgggctcttcttcatttgttcaaatcatgatacgaaattgtcatgattttaattgtattctgtagatggtgtcaatcagtttgtcagaattaaacatgcttttttttttattagttgtgattagtttttcatgttgtcattaagccgtcactagctgaaactaatctcttctctatcttttcttttcttttttttgttttgtttttttttgtttctaaccacccagccgccaccggcaactaacctatgaccttctgacctctgaactcttcacccaatgatgacctgaccatgcctgcctgctgatcagttaactggtaatcgcctttgcttgcctgtcgtcagtgcagcgagctgaggcacttgtccgttcgtcttaccatctaaccaaacaaaagacaaagaaattgttgtcctccaactcagctttttttttttttttttcctgtttgggtgaaagtggttctagaaactgcactgaatagtagtaaagcaataaggcccaattcatcccacagcactgatcatcttttaatatcccaccctaagcgaacggtaagaaggcctctcttaagaaggggagacagatggtccttaactactcaatgacagaggcagttactgtgagagacttctaggaatctttttcttctcatagcgaagtcaaagctctctctgaatgtactgtgtgatgatgcatcatgcatgaaccttcggtcagggatatcattggtgaagtgatttcaaaaagtattcaaaatttgatatgctgtttagtcactacagtgccctcaaagggcagaagttgcagccttttttatattgcctgccaaaatttgaagtattagaagaaagtgtgccatgagagaaaaacttaaggagttttgaaaagtaatgcaaataacaaaactgcaacactatttttaaaaagataaatatctgagttaaaattactgaatctttattttacacctaaaaaaatatgagaacaaggtacatgcattatgtgtcacattactgggcaaactgttcaagtatttttttttaaacctccctgtatagaaaaaaatcattaaggatgtaaaagccatgcttgcctatttgctgtatacatgtaatgaaattgtagataaagtgtagtgcattgaaacaaatgaacaaaaagtagatacttttactatacaagggtgctggtgcagaaaaaaatatatatatttttggaaatgtagcattttatactttcaagtgttataaaaaaaaagaaaaagaacaaagaaaccctttatttcattaaatgattttttctggtggttgtcaagaaacaaaagaccaaaagagcctttttgtctttcttttttattttttaagtattggaataagtctaaagaaaagaaagtgccttattttccttcatggtcattcagtcaagtgtctcataaagatcagctcctccctcagaatacaagttaatgcatgttactcagtcgcccagtatgtgaaagaagatatgagggagacaaatgagttgatagtttgaattataggatttttgccacgttaccttgatgcaaatttgccaaatctgatactgtgaaaagatttgataacttttctaatgcctgactagtaagttttaaaacatcattctttaaaagaatagtttaatacttttggttattccaatcttcaatgttaacccaaaggattctgagataaaaattatgtgtcatctaaacttcagtttacagacaaaattagagctttgttttatttggagaagggggatgcattcatttgattttgttttttgtttttaattaattgaatataataggatacctagcaaatgttttcacaaaagtgaatctttgtgattttcattctagaaaacaatgttttaaatcacccaaatttaatcacatgtctttatatcataccagataactggtgtagtgtatccttttactgtttcaataacctctgcctcccccaccccttaactttaaaagaatgtgaaaaactagcatcatagtgcatataaatactcaaccacatttcagcttaagcttctaatttctcaagaagttgaaacagttagttatgtagttgaagcaatttgtgtgcaaagcctacatctaaacacttgagtgaataatcattaactgctcagtaccagacgtggcaaatctcaagtgacagtggaccccccccccccgcccagcttatcaactcgtcccctcttccacaccttcccagcatcacagtcagaggtcagcaggaagctgagtcattaccttcttggtgacctcccccaccatcttgtctcacttggaaaccgttgtcagtttatttactatgcaatagacattcattgttttgtatccagctagctttggtttaatatgccactgctttgtctttctgttacacatacagttttgatttatttacaatatatgctgtgccattttgatttttatattgtttggttggttgaataaatttgcgacactcaaacacttgaggtgatagttgttaaaaacaataccagtatttgatccagtttcatctcaactatgttatacctggacattttagatgtttatcaaaggtcttttatggggaagaaagtaaatgtatgaaataataaatgtgtgacatttatagggaatgttggctctgaacaaacttttgaaaacttggttgacaaaattttggatcaactgaaaaaagcatgacttttgaaatctctgaatgccttggttctcagtattatcattctttattgaatttatttcttattaaaatatgtagtttttaagactttttttctgacagtattatgtaattttttagcgtgggtagatgggagtgtcgcttgtatgttatcgtacagctgacatgtatttttgtctattctttattatcttagtttcatgctatgtatgtaccataaccaacctattgcctatgagaaacatgtaagataatgtatttacagccattgttacaagtttataatgtatttttctatcttgttttatatgtatgttatataacattcaaaaagaatttttttcttgattgagaaaaggatacaaaatgcaaaatccacaattttgataactgaaaattgccaattgttttgcagtactttattatattgggtgtcttgtcttttttgggcttttagttagctaatgaatgaatacattagacacttttgggttttagttgggattttacatagcttgcattttaattctttggttctttgctgtttctattaacccacagcattattttaataaatgttataataccacctac

SEQ ID NO: 453483 - DNA, 10254 bp, Homo sapiens
ccgggggcttctcagttttattttatcaatctatatgcatatccttatgccagtctcacacagtgttaattactgtagctttgtagtcagttttgaaatcaagaagtatgagtccttcgttcttatttttcaaaattatcttggctgttctgtgtcccgtgtgtttctagataaattttaggatcatcttgtcaatttctggggatattggctgggttcttggtttacttccatgtgttctctttaaatggctagactgggctttggttttttcagtatcgggcggagcctggaatatggtcggggaaatggaaacgaaggagaagccgaagcccaccccagattacctgatgcagctgatgaacgacaagaagctcatgagcagcctgcccaacttctgcgggatcttcaaccacctcgagcggctgctggacgaagaaattagcagagtacggaaagacatgtacaatgacacattaaatggcagtacagagaaaaggagtgcagaattgcctgatgctgtgggacctattgttcagttacaagagaaactttatgtgcctgtaaaagaatacccagattttaattttgttgggagaatccttggacctagaggacttacagccaaacaacttgaagcagaaaccggatgtaaaatcatggtccgaggcaaaggctcaatgagggataaaaaaaaggaggagcaaaatagaggcaagcccaattgggagcatctaaatgaagatttacatgtactaatcactgtggaagatgctcagaacagagcagaaatcaaattgaagagagcagttgaagaagtgaagaaattattggtacctgcagcagaaggagaagacagcctgaagaagatgcagctgatggagcttgcgattctgaatggcacctacagagatgccaacattaaatcaccagcccttgccttttctcttgcagcaacagcccaggctgctccaaggatcattactgggcctgcgccggttctcccaccagctgccctgcgtactcctacgccagctggccctaccataatgcctttgatcagacaaatacagaccgctgtcatgccaaacggaactcctcacccaactgctgcaatagttcctccagggcccgaagctggtttaatctatacaccctatgagtacccctacacattggcaccagctacatcaatccttgagtatcctattgaacctagtggtgtattagagtggattgaaatgccagtcatgcctgatatttcagcccattgacttgctggatgaaggactagaatacagcagcttttaccagacaaaatttgaatactttttttcctgaattgtatatgaccttggtgctgcatgcatgctgttgacttttaggactttgatcttttaaggttttttttccccagcattaatattgatttataaagatttgaaaatctttaatgaactggagaacactaagatttaaactcgaaaattcgttgttcaagtaaagaaagccatgatgctctgtatgttatctgtgtgtgtgcatgcactcaggtgccctttgtttcatgaacaaatacatttcattgtacatgttttctgtttaaatcattgtataaagtaattgcaggtcagaattataccacagaactgtttatgagaggcttgtgtctgttgcacatttcttgaagcatttttaaaataacatgtaacctgtaaccttgttgtttaagttttcttttctattaatactctgtcctgtggtcccgtgcatgctccttttcccagaactcctctctgctgcacccacagcatctgttcccgaggagttatgactcttgacttcctgcagggctggggctcttagccaccagctgctgttccagcactttcagcgcaagatctccctgattttgccacgtggaattgtacttgtatatgattaccttatctaaaatgaataagaggtgatggaccagtttactgcttagaaatagcaagaggcactgcagtaaaacttgtttctcattgtaaagcttcatgtcttttgtttgttggaaaatttttacttatagaaacttaattattagactggtaaaataaagaccaaaatatgcagatttctaattggcattcataaggtgaataataataagtgcccaatgaaaaaatctattatggttaatttcatttcttgctttgccacctaagcagtaaaacatgatattgaccacttggagaactcagaaaattattttaaatttctaagttataataaatttgcacacagataacatgcatgctatttatgtcacatctcacattaaattattttaaaataagcagtgcccttcaaaacagatgcagacatgtgtgttggtagtagtgaggagattggtattagcatcaagtcttcattgatgactaatttttaattcccttccttttatctttaggtatggctttcccaacgaaaggctaagaattcaagaacggtcttaactgaaccctcatcagatctgaatttaacaaatgcttagtctcagcagcctccgggggaaaaaagcttagcctagcagtcagtgacttacttgcactttttgcacatagatataaagtaaaattatgttattaatttggtttagtctgtaatattacacagtaatggtaatttataaaggagtgtatagtagtatactgactgctaagtgtactatactgtttgctttactaatcacctaattcattgcagttcatacttattgactcagagtttaaaaccacaatctgtaggctttaagaattgcttttaaacctttttaagtgataaactcttgaagtggtcttaaggttagcaaataattgtctgtattaaacatggcgttatttaagtagtcctgctgcaagaaaggcacttcagtgaatatgtgactagtaaagcttaaatatgtttggatctaatagagctcatgaaatactgtaacttggggattgtaaatgaatggatacaataggttaaggcccaagatgtttgaaatgaatgcaatattaatagatgcatatatacatgacatattgtggttaattttaaaactactgtgccttaacgtgtttcttaaacttttgtagtaaatgaacatttgaaatccattttgataaacctgctgttaatgttttttccccccttgtgaatgttttctaactttgtcttggtaattgcaatttaactaggtgcggtggctactaaagttcgaaggcacgatatgcgtgtccatccttaccaaaggattgtgaccgcagaccgaggttagtttagttctgcagttcttgtctataagaaatgcgttgggtgtccataaaatttgcaacaccacacctgatggaaaaatgtaattgcttacctgcacacagttttttttccttttctaaatttgtttgtgatcattgacagatttaagggttgggttttttgttttggtttggttttttctcccttcatattttaacttattaaatcttctattattatgtactatgatttattcctactaaaacataaattagtcaatttggggagctattaaattttgatgttgcctcagttattttcattaataacttttgctaaaatttaccttttaaaagttctgaaatttggggttggtattgcaaaatgaattgaacggatggtgctttaatgagagaagtaaaggaatatatgcctcctgtgtacttttggagaaaactgaagatttagtttccatttttctttataataaaatatttgagccactgtataaacatgagggtgcacatgtcaagtacttagctaaaatcaacaaagtgaggactgtgaagataactttcatgtagttggatttttttatataaattagagcgtcaattcccttttattcttacattctcttgccaaaatggatcctttgatttttgtcatttgctgctaaaatatattatctgaaggtaaactgtctcttgaagttctgtggtggtatgagatccagctgtgtgaatataatttttgactaacctgtgactggaaaataagtcttcatttttctcctttacaacttttataatttgtgtcctgtatatgcccttggacccttttataaattatttttgcttattgaggaatggtattttcggtttattgacattgaattgttttctaagtttttccatcacaagataggaatatcaagcatggtagtaaaaaaggattttttacaagtttctattatggcacatttgtttcctacaaattaaattgatcaaagtctcaaatattagtggaggaaaaagtgctggatttgtacttcaattgtacatcttctatgaatttatgaaggacctacctgctttatgtgattaccttgagtactgatgataaatactagacacagctgttgtccacatcagaaataacatgcctttcccaaagacattgttaatatttgtttagcataatccataaagaacgttgaagacttttaaactaatgtattcatcactaacagtgattgttcagtgaacaaaatagaccccagctccgtggtcgtctatgaggatggtattccttgtaagtgttctgtatgagcacgtctcatagggatggggaagttttttggaaagtcacttgagttttaaagaaactggacaattccatgaataatttgaggttttattcatattgctaatgtctacaattgttctaaagagtattttaaagtagtttttttcccccagctaatctttccctatgtatgcccccttttaggagatttctcaccattttgctttaacacaataattattggcctacttaatactccagtgccttgagatagttggacatattttaggaagattttattgtatttggaaaattacgacacattccatgcatggatcttttgtagttacgtgttttgattagtcctgtcactgtttttattttcgtatacttatcactgtatgcactcattgggtctaagggagatgtctgaagtccttcacttaaattattttatgatactactgttttctctatttttgaggttaaaattattttaaaaaaatattttgaagagaagtttattagtataagcattcatttaatgcaaaaaaactcagcccttggacatataaccatgtaattctatatgaacgtttagagtactacatggttgaccaatatctagttctttactaaaagtaaactcacctctttatatatatttcaaaactgaatttgaagcctattagagaccaactgaccttttagttgtaatgaactgtatggtcttgcatggtgacacacctgtgtaggaggccaagacttggcagaggatgtagtctaggtgtcctggtatatataaatggtcactcacttcgtttatatattccacactcagaaaagaagtcagagttttttctgagtaatacaaaaaccatcacttacataatttgtataagaaactttaaacagttttaatcaaaactatgagtaacatcaaaaatgctttaagattctatattttggaatacctgtgaagtagtatgactacatcatgttaaatatttattttcttctatgattttggagcagcaatttttattttaaataaaattccacttttaagaaattcagggaagatttggtcacattgaagatacagtatttttgtagtatttataaactgttctaaatgatagactatagaaaacatttttgtcatatgaaggtaaatcagtccattattttggatcatttaaactgaacattacaccttctgggctttgatttatgaagtggcacagaatctaactttgcactgaatatcttttcattcacatctcctctgccttagtcacaatggcaacagtacagaaaattctatcaaacctcagaatatagtagaaataattaagctgttgaatgagtcttaaaaattatactactgttaagtggaccaagtttggtgaagcagaatgtgacaaaggttgattaaggaaggaacaactcaaggacattgggaatgataacttttccacttgagaactactttatgttttactgtaatttttaaagtttttttgtcctttttgttattttgcaaaagaaaatagtatttacaggtggcttcttttaaaatataaaaatataaagcaggaatgtatatgaaatgtcagattttattgtatttgcagagtattagctttgaaattgaataaagaaagctgtttgtagttttaaaatgccttattggtatcaattagaaatttcttctattttttgatgtacttagagctttttgagtgtagaattttaaatggcaggattttacagtgtttacatgcaagtgcattttataagtgttctatatgtgtaaaatagtattttcaactggaaagtgttggctagtgcaaaaggcctggccattttctggttcccatgatgttgcctacactgctagactacagtttagtatcgctttgtatcatgaggccaagaaattccatgttgtttgtaaatagaataattgaaaaagcaataaacatttattgaacaaaagaaaccttgtttggcccagagtttatgttgaaccaaatggttcatagaattttgaatttctttagattcatttctgttaatcatcagttattaataatcacatccatcattaatagttgctttaatgcttgcatcttagagaatactaatgcttaatagcagtcagatactgataactgcactgactgtttaaaaattctgtataccaaacctattcattgttgtttttcaatttccttcattgactgctactaactattagttgttagttgtattttatttctattttttcttgttaaccagtttttttctttttcattgggggagtgggctcttcttcatttgttcaaatcatgatacgaaattgtcatgattttaattgtattctgtagatggtgtcaatcagtttgtcagaattaaacatgcttttttttttattagttgtgattagtttttcatgttgtcattaagccgtcactagctgaaactaatctcttctctatcttttcttttcttttttttgttttgtttttttttgtttctaaccacccagccgccaccggcaactaacctatgaccttctgacctctgaactcttcacccaatgatgacctgaccatgcctgcctgctgatcagttaactggtaatcgcctttgcttgcctgtcgtcagtgcagcgagctgaggcacttgtccgttcgtcttaccatctaaccaaacaaaagacaaagaaattgttgtcctccaactcagctttttttttttttttttcctgtttgggtgaaagtggttctagaaactgcactgaatagtagtaaagcaataaggcccaattcatcccacagcactgatcatcttttaatatcccaccctaagcgaacggtaagaaggcctctcttaagaaggggagacagatggtccttaactactcaatgacagaggcagttactgtgagagacttctaggaatctttttcttctcatagcgaagtcaaagctctctctgaatgtactgtgtgatgatgcatcatgcatgaaccttcggtcagggatatcattggtgaagtgatttcaaaaagtattcaaaatttgatatgctgtttagtcactacagtgccctcaaagggcagaagttgcagccttttttatattgcctgccaaaatttgaagtattagaagaaagtgtgccatgagagaaaaacttaaggagttttgaaaagtaatgcaaataacaaaactgcaacactatttttaaaaagataaatatctgagttaaaattactgaatctttattttacacctaaaaaaatatgagaacaaggtacatgcattatgtgtcacattactgggcaaactgttcaagtatttttttttaaacctccctgtatagaaaaaaatcattaaggatgtaaaagccatgcttgcctatttgctgtatacatgtaatgaaattgtagataaagtgtagtgcattgaaacaaatgaacaaaaagtagatacttttactatacaagggtgctggtgcagaaaaaaatatatatatttttggaaatgtagcattttatactttcaagtgttataaaaaaaaagaaaaagaacaaagaaaccctttatttcattaaatgattttttctggtggttgtcaagaaacaaaagaccaaaagagcctttttgtctttcttttttattttttaagtattggaataagtctaaagaaaagaaagtgccttattttccttcatggtcattcagtcaagtgtctcataaagatcagctcctccctcagaatacaagttaatgcatgttactcagtcgcccagtatgtgaaagaagatatgagggagacaaatgagttgatagtttgaattataggatttttgccacgttaccttgatgcaaatttgccaaatctgatactgtgaaaagatttgataacttttctaatgcctgactagtaagttttaaaacatcattctttaaaagaatagtttaatacttttggttattccaatcttcaatgttaacccaaaggattctgagataaaaattatgtgtcatctaaacttcagtttacagacaaaattagagctttgttttatttggagaagggggatgcattcatttgattttgttttttgtttttaattaattgaatataataggatacctagcaaatgttttcacaaaagtgaatctttgtgattttcattctagaaaacaatgttttaaatcacccaaatttaatcacatgtctttatatcataccagataactggtgtagtgtatccttttactgtttcaataacctctgcctcccccaccccttaactttaaaagaatgtgaaaaactagcatcatagtgcatataaatactcaaccacatttcagcttaagcttctaatttctcaagaagttgaaacagttagttatgtagttgaagcaatttgtgtgcaaagcctacatctaaacacttgagtgaataatcattaactgctcagtaccagacgtggcaaatctcaagtgacagtggaccccccccccccgcccagcttatcaactcgtcccctcttccacaccttcccagcatcacagtcagaggtcagcaggaagctgagtcattaccttcttggtgacctcccccaccatcttgtctcacttggaaaccgttgtcagtttatttactatgcaatagacattcattgttttgtatccagctagctttggtttaatatgccactgctttgtctttctgttacacatacagttttgatttatttacaatatatgctgtgccattttgatttttatattgtttggttggttgaataaatttgcgacactcaaacacttgaggtgatagttgttaaaaacaataccagtatttgatccagtttcatctcaactatgttatacctggacattttagatgtttatcaaaggtcttttatggggaagaaagtaaatgtatgaaataataaatgtgtgacatttatagggaatgttggctctgaacaaacttttgaaaacttggttgacaaaattttggatcaactgaaaaaagcatgacttttgaaatctctgaatgccttggttctcagtattatcattctttattgaatttatttcttattaaaatatgtagtttttaagactttttttctgacagtattatgtaattttttagcgtgggtagatgggagtgtcgcttgtatgttatcgtacagctgacatgtatttttgtctattctttattatcttagtttcatgctatgtatgtaccataaccaacctattgcctatgagaaacatgtaagataatgtatttacagccattgttacaagtttataatgtatttttctatcttgttttatatgtatgttatataacattcaaaaagaatttttttcttgattgagaaaaggatacaaaatgcaaaatccacaattttgataactgaaaattgccaattgttttgcagtactttattatattgggtgtcttgtcttttttgggcttttagttagctaatgaatgaatacattagacacttttgggttttagttgggattttacatagcttgcattttaattctttggttctttgctgtttctattaacccacagcattattttaataaatgttataataccacctac

SEQ ID NO: 453484 - DNA, 10494 bp, Homo sapiens
ccgggggcttctcagttttattttatcaatctatatgcatatccttatgccagtctcacacagtgttaattactgtagctttgtagtcagttttgaaatcaagaagtatgagtccttcgttcttatttttcaaaattatcttggctgttctgtgtcccgtgtgtttctagataaattttaggatcatcttgtcaatttctggggatattggctgggttcttggtttacttccatgtgttctctttaaatggctagactgggctttggttttttcagtatcgggcggagcctggaatatggtcggggaaatggaaacgaaggagaagccgaagcccaccccagattacctgatgcagctgatgaacgacaagaagctcatgagcagcctgcccaacttctgcgggatcttcaaccacctcgagcggctgctggacgaagaaattagcagagtacggaaagacatgtacaatgacacattaaatggcagtacagagaaaaggagtgcagaattgcctgatgctgtgggacctattgttcagttacaagagaaactttatgtgcctgtaaaagaatacccagattttaattttgttgggagaatccttggacctagaggacttacagccaaacaacttgaagcagaaaccggatgtaaaatcatggtccgaggcaaaggctcaatgagggataaaaaaaaggaggagcaaaatagaggcaagcccaattgggagcatctaaatgaagatttacatgtactaatcactgtggaagatgctcagaacagagcagaaatcaaattgaagagagcagttgaagaagtgaagaaattattggtacctgcagcagaaggagaagacagcctgaagaagatgcagctgatggagcttgcgattctgaatggcacctacagagatgccaacattaaatcaccagcccttgccttttctcttgcagcaacagcccaggctgctccaaggatcattactgggcctgcgccggttctcccaccagctgccctgcgtactcctacgccagctggccctaccataatgcctttgatcagacaaatacagaccgctgtcatgccaaacggaactcctcacccaactgctgcaatagttcctccagggcccgaagctggtttaatctatacaccctatgagtacccctacacattggcaccagctacatcaatccttgagtatcctattgaacctagtggtgtattagagtggattgaaatgccagtcatgcctgatatttcagcccattgacttgctggatgaaggactagaatacagcagcttttaccagacaaaatttgaatactttttttcctgaattgtatatgaccttggtgctgcatgcatgctgttgacttttaggactttgatcttttaaggttttttttccccagcattaatattgatttataaagatttgaaaatctttaatgaactggagaacactaagatttaaactcgaaaattcgttgttcaagtaaagaaagccatgatgctctgtatgttatctgtgtgtgtgcatgcactcaggtgccctttgtttcatgaacaaatacatttcattgtacatgttttctgtttaaatcattgtataaagtaattgcaggtcagaattataccacagaactgtttatgagaggcttgtgtctgttgcacatttcttgaagcatttttaaaataacatgtaacctgtaaccttgttgtttaagttttcttttctattaatactctgtcctgtggtcccgtgcatgctccttttcccagaactcctctctgctgcacccacagcatctgttcccgaggagttatgactcttgacttcctgcagggctggggctcttagccaccagctgctgttccagcactttcagcgcaagatctccctgattttgccacgtggaattgtacttgtatatgattaccttatctaaaatgaataagaggtgatggaccagtttactgcttagaaatagcaagaggcactgcagtaaaacttgtttctcattgtaaagcttcatgtcttttgtttgttggaaaatttttacttatagaaacttaattattagactggtaaaataaagaccaaaatatgcagatttctaattggcattcataaggtgaataataataagtgcccaatgaaaaaatctattatggttaatttcatttcttgctttgccacctaagcagtaaaacatgatattgaccacttggagaactcagaaaattattttaaatttctaagttataataaatttgcacacagataacatgcatgctatttatgtcacatctcacattaaattattttaaaataagcagtgcccttcaaaacagatgcagacatgtgtgttggtagtagtgaggagattggtattagcatcaagtcttcattgatgactaatttttaattcccttccttttatctttaggtatggctttcccaacgaaaggctaagaattcaagaacggtcttaactgaaccctcatcagatctgaatttaacaaatgcttagtctcagcagcctccgggggaaaaaagcttagcctagcagtcagtgacttacttgcactttttgcacatagatataaagtaaaattatgttattaatttggtttagtctgtaatattacacagtaatggtaatttataaaggagtgtatagtagtatactgactgctaagtgtactatactgtttgctttactaatcacctaattcattgcagttcatacttattgactcagagtttaaaaccacaatctgtaggctttaagaattgcttttaaacctttttaagtgataaactcttgaagtggtcttaaggttagcaaataattgtctgtattaaacatggcgttatttaagtagtcctgctgcaagaaaggcacttcagtgaatatgtgactagtaaagcttaaatatgtttggatctaatagagctcatgaaatactgtaacttggggattgtaaatgaatggatacaataggttaaggcccaagatgtttgaaatgaatgcaatattaatagatgcatatatacatgacatattgtggttaattttaaaactactgtgccttaacgtgtttcttaaacttttgtagtaaatgaacatttgaaatccattttgataaacctgctgttaatgttttttccccccttgtgaatgttttctaactttgtcttggtaattgcaatttaactaggtgcggtggctactaaagttcgaaggcacgatatgcgtgtccatccttaccaaaggattgtgaccgcagaccgaggttagtttagttctgcagttcttgtctataagaaatgcgttgggtgtccataaaatttgcaacaccacacctgatggaaaaatgtaattgcttacctgcacacagttttttttccttttctaaatttgtttgtgatcattgacagatttaagggttgggttttttgttttggtttggttttttctcccttcatattttaacttattaaatcttctattattatgtactatgatttattcctactaaaacataaattagtcaatttggggagctattaaattttgatgttgcctcagttattttcattaataacttttgctaaaatttaccttttaaaagttctgaaatttggggttggtattgcaaaatgaattgaacggatggtgctttaatgagagaagtaaaggaatatatgcctcctgtgtacttttggagaaaactgaagatttagtttccatttttctttataataaaatatttgagccactgtataaacatgagggtgcacatgtcaagtacttagctaaaatcaacaaagtgaggactgtgaagataactttcatgtagttggatttttttatataaattagagcgtcaattcccttttattcttacattctcttgccaaaatggatcctttgatttttgtcatttgctgctaaaatatattatctgaaggtaaactgtctcttgaagttctgtggtggtatgagatccagctgtgtgaatataatttttgactaacctgtgactggaaaataagtcttcatttttctcctttacaacttttataatttgtgtcctgtatatgcccttggacccttttataaattatttttgcttattgaggaatggtattttcggtttattgacattgaattgttttctaagtttttccatcacaagataggaatatcaagcatggtagtaaaaaaggattttttacaagtttctattatggcacatttgtttcctacaaattaaattgatcaaagtctcaaatattagtggaggaaaaagtgctggatttgtacttcaattgtacatcttctatgaatttatgaaggacctacctgctttatgtgattaccttgagtactgatgataaatactagacacagctgttgtccacatcagaaataacatgcctttcccaaagacattgttaatatttgtttagcataatccataaagaacgttgaagacttttaaactaatgtattcatcactaacagtgattgttcagtgaacaaaatagaccccagctccgtggtcgtctatgaggatggtattccttgtaagtgttctgtatgagcacgtctcatagggatggggaagttttttggaaagtcacttgagttttaaagaaactggacaattccatgaataatttgaggttttattcatattgctaatgtctacaattgttctaaagagtattttaaagtagtttttttcccccagctaatctttccctatgtatgcccccttttaggagatttctcaccattttgctttaacacaataattattggcctacttaatactccagtgccttgagatagttggacatattttaggaagattttattgtatttggaaaattacgacacattccatgcatggatcttttgtagttacgtgttttgattagtcctgtcactgtttttatttaaaatgcagtgtcagcaaaccgaaatgctcatttcttttttagtaacagagtactcgtatacttatcactgtatgcactcattgggtctaagggagatgtctgaagtccttcacttaaattattttatgatactactgttttctctatttttgaggttaaaattattttaaaaaaatattttgaagagaagtttattagtataagcattcatttaatgcaaaaaaactcagcccttggacatataaccatgtaattctatatgaacgtttagagtactacatggttgaccaatatctagttctttactaaaagtaaactcacctctttatatatatttcaaaactgaatttgaagcctattagagaccaactgaccttttagttgtaatgaactgtatggtcttgcatggtgacacacctgtgtaggaggccaagacttggcagaggatgtagtctaggtgtcctggtatatataaatggtcactcacttcgtttatatattccacactcagaaaagaagtcagagttttttctgagtaatacaaaaaccatcacttacataatttgtataagaaactttaaacagttttaatcaaaactatgagtaacatcaaaaatgctttaagattctatattttggaatacctgtgaagtagtatgactacatcatgttaaatatttattttcttctatgattttggagcagcaatttttattttaaataaaattccacttttaagaaattcagggaagatttggtcacattgaagatacagtatttttgtagtatttataaactgttctaaatgatagactatagaaaacatttttgtcatatgaaggtaaatcagtccattattttggatcatttaaactgaacattacaccttctgggctttgatttatgaagtggcacagaatctaactttgcactgaatatcttttcattcacatctcctctgccttagtcacaatggcaacagtacagaaaattctatcaaacctcagaatatagtagaaataattaagctgttgaatgagtcttaaaaattatactactgttaagtggaccaagtttggtgaagcagaatgtgacaaaggttgattaaggaaggaacaactcaaggacattgggaatgataacttttccacttgagaactactttatgttttactgtaatttttaaagtttttttgtcctttttgttattttgcaaaagaaaatagtatttacaggtggcttcttttaaaatataaaaatataaagcaggaatgtatatgaaatgtcagattttattgtatttgcagagtattagctttgaaattgaataaagaaagctgtttgtagttttaaaatgccttattggtatcaattagaaatttcttctattttttgatgtacttagagctttttgagtgtagaattttaaatggcaggattttacagtgtttacatgcaagtgcattttataagtgttctatatgtgtaaaatagtattttcaactggaaagtgttggctagtgcaaaaggcctggccattttctggttcccatgatgttgcctacactgctagactacagtttagtatcgctttgtatcatgaggccaagaaattccatgttgtttgtaaatagaataattgaaaaagcaataaacatttattgaacaaaagaaaccttgtttggcccagagtttatgttgaaccaaatggttcatagaattttgaatttctttagattcatttctgttaatcatcagttattaataatcacatccatcattaatagttgctttaatgcttgcatcttagagaatactaatgcttaatagcagtcagatactgataactgcactgactgtttaaaaattctgtataccaaacctattcattgttgtttttcaatttccttcattgactgctactaactattagttgttagttgtattttatttctattttttcttgttaaccagtttttttctttttcattgggggagtgggctcttcttcatttgttcaaatcatgatacgaaattgtcatgattttaattgtattctgtagatggtgtcaatcagtttgtcagaattaaacatgcttttttttttattagttgtgattagtttttcatgttgtcattaagccgtcactagctgaaactaatctcttctctatcttttcttttcttttttttgttttgtttttttttgtttctaaccacccagccgccaccggcaactaacctatgaccttctgacctctgaactcttcacccaatgatgacctgaccatgcctgcctgctgatcagttaactggtaatcgcctttgcttgcctgtcgtcagtgcagcgagctgaggcacttgtccgttcgtcttaccatctaaccaaacaaaagacaaagaaattgttgtcctccaactcagctttttttttttttttttcctgtttgggtgaaagtggttctagaaactgcactgaatagtagtaaagcaataaggcccaattcatcccacagcactgatcatcttttaatatcccaccctaagcgaacggtaagaaggcctctcttaagaaggggagacagatggtccttaactactcaatgacagaggcagttactgtgagagacttctaggaatctttttcttctcatagcgaagtcaaagctctctctgaatgtactgtgtgatgatgcatcatgcatgaaccttcggtcagggatatcattggtgaagtgatttcaaaaagtattcaaaatttgatatgctgtttagtcactacagtgccctcaaagggcagaagttgcagccttttttatattgcctgccaaaatttgaagtattagaagaaagtgtgccatgagagaaaaacttaaggagttttgaaaagtaatgcaaataacaaaactgcaacactatttttaaaaagataaatatctgagttaaaattactgaatctttattttacacctaaaaaaatatgagaacaaggtacatgcattatgtgtcacattactgggcaaactgttcaagtatttttttttaaacctccctgtatagaaaaaaatcattaaggatgtaaaagccatgcttgcctatttgctgtatacatgtaatgaaattgtagataaagtgtagtgcattgaaacaaatgaacaaaaagtagatacttttactatacaagggtgctggtgcagaaaaaaatatatatatttttggaaatgtagcattttatactttcaagtgttataaaaaaaaagaaaaagaacaaagaaaccctttatttcattaaatgattttttctggtggttgtcaagaaacaaaagaccaaaagagcctttttgtctttcttttttattttttaagtattggaataagtctaaagaaaagaaagtgccttattttccttcatggtcattcagtcaagtgtctcataaagatcagctcctccctcagaatacaagttaatgcatgttactcagtcgcccagtatgtgaaagaagatatgagggagacaaatgagttgatagtttgaattataggatttttgccacgttaccttgatgcaaatttgccaaatctgatactgtgaaaagatttgataacttttctaatgcctgactagtaagttttaaaacatcattctttaaaagaatagtttaatacttttggttattccaatcttcaatgttaacccaaaggattctgagataaaaattatgtgtcatctaaacttcagtttacagacaaaattagagctttgttttatttggagaagggggatgcattcatttgattttgttttttgtttttaattaattgaatataataggatacctagcaaatgttttcacaaaagtgaatctttgtgattttcattctagaaaacaatgttttaaatcacccaaatttaatcacatgtctttatatcataccagataactggtgtagtgtatccttttactgtttcaataacctctgcctcccccaccccttaactttaaaagaatgtgaaaaactagcatcatagtgcatataaatactcaaccacatttcagcttaagcttctaatttctcaagaagttgaaacagttagttatgtagttgaagcaatttgtgtgcaaagcctacatctaaacacttgagtgaataatcattaactgctcagtaccagacgtggcaaatctcaagtgacagtggaccccccccccccgcccagcttatcaactcgtcccctcttccacaccttcccagcatcacagtcagaggtcagcaggaagctgagtcattaccttcttggtgacctcccccaccatcttgtctcacttggaaaccgttgtcagtttatttactatgcaatagacattcattgttttgtatccagctagctttggtttaatatgccactgctttgtctttctgttacacatacagttttgatttatttacaatatatgctgtgccattttgatttttatattgtttggttggttgaataaatttgcgacactcaaacacttgaggtgatagttgttaaaaacaataccagtatttgatccagtttcatctcaactatgttatacctggacattttagatgtttatcaaaggtcttttatggggaagaaagtaaatgtatgaaataataaatgtgtgacatttatagggaatgttggctctgaacaaacttttgaaaacttggttgacaaaattttggatcaactgaaaaaagcatgacttttgaaatctctgaatgccttggttctcagtattatcattctttattgaatttatttcttattaaaatatgtagtttttaagactttttttctgacagtattatgtaattttttagcgtgggtagatgggagtgtcgcttgtatgttatcgtacagctgacatgtatttttgtctattctttattatcttagtttcatgctatgtatgtaccataaccaacctattgcctatgagaaacatgtaagataatgtatttacagccattgttacaagtttataatgtatttttctatcttgttttatatgtatgttatataacattcaaaaagaatttttttcttgattgagaaaaggatacaaaatgcaaaatccacaattttgataactgaaaattgccaattgttttgcagtactttattatattgggtgtcttgtcttttttgggcttttagttagctaatgaatgaatacattagacacttttgggttttagttgggattttacatagcttgcattttaattctttggttctttgctgtttctattaacccacagcattattttaataaatgttataataccacctactaactctggactttgtctgtttattaacctttatatgtttaattaaaataaacaaataaagacaaaagaatgtaaagtcttgagttactggactaaccctgaagaacgtgaccacagataacatagtgtgacttgtttttatgttgtttgtcagctgacagttttgcacactactgttaaaatggc

SEQ ID NO: 453485 - DNA, 10487 bp, Homo sapiens
ccgggggcttctcagttttattttatcaatctatatgcatatccttatgccagtctcacacagtgttaattactgtagctttgtagtcagttttgaaatcaagaagtatgagtccttcgttcttatttttcaaaattatcttggctgttctgtgtcccgtgtgtttctagataaattttaggatcatcttgtcaatttctggggatattggctgggttcttggtttacttccatgtgttctctttaaatggctagactgggctttggttttttcagtatcgggcggagcctggaatatggtcggggaaatggaaacgaaggagaagccgaagcccaccccagattacctgatgcagctgatgaacgacaagaagctcatgagcagcctgcccaacttctgcgggatcttcaaccacctcgagcggctgctggacgaagaaattagcagagtacggaaagacatgtacaatgacacattaaatggcagtacagagaaaaggagtgcagaattgcctgatgctgtgggacctattgttcagttacaagagaaactttatgtgcctgtaaaagaatacccagattttaattttgttgggagaatccttggacctagaggacttacagccaaacaacttgaagcagaaaccggatgtaaaatcatggtccgaggcaaaggctcaatgagggataaaaaaaaggaggagcaaaatagaggcaagcccaattgggagcatctaaatgaagatttacatgtactaatcactgtggaagatgctcagaacagagcagaaatcaaattgaagagagcagttgaagaagtgaagaaattattggtacctgcagcagaaggagaagacagcctgaagaagatgcagctgatggagcttgcgattctgaatggcacctacagagatgccaacattaaatcaccagcccttgccttttctcttgcagcaacagcccaggctgctccaaggatcattactgggcctgcgccggttctcccaccagctgccctgcgtactcctacgccagctggccctaccataatgcctttgatcagacaaatacagaccgctgtcatgccaaacggaactcctcacccaactgctgcaatagttcctccagggcccgaagctggtttaatctatacaccctatgagtacccctacacattggcaccagctacatcaatccttgagtatcctattgaacctagtggtgtattagagtggattgaaatgccagtcatgcctgatatttcagcccattgacttgctggatgaaggactagaatacagcagcttttaccagacaaaatttgaatactttttttcctgaattgtatatgaccttggtgctgcatgcatgctgttgacttttaggactttgatcttttaaggttttttttccccagcattaatattgatttataaagatttgaaaatctttaatgaactggagaacactaagatttaaactcgaaaattcgttgttcaagtaaagaaagccatgatgctctgtatgttatctgtgtgtgtgcatgcactcaggtgccctttgtttcatgaacaaatacatttcattgtacatgttttctgtttaaatcattgtataaagtaattgcaggtcagaattataccacagaactgtttatgagaggcttgtgtctgttgcacatttcttgaagcatttttaaaataacatgtaacctgtaaccttgttgtttaagttttcttttctattaatactctgtcctgtggtcccgtgcatgctccttttcccagaactcctctctgctgcacccacagcatctgttcccgaggagttatgactcttgacttcctgcagggctggggctcttagccaccagctgctgttccagcactttcagcgcaagatctccctgattttgccacgtggaattgtacttgtatatgattaccttatctaaaatgaataagaggtgatggaccagtttactgcttagaaatagcaagaggcactgcagtaaaacttgtttctcattgtaaagcttcatgtcttttgtttgttggaaaatttttacttatagaaacttaattattagactggtaaaataaagaccaaaatatgcagatttctaattggcattcataaggtgaataataataagtgcccaatgaaaaaatctattatggttaatttcatttcttgctttgccacctaagcagtaaaacatgatattgaccacttggagaactcagaaaattattttaaatttctaagttataataaatttgcacacagataacatgcatgctatttatgtcacatctcacattaaattattttaaaataagcagtgcccttcaaaacagatgcagacatgtgtgttggtagtagtgaggagattggtattagcatcaagtcttcattgatgactaatttttaattcccttccttttatctttaggtatggctttcccaacgaaaggctaagaattcaagaacggtcttaactgaaccctcatcagatctgaatttaacaaatgcttagtctcagcagcctccgggggaaaaaagcttagcctagcagtcagtgacttacttgcactttttgcacatagatataaagtaaaattatgttattaatttggtttagtctgtaatattacacagtaatggtaatttataaaggagtgtatagtagtatactgactgctaagtgtactatactgtttgctttactaatcacctaattcattgcagttcatacttattgactcagagtttaaaaccacaatctgtaggctttaagaattgcttttaaacctttttaagtgataaactcttgaagtggtcttaaggttagcaaataattgtctgtattaaacatggcgttatttaagtagtcctgctgcaagaaaggcacttcagtgaatatgtgactagtaaagcttaaatatgtttggatctaatagagctcatgaaatactgtaacttggggattgtaaatgaatggatacaataggttaaggcccaagatgtttgaaatgaatgcaatattaatagatgcatatatacatgacatattgtggttaattttaaaactactgtgccttaacgtgtttcttaaacttttgtagtaaatgaacatttgaaatccattttgataaacctgctgttaatgttttttccccccttgtgaatgttttctaactttgtcttggtaattgcaatttaactaggtgcggtggctactaaagttcgaaggcacgatatgcgtgtccatccttaccaaaggattgtgaccgcagaccgaggttagtttagttctgcagttcttgtctataagaaatgcgttgggtgtccataaaatttgcaacaccacacctgatggaaaaatgtaattgcttacctgcacacagttttttttccttttctaaatttgtttgtgatcattgacagatttaagggttgggttttttgttttggtttggttttttctcccttcatattttaacttattaaatcttctattattatgtactatgatttattcctactaaaacataaattagtcaatttggggagctattaaattttgatgttgcctcagttattttcattaataacttttgctaaaatttaccttttaaaagttctgaaatttggggttggtattgcaaaatgaattgaacggatggtgctttaatgagagaagtaaaggaatatatgcctcctgtgtacttttggagaaaactgaagatttagtttccatttttctttataataaaatatttgagccactgtataaacatgagggtgcacatgtcaagtacttagctaaaatcaacaaagtgaggactgtgaagataactttcatgtagttggatttttttatataaattagagcgtcaattcccttttattcttacattctcttgccaaaatggatcctttgatttttgtcatttgctgctaaaatatattatctgaaggtaaactgtctcttgaagttctgtggtggtatgagatccagctgtgtgaatataatttttgactaacctgtgactggaaaataagtcttcatttttctcctttacaacttttataatttgtgtcctgtatatgcccttggacccttttataaattatttttgcttattgaggaatggtattttcggtttattgacattgaattgttttctaagtttttccatcacaagataggaatatcaagcatggtagtaaaaaaggattttttacaagtttctattatggcacatttgtttcctacaaattaaattgatcaaagtctcaaatattagtggaggaaaaagtgctggatttgtacttcaattgtacatcttctatgaatttatgaaggacctacctgctttatgtgattaccttgagtactgatgataaatactagacacagctgttgtccacatcagaaataacatgcctttcccaaagacattgttaatatttgtttagcataatccataaagaacgttgaagacttttaaactaatgtattcatcactaacagtgattgttcagtgaacaaaatagaccccagctccgtggtcgtctatgaggatggtattccttgtaagtgttctgtatgagcacgtctcatagggatggggaagttttttggaaagtcacttgagttttaaagaaactggacaattccatgaataatttgaggttttattcatattgctaatgtctacaattgttctaaagagtattttaaagtagtttttttcccccagctaatctttccctatgtatgcccccttttaggagatttctcaccattttgctttaacacaataattattggcctacttaatactccagtgccttgagatagttggacatattttaggaagattttattgtatttggaaaattacgacacattccatgcatggatcttttgtagttacgtgttttgattagtcctgtcactgtttttatttaaaatgcagtgtcagcaaaccgaaatgctcatttcttttttagtaacagagtactcgtatacttatcactgtatgcactcattgggtctaagggagatgtctgaagtccttcacttaaattattttatgatactactgttttctctatttttgaggttaaaattattttaaaaaaatattttgaagagaagtttattagtataagcattcatttaatgcaaaaaaactcagcccttggacatataaccatgtaattctatatgaacgtttagagtactacatggttgaccaatatctagttctttactaaaagtaaactcacctctttatatatatttcaaaactgaatttgaagcctattagagaccaactgaccttttagttgtaatgaactgtatggtcttgcatggtgacacacctgtgtaggaggccaagacttggcagaggatgtagtctaggtgtcctggtatatataaatggtcactcacttcgtttatatattccacactcagaaaagaagtcagagttttttctgagtaatacaaaaaccatcacttacataatttgtataagaaactttaaacagttttaatcaaaactatgagtaacatcaaaaatgctttaagattctatattttggaatacctgtgaagtagtatgactacatcatgttaaatatttattttcttctatgattttggagcagcaatttttattttaaataaaattccacttttaagaaattcagggaagatttggtcacattgaagatacagtatttttgtagtatttataaactgttctaaatgatagactatagaaaacatttttgtcatatgaaggtaaatcagtccattattttggatcatttaaactgaacattacaccttctgggctttgatttatgaagtggcacagaatctaactttgcactgaatatcttttcattcacatctcctctgccttagtcacaatggcaacagtacagaaaattctatcaaacctcagaatatagtagaaataattaagctgttgaatgagtcttaaaaattatactactgttaagtggaccaagtttggtgaagcagaatgtgacaaaggttgattaaggaaggaacaactcaaggacattgggaatgataacttttccacttgagaactactttatgttttactgtaatttttaaagtttttttgtcctttttgttattttgcaaaagaaaatagtatttacaggtggcttcttttaaaatataaaaatataaagcaggaatgtatatgaaatgtcagattttattgtatttgcagagtattagctttgaaattgaataaagaaagctgtttgtagttttaaaatgccttattggtatcaattagaaatttcttctattttttgatgtacttagagctttttgagtgtagaattttaaatggcaggattttacagtgtttacatgcaagtgcattttataagtgttctatatgtgtaaaatagtattttcaactggaaagtgttggctagtgcaaaaggcctggccattttctggttcccatgatgttgcctacactgctagactacagtttagtatcgctttgtatcatgaggccaagaaattccatgttgtttgtaaatagaataattgaaaaagcaataaacatttattgaacaaaagaaaccttgtttggcccagagtttatgttgaaccaaatggttcatagaattttgaatttctttagattcatttctgttaatcatcagttattaataatcacatccatcattaatagttgctttaatgcttgcatcttagagaatactaatgcttaatagcagtcagatactgataactgcactgactgtttaaaaattctgtataccaaacctattcattgttgtttttcaatttccttcattgactgctactaactattagttgttagttgtattttatttctattttttcttgttaaccagtttttttctttttcattgggggagtgggctcttcttcatttgttcaaatcatgatacgaaattgtcatgattttaattgtattctgtagatggtgtcaatcagtttgtcagaattaaacatgcttttttttttattagttgtgattagtttttcatgttgtcattaagccgtcactagctgaaactaatctcttctctatcttttcttttcttttttttgttttgtttttttttgtttctaaccacccagccgccaccggcaactaacctatgaccttctgacctctgaactcttcacccaatgatgacctgaccatgcctgcctgctgatcagttaactggtaatcgcctttgcttgcctgtcgtcagtgcagcgagctgaggcacttgtccgttcgtcttaccatctaaccaaacaaaagacaaagaaattgttgtcctccaactcagctttttttttttttttttcctgtttgggtgaaagtggttctagaaactgcactgaatagtagtaaagcaataaggcccaattcatcccacagcactgatcatcttttaatatcccaccctaagcgaacggtaagaaggcctctcttaagaaggggagacagatggtccttaactactcaatgacagaggcagttactgtgagagacttctaggaatctttttcttctcatagcgaagtcaaagctctctctgaatgtactgtgtgatgatgcatcatgcatgaaccttcggtcagggatatcattggtgaagtgatttcaaaaagtattcaaaatttgatatgctgtttagtcactacagtgccctcaaagggcagaagttgcagccttttttatattgcctgccaaaatttgaagtattagaagaaagtgtgccatgagagaaaaacttaaggagttttgaaaagtaatgcaaataacaaaactgcaacactatttttaaaaagataaatatctgagttaaaattactgaatctttattttacacctaaaaaaatatgagaacaaggtacatgcattatgtgtcacattactgggcaaactgttcaagtatttttttttaaacctccctgtatagaaaaaaatcattaaggatgtaaaagccatgcttgcctatttgctgtatacatgtaatgaaattgtagataaagtgtagtgcattgaaacaaatgaacaaaaagtagatacttttactatacaagggtgctggtgcagaaaaaaatatatatatttttggaaatgtagcattttatactttcaagtgttataaaaaaaaagaaaaagaacaaagaaaccctttatttcattaaatgattttttctggtggttgtcaagaaacaaaagaccaaaagagcctttttgtctttcttttttattttttaagtattggaataagtctaaagaaaagaaagtgccttattttccttcatggtcattcagtcaagtgtctcataaagatcagctcctccctcagaatacaagttaatgcatgttactcagtcgcccagtatgtgaaagaagatatgagggagacaaatgagttgatagtttgaattataggatttttgccacgttaccttgatgcaaatttgccaaatctgatactgtgaaaagatttgataacttttctaatgcctgactagtaagttttaaaacatcattctttaaaagaatagtttaatacttttggttattccaatcttcaatgttaacccaaaggattctgagataaaaattatgtgtcatctaaacttcagtttacagacaaaattagagctttgttttatttggagaagggggatgcattcatttgattttgttttttgtttttaattaattgaatataataggatacctagcaaatgttttcacaaaagtgaatctttgtgattttcattctagaaaacaatgttttaaatcacccaaatttaatcacatgtctttatatcataccagataactggtgtagtgtatccttttactgtttcaataacctctgcctcccccaccccttaactttaaaagaatgtgaaaaactagcatcatagtgcatataaatactcaaccacatttcagcttaagcttctaatttctcaagaagttgaaacagttagttatgtagttgaagcaatttgtgtgcaaagcctacatctaaacacttgagtgaataatcattaactgctcagtaccagacgtggcaaatctcaagtgacagtggaccccccccccccgcccagcttatcaactcgtcccctcttccacaccttcccagcatcacagtcagaggtcagcaggaagctgagtcattaccttcttggtgacctcccccaccatcttgtctcacttggaaaccgttgtcagtttatttactatgcaatagacattcattgttttgtatccagctagctttggtttaatatgccactgctttgtctttctgttacacatacagttttgatttatttacaatatatgctgtgccattttgatttttatattgtttggttggttgaataaatttgcgacactcaaacacttgaggtgatagttgttaaaaacaataccagtatttgatccagtttcatctcaactatgttatacctggacattttagatgtttatcaaaggtcttttatggggaagaaagtaaatgtatgaaataataaatgtgtgacatttatagggaatgttggctctgaacaaacttttgaaaacttggttgacaaaattttggatcaactgaaaaaagcatgacttttgaaatctctgaatgccttggttctcagtattatcattctttattgaatttatttcttattaaaatatgtagtttttaagactttttttctgacagtattatgtaattttttagcgtgggtagatgggagtgtcgcttgtatgttatcgtacagctgacatgtatttttgtctattctttattatcttagtttcatgctatgtatgtaccataaccaacctattgcctatgagaaacatgtaagataatgtatttacagccattgttacaagtttataatgtatttttctatcttgttttatatgtatgttatataacattcaaaaagaatttttttcttgattgagaaaaggatacaaaatgcaaaatccacaattttgataactgaaaattgccaattgttttgcagtactttattatattgggtgtcttgtcttttttgggcttttagttagctaatgaatgaatacattagacacttttgggttttagttgggattttacatagcttgcattttaattctttggttctttgctgtttctattaacccacagcattattttaataaatgttataataccacctacaaaaaaaaaaaaaaaacaaaaacaagcgggggccgcctaaattcgcgaagaacaacgcgtcccactacagaacgaaggccaaaaatacacaaaaaaaacgcaaaaaagggacacaaagacaaaccaggagccaaaagaaaatgggacacacaaggaaaacatctgaaccacttaataga

SEQ ID NO: 453486 - DNA, 4409 bp, Homo sapiens
ccgggggcttctcagttttattttatcaatctatatgcatatccttatgccagtctcacacagtgttaattactgtagctttgtagtcagttttgaaatcaagaagtatgagtccttcgttcttatttttcaaaattatcttggctgttctgtgtcccgtgtgtttctagataaattttaggatcatcttgtcaatttctggggatattggctgggttcttggtttacttccatgtgttctctttaaatggctagactgggctttggttttttcagtatcgggcggagcctggaatatggtcggggaaatggaaacgaaggagaagccgaagcccaccccagattacctgatgcagctgatgaacgacaagaagctcatgagcagcctgcccaacttctgcgggatcttcaaccacctcgagcggctgctggacgaagaaattagcagagtacggaaagacatgtacaatgacacattaaatggcagtacagagaaaaggagtgcagaattgcctgatgctgtgggacctattgttcagttacaagagaaactttatgtgcctgtaaaagaatacccagattttaattttgttgggagaatccttggacctagaggacttacagccaaacaacttgaagcagaaaccggatgtaaaatcatggtccgaggcaaaggctcaatgagggataaaaaaaaggaggagcaaaatagaggcaagcccaattgggagcatctaaatgaagatttacatgtactaatcactgtggaagatgctcagaacagagcagaaatcaaattgaagagagcagttgaagaagtgaagaaattattggtacctgcagcagaaggagaagacagcctgaagaagatgcagctgatggagcttgcgattctgaatggcacctacagagatgccaacattaaatcaccagcccttgccttttctcttgcagcaacagcccaggctgctccaaggatcattactgggcctgcgccggttctcccaccagctgccctgcgtactcctacgccagctggccctaccataatgcctttgatcagacaaatacagaccgctgtcatgccaaacggaactcctcacccaactgctgcaatagttcctccagggcccgaagctggtttaatctatacaccctatgagtacccctacacattggcaccagctacatcaatccttgagtatcctattgaacctagtggtgtattaggtgcggtggctactaaagttcgaaggcacgatatgcgtgtccatccttaccaaaggattgtgaccgcagaccgagccgccaccggcaactaacctatgaccttctgacctctgaactcttcacccaatgatgacctgaccatgcctgcctgctgatcagttaactggtaatcgcctttgcttgcctgtcgtcagtgcagcgagctgaggcacttgtccgttcgtcttaccatctaaccaaacaaaagacaaagaaattgttgtcctccaactcagctttttttttttttttttcctgtttgggtgaaagtggttctagaaactgcactgaatagtagtaaagcaataaggcccaattcatcccacagcactgatcatcttttaatatcccaccctaagcgaacggtaagaaggcctctcttaagaaggggagacagatggtccttaactactcaatgacagaggcagttactgtgagagacttctaggaatctttttcttctcatagcgaagtcaaagctctctctgaatgtactgtgtgatgatgcatcatgcatgaaccttcggtcagggatatcattggtgaagtgatttcaaaaagtattcaaaatttgatatgctgtttagtcactacagtgccctcaaagggcagaagttgcagccttttttatattgcctgccaaaatttgaagtattagaagaaagtgtgccatgagagaaaaacttaaggagttttgaaaagtaatgcaaataacaaaactgcaacactatttttaaaaagataaatatctgagttaaaattactgaatctttattttacacctaaaaaaatatgagaacaaggtacatgcattatgtgtcacattactgggcaaactgttcaagtatttttttttaaacctccctgtatagaaaaaaatcattaaggatgtaaaagccatgcttgcctatttgctgtatacatgtaatgaaattgtagataaagtgtagtgcattgaaacaaatgaacaaaaagtagatacttttactatacaagggtgctggtgcagaaaaaaatatatatatttttggaaatgtagcattttatactttcaagtgttataaaaaaaaagaaaaagaacaaagaaaccctttatttcattaaatgattttttctggtggttgtcaagaaacaaaagaccaaaagagcctttttgtctttcttttttattttttaagtattggaataagtctaaagaaaagaaagtgccttattttccttcatggtcattcagtcaagtgtctcataaagatcagctcctccctcagaatacaagttaatgcatgttactcagtcgcccagtatgtgaaagaagatatgagggagacaaatgagttgatagtttgaattataggatttttgccacgttaccttgatgcaaatttgccaaatctgatactgtgaaaagatttgataacttttctaatgcctgactagtaagttttaaaacatcattctttaaaagaatagtttaatacttttggttattccaatcttcaatgttaacccaaaggattctgagataaaaattatgtgtcatctaaacttcagtttacagacaaaattagagctttgttttatttggagaagggggatgcattcatttgattttgttttttgtttttaattaattgaatataataggatacctagcaaatgttttcacaaaagtgaatctttgtgattttcattctagaaaacaatgttttaaatcacccaaatttaatcacatgtctttatatcataccagataactggtgtagtgtatccttttactgtttcaataacctctgcctcccccaccccttaactttaaaagaatgtgaaaaactagcatcatagtgcatataaatactcaaccacatttcagcttaagcttctaatttctcaagaagttgaaacagttagttatgtagttgaagcaatttgtgtgcaaagcctacatctaaacacttgagtgaataatcattaactgctcagtaccagacgtggcaaatctcaagtgacagtggaccccccccccccgcccagcttatcaactcgtcccctcttccacaccttcccagcatcacagtcagaggtcagcaggaagctgagtcattaccttcttggtgacctcccccaccatcttgtctcacttggaaaccgttgtcagtttatttactatgcaatagacattcattgttttgtatccagctagctttggtttaatatgccactgctttgtctttctgttacacatacagttttgatttatttacaatatatgctgtgccattttgatttttatattgtttggttggttgaataaatttgcgacactcaaacacttgaggtgatagttgttaaaaacaataccagtatttgatccagtttcatctcaactatgttatacctggacattttagatgtttatcaaaggtcttttatggggaagaaagtaaatgtatgaaataataaatgtgtgacatttatagggaatgttggctctgaacaaacttttgaaaacttggttgacaaaattttggatcaactgaaaaaagcatgacttttgaaatctctgaatgccttggttctcagtattatcattctttattgaatttatttcttattaaaatatgtagtttttaagactttttttctgacagtattatgtaattttttagcgtgggtagatgggagtgtcgcttgtatgttatcgtacagctgacatgtatttttgtctattctttattatcttagtttcatgctatgtatgtaccataaccaacctattgcctatgagaaacatgtaagataatgtatttacagccattgttacaagtttataatgtatttttctatcttgttttatatgtatgttatataacattcaaaaagaatttttttcttgattgagaaaaggatacaaaatgcaaaatccacaattttgataactgaaaattgccaattgttttgcagtactttattatattgggtgtcttgtcttttttgggcttttagttagctaatgaatgaatacattagacacttttgggttttagttgggattttacatagcttgcattttaattctttggttctttgctgtttctattaacccacagcattattttaataaatgttataataccacctac

SEQ ID NO: 453487 - DNA, 8421 bp, Homo sapiens
tgaactgaggcgaactccgccgccaagtgagtgaggaggaggaggaggagaaggaggaggaggaagaggaggagcgcagtcggagcgcggcggcagcggcagaggcgccgcggcggggaccagcccagagagaccccccgagcccgcggcacaggcggcggcggcgctgagcgggctcgaccagccgagcgagcggcggccccggctcctcctcgtccggcgccagcagcccgcgccccgcgcccgcactcggccagccgagacccgcctcccgcccgcccgccggcctcgtgagggacgcgccgagccgggcggccgagagcggcggcggctgggagcgcgtcgggcccgggcggaaagtgcctgcggggggcgggcgagcgcgcggtgccggccgccccggggctcggcgcgggagccagagcgggagccggcgcggagcgggacgccgggtcccgagcggcccgcggccggggctcagcccccgcccctccctcctctccggcggcggcggcggcggcggcgggcggagtgagctgcggagcctggaatatggtcggggaaatggaaacgaaggagaagccgaagcccaccccagattacctgatgcagctgatgaacgacaagaagctcatgagcagcctgcccaacttctgcgggatcttcaaccacctcgagcggctgctggacgaagtttaattttgttgggagaatccttggacctagaggacttacagccaaacaacttgaagcagaaaccggatgtaaaatcatggtccgaggcaaaggctcaatgagggataaaaaaaaggaggagcaaaatagaggcaagcccaattgggagcatctaaatgaagatttacatgtactaatcactgtggaagatgctcagaacagagcagaaatcaaattgaagagagcagttgaagaagtgaagaaattattggtacctgcagcagaaggagaagacagcctgaagaagatgcagctgatggagcttgcgattctgaatggcacctacagagatgccaacattaaatcaccagcccttgccttttctcttgcagcaacagcccaggctgctccaaggatcattactgggcctgcgccggttctcccaccagctgccctgcgtactcctacgccagctggccctaccataatgcctttgatcagacaaatacagaccgctgtcatgccaaacggaactcctcacccaactgctgcaatagttcctccagggcccgaagctggtttaatctatacaccctatgagtacccctacacattggcaccagctacatcaatccttgagtatcctattgaacctagtggtgtattaggtgcggtggctactaaagttcgaaggcacgatatgcgtgtccatccttaccaaaggattgtgaccgcagaccgaggttagtttagttctgcagttcttgtctataagaaatgcgttgggtgtccataaaatttgcaacaccacacctgatggaaaaatgtaattgcttacctgcacacagttttttttccttttctaaatttgtttgtgatcattgacagatttaagggttgggttttttgttttggtttggttttttctcccttcatattttaacttattaaatcttctattattatgtactatgatttattcctactaaaacataaattagtcaatttggggagctattaaattttgatgttgcctcagttattttcattaataacttttgctaaaatttaccttttaaaagttctgaaatttggggttggtattgcaaaatgaattgaacggatggtgctttaatgagagaagtaaaggaatatatgcctcctgtgtacttttggagaaaactgaagatttagtttccatttttctttataataaaatatttgagccactgtataaacatgagggtgcacatgtcaagtacttagctaaaatcaacaaagtgaggactgtgaagataactttcatgtagttggatttttttatataaattagagcgtcaattcccttttattcttacattctcttgccaaaatggatcctttgatttttgtcatttgctgctaaaatatattatctgaaggtaaactgtctcttgaagttctgtggtggtatgagatccagctgtgtgaatataatttttgactaacctgtgactggaaaataagtcttcatttttctcctttacaacttttataatttgtgtcctgtatatgcccttggacccttttataaattatttttgcttattgaggaatggtattttcggtttattgacattgaattgttttctaagtttttccatcacaagataggaatatcaagcatggtagtaaaaaaggattttttacaagtttctattatggcacatttgtttcctacaaattaaattgatcaaagtctcaaatattagtggaggaaaaagtgctggatttgtacttcaattgtacatcttctatgaatttatgaaggacctacctgctttatgtgattaccttgagtactgatgataaatactagacacagctgttgtccacatcagaaataacatgcctttcccaaagacattgttaatatttgtttagcataatccataaagaacgttgaagacttttaaactaatgtattcatcactaacagtgattgttcagtgaacaaaatagaccccagctccgtggtcgtctatgaggatggtattccttgtaagtgttctgtatgagcacgtctcatagggatggggaagttttttggaaagtcacttgagttttaaagaaactggacaattccatgaataatttgaggttttattcatattgctaatgtctacaattgttctaaagagtattttaaagtagtttttttcccccagctaatctttccctatgtatgcccccttttaggagatttctcaccattttgctttaacacaataattattggcctacttaatactccagtgccttgagatagttggacatattttaggaagattttattgtatttggaaaattacgacacattccatgcatggatcttttgtagttacgtgttttgattagtcctgtcactgtttttatttaaaatgcagtgtcagcaaaccgaaatgctcatttcttttttagtaacagagtactcgtatacttatcactgtatgcactcattgggtctaagggagatgtctgaagtccttcacttaaattattttatgatactactgttttctctatttttgaggttaaaattattttaaaaaaatattttgaagagaagtttattagtataagcattcatttaatgcaaaaaaactcagcccttggacatataaccatgtaattctatatgaacgtttagagtactacatggttgaccaatatctagttctttactaaaagtaaactcacctctttatatatatttcaaaactgaatttgaagcctattagagaccaactgaccttttagttgtaatgaactgtatggtcttgcatggtgacacacctgtgtaggaggccaagacttggcagaggatgtagtctaggtgtcctggtatatataaatggtcactcacttcgtttatatattccacactcagaaaagaagtcagagttttttctgagtaatacaaaaaccatcacttacataatttgtataagaaactttaaacagttttaatcaaaactatgagtaacatcaaaaatgctttaagattctatattttggaatacctgtgaagtagtatgactacatcatgttaaatatttattttcttctatgattttggagcagcaatttttattttaaataaaattccacttttaagaaattcagggaagatttggtcacattgaagatacagtatttttgtagtatttataaactgttctaaatgatagactatagaaaacatttttgtcatatgaaggtaaatcagtccattattttggatcatttaaactgaacattacaccttctgggctttgatttatgaagtggcacagaatctaactttgcactgaatatcttttcattcacatctcctctgccttagtcacaatggcaacagtacagaaaattctatcaaacctcagaatatagtagaaataattaagctgttgaatgagtcttaaaaattatactactgttaagtggaccaagtttggtgaagcagaatgtgacaaaggttgattaaggaaggaacaactcaaggacattgggaatgataacttttccacttgagaactactttatgttttactgtaatttttaaagtttttttgtcctttttgttattttgcaaaagaaaatagtatttacaggtggcttcttttaaaatataaaaatataaagcaggaatgtatatgaaatgtcagattttattgtatttgcagagtattagctttgaaattgaataaagaaagctgtttgtagttttaaaatgccttattggtatcaattagaaatttcttctattttttgatgtacttagagctttttgagtgtagaattttaaatggcaggattttacagtgtttacatgcaagtgcattttataagtgttctatatgtgtaaaatagtattttcaactggaaagtgttggctagtgcaaaaggcctggccattttctggttcccatgatgttgcctacactgctagactacagtttagtatcgctttgtatcatgaggccaagaaattccatgttgtttgtaaatagaataattgaaaaagcaataaacatttattgaacaaaagaaaccttgtttggcccagagtttatgttgaaccaaatggttcatagaattttgaatttctttagattcatttctgttaatcatcagttattaataatcacatccatcattaatagttgctttaatgcttgcatcttagagaatactaatgcttaatagcagtcagatactgataactgcactgactgtttaaaaattctgtataccaaacctattcattgttgtttttcaatttccttcattgactgctactaactattagttgttagttgtattttatttctattttttcttgttaaccagtttttttctttttcattgggggagtgggctcttcttcatttgttcaaatcatgatacgaaattgtcatgattttaattgtattctgtagatggtgtcaatcagtttgtcagaattaaacatgcttttttttttattagttgtgattagtttttcatgttgtcattaagccgtcactagctgaaactaatctcttctctatcttttcttttcttttttttgttttgtttttttttgtttctaaccacccagccgccaccggcaactaacctatgaccttctgacctctgaactcttcacccaatgatgacctgaccatgcctgcctgctgatcagttaactggtaatcgcctttgcttgcctgtcgtcagtgcagcgagctgaggcacttgtccgttcgtcttaccatctaaccaaacaaaagacaaagaaattgttgtcctccaactcagctttttttttttttttttcctgtttgggtgaaagtggttctagaaactgcactgaatagtagtaaagcaataaggcccaattcatcccacagcactgatcatcttttaatatcccaccctaagcgaacggtaagaaggcctctcttaagaaggggagacagatggtccttaactactcaatgacagaggcagttactgtgagagacttctaggaatctttttcttctcatagcgaagtcaaagctctctctgaatgtactgtgtgatgatgcatcatgcatgaaccttcggtcagggatatcattggtgaagtgatttcaaaaagtattcaaaatttgatatgctgtttagtcactacagtgccctcaaagggcagaagttgcagccttttttatattgcctgccaaaatttgaagtattagaagaaagtgtgccatgagagaaaaacttaaggagttttgaaaagtaatgcaaataacaaaactgcaacactatttttaaaaagataaatatctgagttaaaattactgaatctttattttacacctaaaaaaatatgagaacaaggtacatgcattatgtgtcacattactgggcaaactgttcaagtatttttttttaaacctccctgtatagaaaaaaatcattaaggatgtaaaagccatgcttgcctatttgctgtatacatgtaatgaaattgtagataaagtgtagtgcattgaaacaaatgaacaaaaagtagatacttttactatacaagggtgctggtgcagaaaaaaatatatatatttttggaaatgtagcattttatactttcaagtgttataaaaaaaaagaaaaagaacaaagaaaccctttatttcattaaatgattttttctggtggttgtcaagaaacaaaagaccaaaagagcctttttgtctttcttttttattttttaagtattggaataagtctaaagaaaagaaagtgccttattttccttcatggtcattcagtcaagtgtctcataaagatcagctcctccctcagaatacaagttaatgcatgttactcagtcgcccagtatgtgaaagaagatatgagggagacaaatgagttgatagtttgaattataggatttttgccacgttaccttgatgcaaatttgccaaatctgatactgtgaaaagatttgataacttttctaatgcctgactagtaagttttaaaacatcattctttaaaagaatagtttaatacttttggttattccaatcttcaatgttaacccaaaggattctgagataaaaattatgtgtcatctaaacttcagtttacagacaaaattagagctttgttttatttggagaagggggatgcattcatttgattttgttttttgtttttaattaattgaatataataggatacctagcaaatgttttcacaaaagtgaatctttgtgattttcattctagaaaacaatgttttaaatcacccaaatttaatcacatgtctttatatcataccagataactggtgtagtgtatccttttactgtttcaataacctctgcctcccccaccccttaactttaaaagaatgtgaaaaactagcatcatagtgcatataaatactcaaccacatttcagcttaagcttctaatttctcaagaagttgaaacagttagttatgtagttgaagcaatttgtgtgcaaagcctacatctaaacacttgagtgaataatcattaactgctcagtaccagacgtggcaaatctcaagtgacagtggaccccccccccccgcccagcttatcaactcgtcccctcttccacaccttcccagcatcacagtcagaggtcagcaggaagctgagtcattaccttcttggtgacctcccccaccatcttgtctcacttggaaaccgttgtcagtttatttactatgcaatagacattcattgttttgtatccagctagctttggtttaatatgccactgctttgtctttctgttacacatacagttttgatttatttacaatatatgctgtgccattttgatttttatattgtttggttggttgaataaatttgcgacactcaaacacttgaggtgatagttgttaaaaacaataccagtatttgatccagtttcatctcaactatgttatacctggacattttagatgtttatcaaaggtcttttatggggaagaaagtaaatgtatgaaataataaatgtgtgacatttatagggaatgttggctctgaacaaacttttgaaaacttggttgacaaaattttggatcaactgaaaaaagcatgacttttgaaatctctgaatgccttggttctcagtattatcattctttattgaatttatttcttattaaaatatgtagtttttaagactttttttctgacagtattatgtaattttttagcgtgggtagatgggagtgtcgcttgtatgttatcgtacagctgacatgtatttttgtctattctttattatcttagtttcatgctatgtatgtaccataaccaacctattgcctatgagaaacatgtaagataatgtatttacagccattgttacaagtttataatgtatttttctatcttgttttatatgtatgttatataacattcaaaaagaatttttttcttgattgagaaaaggatacaaaatgcaaaatccacaattttgataactgaaaattgccaattgttttgcagtactttattatattgggtgtcttgtcttttttgggcttttagttagctaatgaatgaatacattagacacttttgggttttagttgggattttacatagcttgcattttaattctttggttctttgctgtttctattaacccacagcattattttaataaatgttataataccacctac

SEQ ID NO: 453488 - DNA, 10581 bp, Homo sapiens
tgaactgaggcgaactccgccgccaagtgagtgaggaggaggaggaggagaaggaggaggaggaagaggaggagcgcagtcggagcgcggcggcagcggcagaggcgccgcggcggggaccagcccagagagaccccccgagcccgcggcacaggcggcggcggcgctgagcgggctcgaccagccgagcgagcggcggccccggctcctcctcgtccggcgccagcagcccgcgccccgcgcccgcactcggccagccgagacccgcctcccgcccgcccgccggcctcgtgagggacgcgccgagccgggcggccgagagcggcggcggctgggagcgcgtcgggcccgggcggaaagtgcctgcggggggcgggcgagcgcgcggtgccggccgccccggggctcggcgcgggagccagagcgggagccggcgcggagcgggacgccgggtcccgagcggcccgcggccggggctcagcccccgcccctccctcctctccggcggcggcggcggcggcggcgggcggagtgagctgcggagcctggaatatggtcggggaaatggaaacgaaggagaagccgaagcccaccccagattacctgatgcagctgatgaacgacaagaagctcatgagcagcctgcccaacttctgcgggatcttcaaccacctcgagcggctgctggacgaagaaattagcagagtacggaaagacatgtacaatgacacattaaatggcagtacagagaaaaggagtgcagaattgcctgatgctgtgggacctattgttcagttacaagagaaactttatgtgcctgtaaaagaatacccagattttaattttgttgggagaatccttggacctagaggacttacagccaaacaacttgaagcagaaaccggatgtaaaatcatggtccgaggcaaaggctcaatgagggataaaaaaaaggaggagcaaaatagaggcaagcccaattgggagcatctaaatgaagatttacatgtactaatcactgtggaagatgctcagaacagagcagaaatcaaattgaagagagcagttgaagaagtgaagaaattattggtacctgcagcagaaggagaagacagcctgaagaagatgcagctgatggagcttgcgattcagcccttgccttttctcttgcagcaacagcccaggctgctccaaggatcattactgggcctgcgccggttctcccaccagctgccctgcgtactcctacgccagctggccctaccataatgcctttgatcagacaaatacagaccgctgtcatgccaaacggaactcctcacccaactgctgcaatagttcctccagggcccgaagctggtttaatctatacaccctatgagtacccctacacattggcaccagctacatcaatccttgagtatcctattgaacctagtggtgtattagagtggattgaaatgccagtcatgcctgatatttcagcccattgacttgctggatgaaggactagaatacagcagctgttataacacgaccagtcaatgtggaacaaactgtttctgtgcaacccctttgttttaccagacaaaatttgaatactttttttcctgaattgtatatgaccttggtgctgcatgcatgctgttgacttttaggactttgatcttttaaggttttttttccccagcattaatattgatttataaagatttgaaaatctttaatgaactggagaacactaagatttaaactcgaaaattcgttgttcaagtaaagaaagccatgatgctctgtatgttatctgtgtgtgtgcatgcactcaggtgccctttgtttcatgaacaaatacatttcattgtacatgttttctgtttaaatcattgtataaagtaattgcaggtcagaattataccacagaactgtttatgagaggcttgtgtctgttgcacatttcttgaagcatttttaaaataacatgtaacctgtaaccttgttgtttaagttttcttttctattaatactctgtcctgtggtcccgtgcatgctccttttcccagaactcctctctgctgcacccacagcatctgttcccgaggagttatgactcttgacttcctgcagggctggggctcttagccaccagctgctgttccagcactttcagcgcaagatctccctgattttgccacgtggaattgtacttgtatatgattaccttatctaaaatgaataagaggtgatggaccagtttactgcttagaaatagcaagaggcactgcagtaaaacttgtttctcattgtaaagcttcatgtcttttgtttgttggaaaatttttacttatagaaacttaattattagactggtaaaataaagaccaaaatatgcagatttctaattggcattcataaggtgaataataataagtgcccaatgaaaaaatctattatggttaatttcatttcttgctttgccacctaagcagtaaaacatgatattgaccacttggagaactcagaaaattattttaaatttctaagttataataaatttgcacacagataacatgcatgctatttatgtcacatctcacattaaattattttaaaataagcagtgcccttcaaaacagatgcagacatgtgtgttggtagtagtgaggagattggtattagcatcaagtcttcattgatgactaatttttaattcccttccttttatctttaggtatggctttcccaacgaaaggctaagaattcaagaacggtcttaactgaaccctcatcagatctgaatttaacaaatgcttagtctcagcagcctccgggggaaaaaagcttagcctagcagtcagtgacttacttgcactttttgcacatagatataaagtaaaattatgttattaatttggtttagtctgtaatattacacagtaatggtaatttataaaggagtgtatagtagtatactgactgctaagtgtactatactgtttgctttactaatcacctaattcattgcagttcatacttattgactcagagtttaaaaccacaatctgtaggctttaagaattgcttttaaacctttttaagtgataaactcttgaagtggtcttaaggttagcaaataattgtctgtattaaacatggcgttatttaagtagtcctgctgcaagaaaggcacttcagtgaatatgtgactagtaaagcttaaatatgtttggatctaatagagctcatgaaatactgtaacttggggattgtaaatgaatggatacaataggttaaggcccaagatgtttgaaatgaatgcaatattaatagatgcatatatacatgacatattgtggttaattttaaaactactgtgccttaacgtgtttcttaaacttttgtagtaaatgaacatttgaaatccattttgataaacctgctgttaatgttttttccccccttgtgaatgttttctaactttgtcttggtaattgcaatttaactaggtgcggtggctactaaagttcgaaggcacgatatgcgtgtccatccttaccaaaggattgtgaccgcagaccgaggttagtttagttctgcagttcttgtctataagaaatgcgttgggtgtccataaaatttgcaacaccacacctgatggaaaaatgtaattgcttacctgcacacagttttttttccttttctaaatttgtttgtgatcattgacagatttaagggttgggttttttgttttggtttggttttttctcccttcatattttaacttattaaatcttctattattatgtactatgatttattcctactaaaacataaattagtcaatttggggagctattaaattttgatgttgcctcagttattttcattaataacttttgctaaaatttaccttttaaaagttctgaaatttggggttggtattgcaaaatgaattgaacggatggtgctttaatgagagaagtaaaggaatatatgcctcctgtgtacttttggagaaaactgaagatttagtttccatttttctttataataaaatatttgagccactgtataaacatgagggtgcacatgtcaagtacttagctaaaatcaacaaagtgaggactgtgaagataactttcatgtagttggatttttttatataaattagagcgtcaattcccttttattcttacattctcttgccaaaatggatcctttgatttttgtcatttgctgctaaaatatattatctgaaggtaaactgtctcttgaagttctgtggtggtatgagatccagctgtgtgaatataatttttgactaacctgtgactggaaaataagtcttcatttttctcctttacaacttttataatttgtgtcctgtatatgcccttggacccttttataaattatttttgcttattgaggaatggtattttcggtttattgacattgaattgttttctaagtttttccatcacaagataggaatatcaagcatggtagtaaaaaaggattttttacaagtttctattatggcacatttgtttcctacaaattaaattgatcaaagtctcaaatattagtggaggaaaaagtgctggatttgtacttcaattgtacatcttctatgaatttatgaaggacctacctgctttatgtgattaccttgagtactgatgataaatactagacacagctgttgtccacatcagaaataacatgcctttcccaaagacattgttaatatttgtttagcataatccataaagaacgttgaagacttttaaactaatgtattcatcactaacagtgattgttcagtgaacaaaatagaccccagctccgtggtcgtctatgaggatggtattccttgtaagtgttctgtatgagcacgtctcatagggatggggaagttttttggaaagtcacttgagttttaaagaaactggacaattccatgaataatttgaggttttattcatattgctaatgtctacaattgttctaaagagtattttaaagtagtttttttcccccagctaatctttccctatgtatgcccccttttaggagatttctcaccattttgctttaacacaataattattggcctacttaatactccagtgccttgagatagttggacatattttaggaagattttattgtatttggaaaattacgacacattccatgcatggatcttttgtagttacgtgttttgattagtcctgtcactgtttttatttaaaatgcagtgtcagcaaaccgaaatgctcatttcttttttagtaacagagtactcgtatacttatcactgtatgcactcattgggtctaagggagatgtctgaagtccttcacttaaattattttatgatactactgttttctctatttttgaggttaaaattattttaaaaaaatattttgaagagaagtttattagtataagcattcatttaatgcaaaaaaactcagcccttggacatataaccatgtaattctatatgaacgtttagagtactacatggttgaccaatatctagttctttactaaaagtaaactcacctctttatatatatttcaaaactgaatttgaagcctattagagaccaactgaccttttagttgtaatgaactgtatggtcttgcatggtgacacacctgtgtaggaggccaagacttggcagaggatgtagtctaggtgtcctggtatatataaatggtcactcacttcgtttatatattccacactcagaaaagaagtcagagttttttctgagtaatacaaaaaccatcacttacataatttgtataagaaactttaaacagttttaatcaaaactatgagtaacatcaaaaatgctttaagattctatattttggaatacctgtgaagtagtatgactacatcatgttaaatatttattttcttctatgattttggagcagcaatttttattttaaataaaattccacttttaagaaattcagggaagatttggtcacattgaagatacagtatttttgtagtatttataaactgttctaaatgatagactatagaaaacatttttgtcatatgaaggtaaatcagtccattattttggatcatttaaactgaacattacaccttctgggctttgatttatgaagtggcacagaatctaactttgcactgaatatcttttcattcacatctcctctgccttagtcacaatggcaacagtacagaaaattctatcaaacctcagaatatagtagaaataattaagctgttgaatgagtcttaaaaattatactactgttaagtggaccaagtttggtgaagcagaatgtgacaaaggttgattaaggaaggaacaactcaaggacattgggaatgataacttttccacttgagaactactttatgttttactgtaatttttaaagtttttttgtcctttttgttattttgcaaaagaaaatagtatttacaggtggcttcttttaaaatataaaaatataaagcaggaatgtatatgaaatgtcagattttattgtatttgcagagtattagctttgaaattgaataaagaaagctgtttgtagttttaaaatgccttattggtatcaattagaaatttcttctattttttgatgtacttagagctttttgagtgtagaattttaaatggcaggattttacagtgtttacatgcaagtgcattttataagtgttctatatgtgtaaaatagtattttcaactggaaagtgttggctagtgcaaaaggcctggccattttctggttcccatgatgttgcctacactgctagactacagtttagtatcgctttgtatcatgaggccaagaaattccatgttgtttgtaaatagaataattgaaaaagcaataaacatttattgaacaaaagaaaccttgtttggcccagagtttatgttgaaccaaatggttcatagaattttgaatttctttagattcatttctgttaatcatcagttattaataatcacatccatcattaatagttgctttaatgcttgcatcttagagaatactaatgcttaatagcagtcagatactgataactgcactgactgtttaaaaattctgtataccaaacctattcattgttgtttttcaatttccttcattgactgctactaactattagttgttagttgtattttatttctattttttcttgttaaccagtttttttctttttcattgggggagtgggctcttcttcatttgttcaaatcatgatacgaaattgtcatgattttaattgtattctgtagatggtgtcaatcagtttgtcagaattaaacatgcttttttttttattagttgtgattagtttttcatgttgtcattaagccgtcactagctgaaactaatctcttctctatcttttcttttcttttttttgttttgtttttttttgtttctaaccacccagccgccaccggcaactaacctatgaccttctgacctctgaactcttcacccaatgatgacctgaccatgcctgcctgctgatcagttaactggtaatcgcctttgcttgcctgtcgtcagtgcagcgagctgaggcacttgtccgttcgtcttaccatctaaccaaacaaaagacaaagaaattgttgtcctccaactcagctttttttttttttttttcctgtttgggtgaaagtggttctagaaactgcactgaatagtagtaaagcaataaggcccaattcatcccacagcactgatcatcttttaatatcccaccctaagcgaacggtaagaaggcctctcttaagaaggggagacagatggtccttaactactcaatgacagaggcagttactgtgagagacttctaggaatctttttcttctcatagcgaagtcaaagctctctctgaatgtactgtgtgatgatgcatcatgcatgaaccttcggtcagggatatcattggtgaagtgatttcaaaaagtattcaaaatttgatatgctgtttagtcactacagtgccctcaaagggcagaagttgcagccttttttatattgcctgccaaaatttgaagtattagaagaaagtgtgccatgagagaaaaacttaaggagttttgaaaagtaatgcaaataacaaaactgcaacactatttttaaaaagataaatatctgagttaaaattactgaatctttattttacacctaaaaaaatatgagaacaaggtacatgcattatgtgtcacattactgggcaaactgttcaagtatttttttttaaacctccctgtatagaaaaaaatcattaaggatgtaaaagccatgcttgcctatttgctgtatacatgtaatgaaattgtagataaagtgtagtgcattgaaacaaatgaacaaaaagtagatacttttactatacaagggtgctggtgcagaaaaaaatatatatatttttggaaatgtagcattttatactttcaagtgttataaaaaaaaagaaaaagaacaaagaaaccctttatttcattaaatgattttttctggtggttgtcaagaaacaaaagaccaaaagagcctttttgtctttcttttttattttttaagtattggaataagtctaaagaaaagaaagtgccttattttccttcatggtcattcagtcaagtgtctcataaagatcagctcctccctcagaatacaagttaatgcatgttactcagtcgcccagtatgtgaaagaagatatgagggagacaaatgagttgatagtttgaattataggatttttgccacgttaccttgatgcaaatttgccaaatctgatactgtgaaaagatttgataacttttctaatgcctgactagtaagttttaaaacatcattctttaaaagaatagtttaatacttttggttattccaatcttcaatgttaacccaaaggattctgagataaaaattatgtgtcatctaaacttcagtttacagacaaaattagagctttgttttatttggagaagggggatgcattcatttgattttgttttttgtttttaattaattgaatataataggatacctagcaaatgttttcacaaaagtgaatctttgtgattttcattctagaaaacaatgttttaaatcacccaaatttaatcacatgtctttatatcataccagataactggtgtagtgtatccttttactgtttcaataacctctgcctcccccaccccttaactttaaaagaatgtgaaaaactagcatcatagtgcatataaatactcaaccacatttcagcttaagcttctaatttctcaagaagttgaaacagttagttatgtagttgaagcaatttgtgtgcaaagcctacatctaaacacttgagtgaataatcattaactgctcagtaccagacgtggcaaatctcaagtgacagtggaccccccccccccgcccagcttatcaactcgtcccctcttccacaccttcccagcatcacagtcagaggtcagcaggaagctgagtcattaccttcttggtgacctcccccaccatcttgtctcacttggaaaccgttgtcagtttatttactatgcaatagacattcattgttttgtatccagctagctttggtttaatatgccactgctttgtctttctgttacacatacagttttgatttatttacaatatatgctgtgccattttgatttttatattgtttggttggttgaataaatttgcgacactcaaacacttgaggtgatagttgttaaaaacaataccagtatttgatccagtttcatctcaactatgttatacctggacattttagatgtttatcaaaggtcttttatggggaagaaagtaaatgtatgaaataataaatgtgtgacatttatagggaatgttggctctgaacaaacttttgaaaacttggttgacaaaattttggatcaactgaaaaaagcatgacttttgaaatctctgaatgccttggttctcagtattatcattctttattgaatttatttcttattaaaatatgtagtttttaagactttttttctgacagtattatgtaattttttagcgtgggtagatgggagtgtcgcttgtatgttatcgtacagctgacatgtatttttgtctattctttattatcttagtttcatgctatgtatgtaccataaccaacctattgcctatgagaaacatgtaagataatgtatttacagccattgttacaagtttataatgtatttttctatcttgttttatatgtatgttatataacattcaaaaagaatttttttcttgattgagaaaaggatacaaaatgcaaaatccacaattttgataactgaaaattgccaattgttttgcagtactttattatattgggtgtcttgtcttttttgggcttttagttagctaatgaatgaatacattagacacttttgggttttagttgggattttacatagcttgcattttaattctttggttctttgctgtttctattaacccacagcattattttaataaatgttataataccacctac

SEQ ID NO: 453489 - DNA, 10254 bp, Homo sapiens
ccgggggcttctcagttttattttatcaatctatatgcatatccttatgccagtctcacacagtgttaattactgtagctttgtagtcagttttgaaatcaagaagtatgagtccttcgttcttatttttcaaaattatcttggctgttctgtgtcccgtgtgtttctagataaattttaggatcatcttgtcaatttctggggatattggctgggttcttggtttacttccatgtgttctctttaaatggctagactgggctttggttttttcagtatcgggcggagcctggaatatggtcggggaaatggaaacgaaggagaagccgaagcccaccccagattacctgatgcagctgatgaacgacaagaagctcatgagcagcctgcccaacttctgcgggatcttcaaccacctcgagcggctgctggacgaagaaattagcagagtacggaaagacatgtacaatgacacattaaatggcagtacagagaaaaggagtgcagaattgcctgatgctgtgggacctattgttcagttacaagagaaactttatgtgcctgtaaaagaatacccagattttaattttgttgggagaatccttggacctagaggacttacagccaaacaacttgaagcagaaaccggatgtaaaatcatggtccgaggcaaaggctcaatgagggataaaaaaaaggaggagcaaaatagaggcaagcccaattgggagcatctaaatgaagatttacatgtactaatcactgtggaagatgctcagaacagagcagaaatcaaattgaagagagcagttgaagaagtgaagaaattattggtacctgcagcagaaggagaagacagcctgaagaagatgcagctgatggagcttgcgattctgaatggcacctacagagatgccaacattaaatcaccagcccttgccttttctcttgcagcaacagcccaggctgctccaaggatcattactgggcctgcgccggttctcccaccagctgccctgcgtactcctacgccagctggccctaccataatgcctttgatcagacaaatacagaccgctgtcatgccaaacggaactcctcacccaactgctgcaatagttcctccagggcccgaagctggtttaatctatacaccctatgagtacccctacacattggcaccagctacatcaatccttgagtatcctattgaacctagtggtgtattagagtggattgaaatgccagtcatgcctgatatttcagcccattgacttgctggatgaaggactagaatacagcagcttttaccagacaaaatttgaatactttttttcctgaattgtatatgaccttggtgctgcatgcatgctgttgacttttaggactttgatcttttaaggttttttttccccagcattaatattgatttataaagatttgaaaatctttaatgaactggagaacactaagatttaaactcgaaaattcgttgttcaagtaaagaaagccatgatgctctgtatgttatctgtgtgtgtgcatgcactcaggtgccctttgtttcatgaacaaatacatttcattgtacatgttttctgtttaaatcattgtataaagtaattgcaggtcagaattataccacagaactgtttatgagaggcttgtgtctgttgcacatttcttgaagcatttttaaaataacatgtaacctgtaaccttgttgtttaagttttcttttctattaatactctgtcctgtggtcccgtgcatgctccttttcccagaactcctctctgctgcacccacagcatctgttcccgaggagttatgactcttgacttcctgcagggctggggctcttagccaccagctgctgttccagcactttcagcgcaagatctccctgattttgccacgtggaattgtacttgtatatgattaccttatctaaaatgaataagaggtgatggaccagtttactgcttagaaatagcaagaggcactgcagtaaaacttgtttctcattgtaaagcttcatgtcttttgtttgttggaaaatttttacttatagaaacttaattattagactggtaaaataaagaccaaaatatgcagatttctaattggcattcataaggtgaataataataagtgcccaatgaaaaaatctattatggttaatttcatttcttgctttgccacctaagcagtaaaacatgatattgaccacttggagaactcagaaaattattttaaatttctaagttataataaatttgcacacagataacatgcatgctatttatgtcacatctcacattaaattattttaaaataagcagtgcccttcaaaacagatgcagacatgtgtgttggtagtagtgaggagattggtattagcatcaagtcttcattgatgactaatttttaattcccttccttttatctttaggtatggctttcccaacgaaaggctaagaattcaagaacggtcttaactgaaccctcatcagatctgaatttaacaaatgcttagtctcagcagcctccgggggaaaaaagcttagcctagcagtcagtgacttacttgcactttttgcacatagatataaagtaaaattatgttattaatttggtttagtctgtaatattacacagtaatggtaatttataaaggagtgtatagtagtatactgactgctaagtgtactatactgtttgctttactaatcacctaattcattgcagttcatacttattgactcagagtttaaaaccacaatctgtaggctttaagaattgcttttaaacctttttaagtgataaactcttgaagtggtcttaaggttagcaaataattgtctgtattaaacatggcgttatttaagtagtcctgctgcaagaaaggcacttcagtgaatatgtgactagtaaagcttaaatatgtttggatctaatagagctcatgaaatactgtaacttggggattgtaaatgaatggatacaataggttaaggcccaagatgtttgaaatgaatgcaatattaatagatgcatatatacatgacatattgtggttaattttaaaactactgtgccttaacgtgtttcttaaacttttgtagtaaatgaacatttgaaatccattttgataaacctgctgttaatgttttttccccccttgtgaatgttttctaactttgtcttggtaattgcaatttaactaggtgcggtggctactaaagttcgaaggcacgatatgcgtgtccatccttaccaaaggattgtgaccgcagaccgaggttagtttagttctgcagttcttgtctataagaaatgcgttgggtgtccataaaatttgcaacaccacacctgatggaaaaatgtaattgcttacctgcacacagttttttttccttttctaaatttgtttgtgatcattgacagatttaagggttgggttttttgttttggtttggttttttctcccttcatattttaacttattaaatcttctattattatgtactatgatttattcctactaaaacataaattagtcaatttggggagctattaaattttgatgttgcctcagttattttcattaataacttttgctaaaatttaccttttaaaagttctgaaatttggggttggtattgcaaaatgaattgaacggatggtgctttaatgagagaagtaaaggaatatatgcctcctgtgtacttttggagaaaactgaagatttagtttccatttttctttataataaaatatttgagccactgtataaacatgagggtgcacatgtcaagtacttagctaaaatcaacaaagtgaggactgtgaagataactttcatgtagttggatttttttatataaattagagcgtcaattcccttttattcttacattctcttgccaaaatggatcctttgatttttgtcatttgctgctaaaatatattatctgaaggtaaactgtctcttgaagttctgtggtggtatgagatccagctgtgtgaatataatttttgactaacctgtgactggaaaataagtcttcatttttctcctttacaacttttataatttgtgtcctgtatatgcccttggacccttttataaattatttttgcttattgaggaatggtattttcggtttattgacattgaattgttttctaagtttttccatcacaagataggaatatcaagcatggtagtaaaaaaggattttttacaagtttctattatggcacatttgtttcctacaaattaaattgatcaaagtctcaaatattagtggaggaaaaagtgctggatttgtacttcaattgtacatcttctatgaatttatgaaggacctacctgctttatgtgattaccttgagtactgatgataaatactagacacagctgttgtccacatcagaaataacatgcctttcccaaagacattgttaatatttgtttagcataatccataaagaacgttgaagacttttaaactaatgtattcatcactaacagtgattgttcagtgaacaaaatagaccccagctccgtggtcgtctatgaggatggtattccttgtaagtgttctgtatgagcacgtctcatagggatggggaagttttttggaaagtcacttgagttttaaagaaactggacaattccatgaataatttgaggttttattcatattgctaatgtctacaattgttctaaagagtattttaaagtagtttttttcccccagctaatctttccctatgtatgcccccttttaggagatttctcaccattttgctttaacacaataattattggcctacttaatactccagtgccttgagatagttggacatattttaggaagattttattgtatttggaaaattacgacacattccatgcatggatcttttgtagttacgtgttttgattagtcctgtcactgtttttatttaaaatgcagtgtcagcaaaccgaaatgctcatttcttttttagtaacagagtactcgtatacttatcactgtatgcactcattgggtctaagggagatgtctgaagtccttcacttaaattattttatgatactactgttttctctatttttgaggttaaaattattttaaaaaaatattttgaagagaagtttattagtataagcattcatttaatgcaaaaaaactcagcccttggacatataaccatgtaattctatatgaacgtttagagtactacatggttgaccaatatctagttctttactaaaagtaaactcacctctttatatatatttcaaaactgaatttgaagcctattagagaccaactgaccttttagttgtaatgaactgtatggtcttgcatggtgacacacctgtgtaggaggccaagacttggcagaggatgtagtctaggtgtcctggtatatataaatggtcactcacttcgtttatatattccacactcagaaaagaagtcagagttttttctgagtaatacaaaaaccatcacttacataatttgtataagaaactttaaacagttttaatcaaaactatgagtaacatcaaaaatgctttaagattctatattttggaatacctgtgaagtagtatgactacatcatgttaaatatttattttcttctatgattttggagcagcaatttttattttaaataaaattccacttttaagaaattcagggaagatttggtcacattgaagatacagtatttttgtagtatttataaactgttctaaatgatagactatagaaaacatttttgtcatatgaaggtaaatcagtccattattttggatcatttaaactgaacattacaccttctgggctttgatttatgaagtggcacagaatctaactttgcactgaatatcttttcattcacatctcctctgccttagtcacaatggcaacagtacagaaaattctatcaaacctcagaatatagtagaaataattaagctgttgaatgagtcttaaaaattatactactgttaagtggaccaagtttggtgaagcagaatgtgacaaaggttgattaaggaaggaacaactcaaggacattgggaatgataacttttccacttgagaactactttatgttttactgtaatttttaaagtttttttgtcctttttgttattttgcaaaagaaaatagtatttacaggtggcttcttttaaaatataaaaatataaagcaggaatgtatatgaaatgtcagattttattgtatttgcagagtattagctttgaaattgaataaagaaagctgtttgtagttttaaaatgccttattggtatcaattagaaatttcttctattttttgatgtacttagagctttttgagtgtagaattttaaatggcaggattttacagtgtttacatgcaagtgcattttataagtgttctatatgtgtaaaatagtattttcaactggaaagtgttggctagtgcaaaaggcctggccattttctggttcccatgatgttgcctacactgctagactacagtttagtatcgctttgtatcatgaggccaagaaattccatgttgtttgtaaatagaataattgaaaaagcaataaacatttattgaacaaaagaaaccttgtttggcccagagtttatgttgaaccaaatggttcatagaattttgaatttctttagattcatttctgttaatcatcagttattaataatcacatccatcattaatagttgctttaatgcttgcatcttagagaatactaatgcttaatagcagtcagatactgataactgcactgactgtttaaaaattctgtataccaaacctattcattgttgtttttcaatttccttcattgactgctactaactattagttgttagttgtattttatttctattttttcttgttaaccagtttttttctttttcattgggggagtgggctcttcttcatttgttcaaatcatgatacgaaattgtcatgattttaattgtattctgtagatggtgtcaatcagtttgtcagaattaaacatgcttttttttttattagttgtgattagtttttcatgttgtcattaagccgtcactagctgaaactaatctcttctctatcttttcttttcttttttttgttttgtttttttttgtttctaaccacccagccgccaccggcaactaacctatgaccttctgacctctgaactcttcacccaatgatgacctgaccatgcctgcctgctgatcagttaactggtaatcgcctttgcttgcctgtcgtcagtgcagcgagctgaggcacttgtccgttcgtcttaccatctaaccaaacaaaagacaaagaaattgttgtcctccaactcagctttttttttttttttttcctgtttgggtgaaagtggttctagaaactgcactgaatagtagtaaagcaataaggcccaattcatcccacagcactgatcatcttttaatatcccaccctaagcgaacggtaagaaggcctctcttaagaaggggagacagatggtccttaactactcaatgacagaggcagttactgtgagagacttctaggaatctttttcttctcatagcgaagtcaaagctctctctgaatgtactgtgtgatgatgcatcatgcatgaaccttcggtcagggatatcattggtgaagtgatttcaaaaagtattcaaaatttgatatgctgtttagtcactacagtgccctcaaagggcagaagttgcagccttttttatattgcctgccaaaatttgaagtattagaagaaagtgtgccatgagagaaaaacttaaggagttttgaaaagtaatgcaaataacaaaactgcaacactatttttaaaaagataaatatctgagttaaaattactgaatctttattttacacctaaaaaaatatgagaacaaggtacatgcattatgtgtcacattactgggcaaactgttcaagtatttttttttaaacctccctgtatagaaaaaaatcattaaggatgtaaaagccatgcttgcctatttgctgtatacatgtaatgaaattgtagataaagtgtagtgcattgaaacaaatgaacaaaaagtagatacttttactatacaagggtgctggtgcagaaaaaaatatatatatttttggaaatgtagcattttatactttcaagtgttataaaaaaaaagaaaaagaacaaagaaaccctttatttcattaaatgattttttctggtggttgtcaagaaacaaaagaccaaaagagcctttttgtctttcttttttattttttaagtattggaataagtctaaagaaaagaaagtgccttattttccttcatggtcattcagtcaagtgtctcataaagatcagctcctccctcagaatacaagttaatgcatgttactcagtcgcccagtatgtgaaagaagatatgagggagacaaatgagttgatagtttgaattataggatttttgccacgttaccttgatgcaaatttgccaaatctgatactgtgaaaagatttgataacttttctaatgcctgactagtaagttttaaaacatcattctttaaaagaatagtttaatacttttggttattccaatcttcaatgttaacccaaaggattctgagataaaaattatgtgtcatctaaacttcagtttacagacaaaattagagctttgttttatttggagaagggggatgcattcatttgattttgttttttgtttttaattaattgaatataataggatacctagcaaatgttttcacaaaagtgaatctttgtgattttcattctagaaaacaatgttttaaatcacccaaatttaatcacatgtctttatatcataccagataactggtgtagtgtatccttttactgtttcaataacctctgcctcccccaccccttaactttaaaagaatgtgaaaaactagcatcatagtgcatataaatactcaaccacatttcagcttaagcttctaatttctcaagaagttgaaacagttagttatgtagttgaagcaatttgtgtgcaaagcctacatctaaacacttgagtgaataatcattaactgctcagtaccagacgtggcaaatctcaagtgacagtggaccccccccccccgcccagcttatcaactcgtcccctcttccacaccttcccagcatcacagtcagaggtcagcaggaagctgagtcattaccttcttggtgacctcccccaccatcttgtctcacttggaaaccgttgtcagtttatttactatgcaatagacattcattgttttgtatccagctagctttggtttaatatgccactgctttgtctttctgttacacatacagttttgatttatttacaatatatgctgtgccattttgatttttatattgtttggttggttgaataaatttgcgacactcaaacacttgaggtgatagttgttaaaaacaataccagtatttgatccagtttcatctcaactatgttatacctggacattttagatgtttatcaaaggtcttttatggggaagaaagtaaatgtatgaaataataaatgtgtgacatttatagggaatgttggctctgaacaaacttttgaaaacttggttgacaaaattttggatcaactgaaaaaagcatgacttttgaaatctctgaatgccttggttctcagtattatcattctttattgaatttatttcttattgtgggtagatgggagtgtcgcttgtatgttatcgtacagctgacatgtatttttgtctattctttattatcttagtttcatgctatgtatgtaccataaccaacctattgcctatgagaaacatgtaagataatgtatttacagccattgttacaagtttataatgtatttttctatcttgttttatatgtatgttatataacattcaaaaagaatttttttcttgattgagaaaaggatacaaaatgcaaaatccacaattttgataactgaaaattgccaattgttttgcagtactttattatattgggtgtcttgtcttttttgggcttttagttagctaatgaatgaatacattagacacttttgggttttagttgggattttacatagcttgcattttaattctttggttctttgctgtttctattaacccacagcattattttaataaatgttataataccacctac

SEQ ID NO: 453490 - DNA, 6695 bp, Homo sapiens
agagagagagagagagagagagagagagagagagagagagagagagagagagagagaaaatgaattgaacggatggtgctttaatgagagaagtaaaggaatatatgcctcctgtgtacttttggagaaaactgaagatttagtttccatttttctttataataaaatatttgagccactgtataaacatgagggtgcacatgtcaagtacttagctaaaatcaacaaagtgaggactgtgaagataactttcatgtagttggatttttttatataaattagagcgtcaattcccttttattcttacattctcttgccaaaatggatcctttgatttttgtcatttgctgctaaaatatattatctgaaggtaaactgtctcttgaagttctgtggtggtatgagatccagctgtgtgaatataatttttgactaacctgtgactggaaaataagtcttcatttttctcctttacaacttttataatttgtgtcctgtatatgcccttggacccttttataaattatttttgcttattgaggaatggtattttcggtttattgacattgaattgttttctaagtttttccatcacaagataggaatatcaagcatggtagtaaaaaaggattttttacaagtttctattatggcacatttgtttcctacaaattaaattgatcaaagtctcaaatattagtggaggaaaaagtgctggatttgtacttcaattgtacatcttctatgaatttatgaaggacctacctgctttatgtgattaccttgagtactgatgataaatactagacacagctgttgtccacatcagaaataacatgcctttcccaaagacattgttaatatttgtttagcataatccataaagaacgttgaagacttttaaactaatgtattcatcactaacagtgattgttcagtgaacaaaatagaccccagctccgtggtcgtctatgaggatggtattccttgtaagtgttctgtatgagcacgtctcatagggatggggaagttttttggaaagtcacttgagttttaaagaaactggacaattccatgaataatttgaggttttattcatattgctaatgtctacaattgttctaaagagtattttaaagtagtttttttcccccagctaatctttccctatgtatgcccccttttaggagatttctcaccattttgctttaacacaataattattggcctacttaatactccagtgccttgagatagttggacatattttaggaagattttattgtatttggaaaattacgacacattccatgcatggatcttttgtagttacgtgttttgattagtcctgtcactgtttttatttaaaatgcagtgtcagcaaaccgaaatgctcatttcttttttagtaacagagtactcgtatacttatcactgtatgcactcattgggtctaagggagatgtctgaagtccttcacttaaattattttatgatactactgttttctctatttttgaggttaaaattattttaaaaaaatattttgaagagaagtttattagtataagcattcatttaatgcaaaaaaactcagcccttggacatataaccatgtaattctatatgaacgtttagagtactacatggttgaccaatatctagttctttactaaaagtaaactcacctctttatatatatttcaaaactgaatttgaagcctattagagaccaactgaccttttagttgtaatgaactgtatggtcttgcatggtgacacacctgtgtaggaggccaagacttggcagaggatgtagtctaggtgtcctggtatatataaatggtcactcacttcgtttatatattccacactcagaaaagaagtcagagttttttctgagtaatacaaaaaccatcacttacataatttgtataagaaactttaaacagttttaatcaaaactatgagtaacatcaaaaatgctttaagattctatattttggaatacctgtgaagtagtatgactacatcatgttaaatatttattttcttctatgattttggagcagcaatttttattttaaataaaattccacttttaagaaattcagggaagatttggtcacattgaagatacagtatttttgtagtatttataaactgttctaaatgatagactatagaaaacatttttgtcatatgaaggtaaatcagtccattattttggatcatttaaactgaacattacaccttctgggctttgatttatgaagtggcacagaatctaactttgcactgaatatcttttcattcacatctcctctgccttagtcacaatggcaacagtacagaaaattctatcaaacctcagaatatagtagaaataattaagctgttgaatgagtcttaaaaattatactactgttaagtggaccaagtttggtgaagcagaatgtgacaaaggttgattaaggaaggaacaactcaaggacattgggaatgataacttttccacttgagaactactttatgttttactgtaatttttaaagtttttttgtcctttttgttattttgcaaaagaaaatagtatttacaggtggcttcttttaaaatataaaaatataaagcaggaatgtatatgaaatgtcagattttattgtatttgcagagtattagctttgaaattgaataaagaaagctgtttgtagttttaaaatgccttattggtatcaattagaaatttcttctattttttgatgtacttagagctttttgagtgtagaattttaaatggcaggattttacagtgtttacatgcaagtgcattttataagtgttctatatgtgtaaaatagtattttcaactggaaagtgttggctagtgcaaaaggcctggccattttctggttcccatgatgttgcctacactgctagactacagtttagtatcgctttgtatcatgaggccaagaaattccatgttgtttgtaaatagaataattgaaaaagcaataaacatttattgaacaaaagaaaccttgtttggcccagagtttatgttgaaccaaatggttcatagaattttgaatttctttagattcatttctgttaatcatcagttattaataatcacatccatcattaatagttgctttaatgcttgcatcttagagaatactaatgcttaatagcagtcagatactgataactgcactgactgtttaaaaattctgtataccaaacctattcattgttgtttttcaatttccttcattgactgctactaactattagttgttagttgtattttatttctattttttcttgttaaccagtttttttctttttcattgggggagtgggctcttcttcatttgttcaaatcatgatacgaaattgtcatgattttaattgtattctgtagatggtgtcaatcagtttgtcagaattaaacatgcttttttttttattagttgtgattagtttttcatgttgtcattaagccgtcactagctgaaactaatctcttctctatcttttcttttcttttttttgttttgtttttttttgtttctaaccacccagccgccaccggcaactaacctatgaccttctgacctctgaactcttcacccaatgatgacctgaccatgcctgcctgctgatcagttaactggtaatcgcctttgcttgcctgtcgtcagtgcagcgagctgaggcacttgtccgttcgtcttaccatctaaccaaacaaaagacaaagaaattgttgtcctccaactcagctttttttttttttttttcctgtttgggtgaaagtggttctagaaactgcactgaatagtagtaaagcaataaggcccaattcatcccacagcactgatcatcttttaatatcccaccctaagcgaacggtaagaaggcctctcttaagaaggggagacagatggtccttaactactcaatgacagaggcagttactgtgagagacttctaggaatctttttcttctcatagcgaagtcaaagctctctctgaatgtactgtgtgatgatgcatcatgcatgaaccttcggtcagggatatcattggtgaagtgatttcaaaaagtattcaaaatttgatatgctgtttagtcactacagtgccctcaaagggcagaagttgcagccttttttatattgcctgccaaaatttgaagtattagaagaaagtgtgccatgagagaaaaacttaaggagttttgaaaagtaatgcaaataacaaaactgcaacactatttttaaaaagataaatatctgagttaaaattactgaatctttattttacacctaaaaaaatatgagaacaaggtacatgcattatgtgtcacattactgggcaaactgttcaagtatttttttttaaacctccctgtatagaaaaaaatcattaaggatgtaaaagccatgcttgcctatttgctgtatacatgtaatgaaattgtagataaagtgtagtgcattgaaacaaatgaacaaaaagtagatacttttactatacaagggtgctggtgcagaaaaaaatatatatatttttggaaatgtagcattttatactttcaagtgttataaaaaaaaagaaaaagaacaaagaaaccctttatttcattaaatgattttttctggtggttgtcaagaaacaaaagaccaaaagagcctttttgtctttcttttttattttttaagtattggaataagtctaaagaaaagaaagtgccttattttccttcatggtcattcagtcaagtgtctcataaagatcagctcctccctcagaatacaagttaatgcatgttactcagtcgcccagtatgtgaaagaagatatgagggagacaaatgagttgatagtttgaattataggatttttgccacgttaccttgatgcaaatttgccaaatctgatactgtgaaaagatttgataacttttctaatgcctgactagtaagttttaaaacatcattctttaaaagaatagtttaatacttttggttattccaatcttcaatgttaacccaaaggattctgagataaaaattatgtgtcatctaaacttcagtttacagacaaaattagagctttgttttatttggagaagggggatgcattcatttgattttgttttttgtttttaattaattgaatataataggatacctagcaaatgttttcacaaaagtgaatctttgtgattttcattctagaaaacaatgttttaaatcacccaaatttaatcacatgtctttatatcataccagataactggtgtagtgtatccttttactgtttcaataacctctgcctcccccaccccttaactttaaaagaatgtgaaaaactagcatcatagtgcatataaatactcaaccacatttcagcttaagcttctaatttctcaagaagttgaaacagttagttatgtagttgaagcaatttgtgtgcaaagcctacatctaaacacttgagtgaataatcattaactgctcagtaccagacgtggcaaatctcaagtgacagtggaccccccccccccgcccagcttatcaactcgtcccctcttccacaccttcccagcatcacagtcagaggtcagcaggaagctgagtcattaccttcttggtgacctcccccaccatcttgtctcacttggaaaccgttgtcagtttatttactatgcaatagacattcattgttttgtatccagctagctttggtttaatatgccactgctttgtctttctgttacacatacagttttgatttatttacaatatatgctgtgccattttgatttttatattgtttggttggttgaataaatttgcgacactcaaacacttgaggtgatagttgttaaaaacaataccagtatttgatccagtttcatctcaactatgttatacctggacattttagatgtttatcaaaggtcttttatggggaagaaagtaaatgtatgaaataataaatgtgtgacatttatagggaatgttggctctgaacaaacttttgaaaacttggttgacaaaattttggatcaactgaaaaaagcatgacttttgaaatctctgaatgccttggttctcagtattatcattctttattgaatttatttcttattaaaatatgtagtttttaagactttttttctgacagtattatgtaattttttagcgtgggtagatgggagtgtcgcttgtatgttatcgtacagctgacatgtatttttgtctattctttattatcttagtttcatgctatgtatgtaccataaccaacctattgcctatgagaaacatgtaagataatgtatttacagccattgttacaagtttataatgtatttttctatcttgttttatatgtatgttatataacattcaaaaagaatttttttcttgattgagaaaaggatacaaaatgcaaaatccacaattttgataactgaaaattgccaattgttttgcagtactttattatattgggtgtcttgtcttttttgggcttttagttagctaatgaatgaatacattagacacttttgggttttagttgggattttacatagcttgcattttaattctttggttctttgctgtttctattaacccacagcattattttaataaatgttataataccacctac

SEQ ID NO: 453491 - DNA, 6409 bp, Homo sapiens
ccgggggcttctcagttttattttatcaatctatatgcatatccttatgccagtctcacacagtgttaattactgtagctttgtagtcagttttgaaatcaagaagtatgagtccttcgttcttatttttcaaaattatcttggctgttctgtgtcccgtgtgtttctagataaattttaggatcatcttgtcaatttctggggatattggctgggttcttggtttacttccatgtgttctctttaaatggctagactgggctttggttttttcagtatcgggcggagcctggaatatggtcggggaaatggaaacgaaggagaagccgaagcccaccccagattacctgatgcagctgatgaacgacaagaagctcatgagcagcctgcccaacttctgcgggatcttcaaccacctcgagcggctgctggacgaagaaattagcagagtacggaaagacatgtacaatgacacattaaatggcagtacagagaaaaggagtgcagaattgcctgatgctgtgggacctattgttcagttacaagagaaactttatgtgcctgtaaaagaatacccagattttaattttgttgggagaatccttggacctagaggacttacagccaaacaacttgaagcagaaaccggatgtaaaatcatggtccgaggcaaaggctcaatgagggataaaaaaaaggaggagcaaaatagaggcaagcccaattgggagcatctaaatgaagatttacatgtactaatcactgtggaagatgctcagaacagagcagaaatcaaattgaagagagcagttgaagaagtgaagaaattattggtacctgcagcagaaggagaagacagcctgaagaagatgcagctgatggagcttgcgattctgaatggcacctacagagatgccaacattaaatcaccagcccttgccttttctcttgcagcaacagcccaggctgctccaaggatcattactgggcctgcgccggttctcccaccagctgccctgcgtactcctacgccagctggccctaccataatgcctttgatcagacaaatacagaccgctgtcatgccaaacggaactcctcacccaactgctgcaatagttcctccagggcccgaagctggtttaatctatacaccctatgagtacccctacacattggcaccagctacatcaatccttgagtatcctattgaacctagtggtgtattagagtggattgaaatgccagtcatgcctgatatttcagcccattgacttgctggatgaaggactagaatacagcagcttttaccagacaaaatttgaatactttttttcctgaattgtatatgaccttggtgctgcatgcatgctgttgacttttaggactttgatcttttaaggttttttttccccagcattaatattgatttataaagatttgaaaatctttaatgaactggagaacactaagatttaaactcgaaaattcgttgttcaagtaaagaaagccatgatgctctgtatgttatctgtgtgtgtgcatgcactcaggtgccctttgtttcatgaacaaatacatttcattgtacatgttttctgtttaaatcattgtataaagtaattgcaggtcagaattataccacagaactgtttatgagaggcttgtgtctgttgcacatttcttgaagcatttttaaaataacatgtaacctgtaaccttgttgtttaagttttcttttctattaatactctgtcctgtggtcccgtgcatgctccttttcccagaactcctctctgctgcacccacagcatctgttcccgaggagttatgactcttgacttcctgcagggctggggctcttagccaccagctgctgttccagcactttcagcgcaagatctccctgattttgccacgtggaattgtacttgtatatgattaccttatctaaaatgaataagaggtgatggaccagtttactgcttagaaatagcaagaggcactgcagtaaaacttgtttctcattgtaaagcttcatgtcttttgtttgttggaaaatttttacttatagaaacttaattattagactggtaaaataaagaccaaaatatgcagatttctaattggcattcataaggtgaataataataagtgcccaatgaaaaaatctattatggttaatttcatttcttgctttgccacctaagcagtaaaacatgatattgaccacttggagaactcagaaaattattttaaatttctaagttataataaatttgcacacagataacatgcatgctatttatgtcacatctcacattaaattattttaaaataagcagtgcccttcaaaacagatgcagacatgtgtgttggtagtagtgaggagattggtattagcatcaagtcttcattgatgactaatttttaattcccttccttttatctttaggtatggctttcccaacgaaaggctaagaattcaagaacggtcttaactgaaccctcatcagatctgaatttaacaaatgcttagtctcagcagcctccgggggaaaaaagcttagcctagcagtcagtgacttacttgcactttttgcacatagatataaagtaaaattatgttattaatttggtttagtctgtaatattacacagtaatggtaatttataaaggagtgtatagtagtatactgactgctaagtgtactatactgtttgctttactaatcacctaattcattgcagttcatacttattgactcagagtttaaaaccacaatctgtaggctttaagaattgcttttaaacctttttaagtgataaactcttgaagtggtcttaaggttagcaaataattgtctgtattaaacatggcgttatttaagtagtcctgctgcaagaaaggcacttcagtgaatatgtgactagtaaagcttaaatatgtttggatctaatagagctcatgaaatactgtaacttggggattgtaaatgaatggatacaataggttaaggcccaagatgtttgaaatgaatgcaatattaatagatgcatatatacatgacatattgtggttaattttaaaactactgtgccttaacgtgtttcttaaacttttgtagtaaatgaacatttgaaatccattttgataaacctgctgttaatgttttttccccccttgtgaatgttttctaactttgtcttggtaattgcaatttaactaggtgcggtggctactaaagttcgaaggcacgatatgcgtgtccatccttaccaaaggattgtgaccgcagaccgagccgccaccggcaactaacctatgaccttctgacctctgaactcttcacccaatgatgacctgaccatgcctgcctgctgatcagttaactggtaatcgcctttgcttgcctgtcgtcagtgcagcgagctgaggcacttgtccgttcgtcttaccatctaaccaaacaaaagacaaagaaattgttgtcctccaactcagctttttttttttttttttcctgtttgggtgaaagtggttctagaaactgcactgaatagtagtaaagcaataaggcccaattcatcccacagcactgatcatcttttaatatcccaccctaagcgaacggtaagaaggcctctcttaagaaggggagacagatggtccttaactactcaatgacagaggcagttactgtgagagacttctaggaatctttttcttctcatagcgaagtcaaagctctctctgaatgtactgtgtgatgatgcatcatgcatgaaccttcggtcagggatatcattggtgaagtgatttcaaaaagtattcaaaatttgatatgctgtttagtcactacagtgccctcaaagggcagaagttgcagccttttttatattgcctgccaaaatttgaagtattagaagaaagtgtgccatgagagaaaaacttaaggagttttgaaaagtaatgcaaataacaaaactgcaacactatttttaaaaagataaatatctgagttaaaattactgaatctttattttacacctaaaaaaatatgagaacaaggtacatgcattatgtgtcacattactgggcaaactgttcaagtatttttttttaaacctccctgtatagaaaaaaatcattaaggatgtaaaagccatgcttgcctatttgctgtatacatgtaatgaaattgtagataaagtgtagtgcattgaaacaaatgaacaaaaagtagatacttttactatacaagggtgctggtgcagaaaaaaatatatatatttttggaaatgtagcattttatactttcaagtgttataaaaaaaaagaaaaagaacaaagaaaccctttatttcattaaatgattttttctggtggttgtcaagaaacaaaagaccaaaagagcctttttgtctttcttttttattttttaagtattggaataagtctaaagaaaagaaagtgccttattttccttcatggtcattcagtcaagtgtctcataaagatcagctcctccctcagaatacaagttaatgcatgttactcagtcgcccagtatgtgaaagaagatatgagggagacaaatgagttgatagtttgaattataggatttttgccacgttaccttgatgcaaatttgccaaatctgatactgtgaaaagatttgataacttttctaatgcctgactagtaagttttaaaacatcattctttaaaagaatagtttaatacttttggttattccaatcttcaatgttaacccaaaggattctgagataaaaattatgtgtcatctaaacttcagtttacagacaaaattagagctttgttttatttggagaagggggatgcattcatttgattttgttttttgtttttaattaattgaatataataggatacctagcaaatgttttcacaaaagtgaatctttgtgattttcattctagaaaacaatgttttaaatcacccaaatttaatcacatgtctttatatcataccagataactggtgtagtgtatccttttactgtttcaataacctctgcctcccccaccccttaactttaaaagaatgtgaaaaactagcatcatagtgcatataaatactcaaccacatttcagcttaagcttctaatttctcaagaagttgaaacagttagttatgtagttgaagcaatttgtgtgcaaagcctacatctaaacacttgagtgaataatcattaactgctcagtaccagacgtggcaaatctcaagtgacagtggaccccccccccccgcccagcttatcaactcgtcccctcttccacaccttcccagcatcacagtcagaggtcagcaggaagctgagtcattaccttcttggtgacctcccccaccatcttgtctcacttggaaaccgttgtcagtttatttactatgcaatagacattcattgttttgtatccagctagctttggtttaatatgccactgctttgtctttctgttacacatacagttttgatttatttacaatatatgctgtgccattttgatttttatattgtttggttggttgaataaatttgcgacactcaaacacttgaggtgatagttgttaaaaacaataccagtatttgatccagtttcatctcaactatgttatacctggacattttagatgtttatcaaaggtcttttatggggaagaaagtaaatgtatgaaataataaatgtgtgacatttatagggaatgttggctctgaacaaacttttgaaaacttggttgacaaaattttggatcaactgaaaaaagcatgacttttgaaatctctgaatgccttggttctcagtattatcattctttattgaatttatttcttattaaaatatgtagtttttaagactttttttctgacagtattatgtaattttttagcgtgggtagatgggagtgtcgcttgtatgttatcgtacagctgacatgtatttttgtctattctttattatcttagtttcatgctatgtatgtaccataaccaacctattgcctatgagaaacatgtaagataatgtatttacagccattgttacaagtttataatgtatttttctatcttgttttatatgtatgttatataacattcaaaaagaatttttttcttgattgagaaaaggatacaaaatgcaaaatccacaattttgataactgaaaattgccaattgttttgcagtactttattatattgggtgtcttgtcttttttgggcttttagttagctaatgaatgaatacattagacacttttgggttttagttgggattttacatagcttgcattttaattctttggttctttgctgtttctattaacccacagcattattttaataaatgttataataccacctac

SEQ ID NO: 453492 - DNA, 4355 bp, Homo sapiens
ccgggggcttctcagttttattttatcaatctatatgcatatccttatgccagtctcacacagtgttaattactgtagctttgtagtcagttttgaaatcaagaagtatgagtccttcgttcttatttttcaaaattatcttggctgttctgtgtcccgtgtgtttctagataaattttaggatcatcttgtcaatttctggggatattggctgggttcttggtttacttccatgtgttctctttaaatggctagactgggctttggttttttcagtatcgggcggagcctggaatatggtcggggaaatggaaacgaaggagaagccgaagcccaccccagattacctgatgcagctgatgaacgacaagaagctcatgagcagcctgcccaacttctgcgggatcttcaaccacctcgagcggctgctggacgaagaaattagcagagtacggaaagacatgtacaatgacacattaaatggcagtacagagaaaaggagtgcagaattgcctgatgctgtgggacctattgttcagttacaagagaaactttatgtgcctgtaaaagaatacccagattttaattttgttgggagaatccttggacctagaggacttacagccaaacaacttgaagcagaaaccggatgtaaaatcatggtccgaggcaaaggctcaatgagggataaaaaaaaggaggagcaaaatagaggcaagcccaattgggagcatctaaatgaagatttacatgtactaatcactgtggaagatgctcagaacagagcagaaatcaaattgaagagagcagttgaagaagtgaagaaattattggtacctgcagcagaaggagaagacagcctgaagaagatgcagctgatggagcttgcgattctgaatggcacctacagagatgccaacattaaatcaccagcccttgccttttctcttgcagcaacagcccaggctgctccaaggatcattactgggcctgcgccggttctcccaccagctgccctgcgtactcctacgccagctggccctaccataatgcctttgatcagacaaatacagaccgctgtcatgccaaacggaactcctcacccaactgctgcaatagttcctccagggcccgaagctggtttaatctatacaccctatgagtacccctacacattggcaccagctacatcaatccttgagtatcctattgaacctagtggtgtattaggtgcggtggctactaaagttcgaaggcacgatatgcgtgtccatccttaccaaaggattgtgaccgcagaccgagccgccaccggcaactaacctatgaccttctgacctctgaactcttcacccaatgatgacctgaccatgcctgcctgctgatcagttaactggtaatcgcctttgcttgcctgtcgtcagtgcagcgagctgaggcacttgtccgttcgtcttaccatctaaccaaacaaaagacaaagaatggttctagaaactgcactgaatagtagtaaagcaataaggcccaattcatcccacagcactgatcatcttttaatatcccaccctaagcgaacggtaagaaggcctctcttaagaaggggagacagatggtccttaactactcaatgacagaggcagttactgtgagagacttctaggaatctttttcttctcatagcgaagtcaaagctctctctgaatgtactgtgtgatgatgcatcatgcatgaaccttcggtcagggatatcattggtgaagtgatttcaaaaagtattcaaaatttgatatgctgtttagtcactacagtgccctcaaagggcagaagttgcagccttttttatattgcctgccaaaatttgaagtattagaagaaagtgtgccatgagagaaaaacttaaggagttttgaaaagtaatgcaaataacaaaactgcaacactatttttaaaaagataaatatctgagttaaaattactgaatctttattttacacctaaaaaaatatgagaacaaggtacatgcattatgtgtcacattactgggcaaactgttcaagtatttttttttaaacctccctgtatagaaaaaaatcattaaggatgtaaaagccatgcttgcctatttgctgtatacatgtaatgaaattgtagataaagtgtagtgcattgaaacaaatgaacaaaaagtagatacttttactatacaagggtgctggtgcagaaaaaaatatatatatttttggaaatgtagcattttatactttcaagtgttataaaaaaaaagaaaaagaacaaagaaaccctttatttcattaaatgattttttctggtggttgtcaagaaacaaaagaccaaaagagcctttttgtctttcttttttattttttaagtattggaataagtctaaagaaaagaaagtgccttattttccttcatggtcattcagtcaagtgtctcataaagatcagctcctccctcagaatacaagttaatgcatgttactcagtcgcccagtatgtgaaagaagatatgagggagacaaatgagttgatagtttgaattataggatttttgccacgttaccttgatgcaaatttgccaaatctgatactgtgaaaagatttgataacttttctaatgcctgactagtaagttttaaaacatcattctttaaaagaatagtttaatacttttggttattccaatcttcaatgttaacccaaaggattctgagataaaaattatgtgtcatctaaacttcagtttacagacaaaattagagctttgttttatttggagaagggggatgcattcatttgattttgttttttgtttttaattaattgaatataataggatacctagcaaatgttttcacaaaagtgaatctttgtgattttcattctagaaaacaatgttttaaatcacccaaatttaatcacatgtctttatatcataccagataactggtgtagtgtatccttttactgtttcaataacctctgcctcccccaccccttaactttaaaagaatgtgaaaaactagcatcatagtgcatataaatactcaaccacatttcagcttaagcttctaatttctcaagaagttgaaacagttagttatgtagttgaagcaatttgtgtgcaaagcctacatctaaacacttgagtgaataatcattaactgctcagtaccagacgtggcaaatctcaagtgacagtggaccccccccccccgcccagcttatcaactcgtcccctcttccacaccttcccagcatcacagtcagaggtcagcaggaagctgagtcattaccttcttggtgacctcccccaccatcttgtctcacttggaaaccgttgtcagtttatttactatgcaatagacattcattgttttgtatccagctagctttggtttaatatgccactgctttgtctttctgttacacatacagttttgatttatttacaatatatgctgtgccattttgatttttatattgtttggttggttgaataaatttgcgacactcaaacacttgaggtgatagttgttaaaaacaataccagtatttgatccagtttcatctcaactatgttatacctggacattttagatgtttatcaaaggtcttttatggggaagaaagtaaatgtatgaaataataaatgtgtgacatttatagggaatgttggctctgaacaaacttttgaaaacttggttgacaaaattttggatcaactgaaaaaagcatgacttttgaaatctctgaatgccttggttctcagtattatcattctttattgaatttatttcttattaaaatatgtagtttttaagactttttttctgacagtattatgtaattttttagcgtgggtagatgggagtgtcgcttgtatgttatcgtacagctgacatgtatttttgtctattctttattatcttagtttcatgctatgtatgtaccataaccaacctattgcctatgagaaacatgtaagataatgtatttacagccattgttacaagtttataatgtatttttctatcttgttttatatgtatgttatataacattcaaaaagaatttttttcttgattgagaaaaggatacaaaatgcaaaatccacaattttgataactgaaaattgccaattgttttgcagtactttattatattgggtgtcttgtcttttttgggcttttagttagctaatgaatgaatacattagacacttttgggttttagttgggattttacatagcttgcattttaattctttggttctttgctgtttctattaacccacagcattattttaataaatgttataataccacctac

SEQ ID NO: 453493 - DNA, 4709 bp, Homo sapiens
gggtctatgtattcatttctcagtcagcagatgggctgggagtttcatccctcccatctactccatgtgttctgctcctttactctttactgggtgtctatgtcttgttgtggggggaggagaaaaagagaggacagacggagaataaggtggagagctgacagaactccaaccgtctctcaagtggcatcgataaacaccggtgtttatcgatgccacttcgtaaatcagtccattattttggatcatttaaactgaacattacaccttctgggctttgatttatgaagtggcacagaatctaactttgcactgaatatcttttcattcacatctcctctgccttagtcacaatggcaacagtacagaaaattctatcaaacctcagaatatagtagaaataattaagctgttgaatgagtcttaaaaattatactactgttaagtggaccaagtttggtgaagcagaatgtgacaaaggttgattaaggaaggaacaactcaaggacattgggaatgataacttttccacttgagaactactttatgttttactgtaatttttaaagtttttttgtcctttttgttattttgcaaaagaaaatagtatttacaggtggcttcttttaaaatataaaaatataaagcaggaatgtatatgaaatgtcagattttattgtatttgcagagtattagctttgaaattgaataaagaaagctgtttgtagttttaaaatgccttattggtatcaattagaaatttcttctattttttgatgtacttagagctttttgagtgtagaattttaaatggcaggattttacagtgtttacatgcaagtgcattttataagtgttctatatgtgtaaaatagtattttcaactggaaagtgttggctagtgcaaaaggcctggccattttctggttcccatgatgttgcctacactgctagactacagtttagtatcgctttgtatcatgaggccaagaaattccatgttgtttgtaaatagaataattgaaaaagcaataaacatttattgaacaaaagaaaccttgtttggcccagagtttatgttgaaccaaatggttcatagaattttgaatttctttagattcatttctgttaatcatcagttattaataatcacatccatcattaatagttgctttaatgcttgcatcttagagaatactaatgcttaatagcagtcagatactgataactgcactgactgtttaaaaattctgtataccaaacctattcattgttgtttttcaatttccttcattgactgctactaactattagttgttagttgtattttatttctattttttcttgttaaccagtttttttctttttcattgggggagtgggctcttcttcatttgttcaaatcatgatacgaaattgtcatgattttaattgtattctgtagatggtgtcaatcagtttgtcagaattaaacatgcttttttttttattagttgtgattagtttttcatgttgtcattaagccgtcactagctgaaactaatctcttctctatcttttcttttcttttttttgttttgtttttttttgtttctaaccacccagccgccaccggcaactaacctatgaccttctgacctctgaactcttcacccaatgatgacctgaccatgcctgcctgctgatcagttaactggtaatcgcctttgcttgcctgtcgtcagtgcagcgagctgaggcacttgtccgttcgtcttaccatctaaccaaacaaaagacaaagaaattgttgtcctccaactcagctttttttttttttttttcctgtttgggtgaaagtggttctagaaactgcactgaatagtagtaaagcaataaggcccaattcatcccacagcactgatcatcttttaatatcccaccctaagcgaacggtaagaaggcctctcttaagaaggggagacagatggtccttaactactcaatgacagaggcagttactgtgagagacttctaggaatctttttcttctcatagcgaagtcaaagctctctctgaatgtactgtgtgatgatgcatcatgcatgaaccttcggtcagggatatcattggtgaagtgatttcaaaaagtattcaaaatttgatatgctgtttagtcactacagtgccctcaaagggcagaagttgcagccttttttatattgcctgccaaaatttgaagtattagaagaaagtgtgccatgagagaaaaacttaaggagttttgaaaagtaatgcaaataacaaaactgcaacactatttttaaaaagataaatatctgagttaaaattactgaatctttattttacacctaaaaaaatatgagaacaaggtacatgcattatgtgtcacattactgggcaaactgttcaagtatttttttttaaacctccctgtatagaaaaaaatcattaaggatgtaaaagccatgcttgcctatttgctgtatacatgtaatgaaattgtagataaagtgtagtgcattgaaacaaatgaacaaaaagtagatacttttactatacaagggtgctggtgcagaaaaaaatatatatatttttggaaatgtagcattttatactttcaagtgttataaaaaaaaagaaaaagaacaaagaaaccctttatttcattaaatgattttttctggtggttgtcaagaaacaaaagaccaaaagagcctttttgtctttcttttttattttttaagtattggaataagtctaaagaaaagaaagtgccttattttccttcatggtcattcagtcaagtgtctcataaagatcagctcctccctcagaatacaagttaatgcatgttactcagtcgcccagtatgtgaaagaagatatgagggagacaaatgagttgatagtttgaattataggatttttgccacgttaccttgatgcaaatttgccaaatctgatactgtgaaaagatttgataacttttctaatgcctgactagtaagttttaaaacatcattctttaaaagaatagtttaatacttttggttattccaatcttcaatgttaacccaaaggattctgagataaaaattatgtgtcatctaaacttcagtttacagacaaaattagagctttgttttatttggagaagggggatgcattcatttgattttgttttttgtttttaattaattgaatataataggatacctagcaaatgttttcacaaaagtgaatctttgtgattttcattctagaaaacaatgttttaaatcacccaaatttaatcacatgtctttatatcataccagataactggtgtagtgtatccttttactgtttcaataacctctgcctcccccaccccttaactttaaaagaatgtgaaaaactagcatcatagtgcatataaatactcaaccacatttcagcttaagcttctaatttctcaagaagttgaaacagttagttatgtagttgaagcaatttgtgtgcaaagcctacatctaaacacttgagtgaataatcattaactgctcagtaccagacgtggcaaatctcaagtgacagtggaccccccccccccgcccagcttatcaactcgtcccctcttccacaccttcccagcatcacagtcagaggtcagcaggaagctgagtcattaccttcttggtgacctcccccaccatcttgtctcacttggaaaccgttgtcagtttatttactatgcaatagacattcattgttttgtatccagctagctttggtttaatatgccactgctttgtctttctgttacacatacagttttgatttatttacaatatatgctgtgccattttgatttttatattgtttggttggttgaataaatttgcgacactcaaacacttgaggtgatagttgttaaaaacaataccagtatttgatccagtttcatctcaactatgttatacctggacattttagatgtttatcaaaggtcttttatggggaagaaagtaaatgtatgaaataataaatgtgtgacatttatagggaatgttggctctgaacaaacttttgaaaacttggttgacaaaattttggatcaactgaaaaaagcatgacttttgaaatctctgaatgccttggttctcagtattatcattctttattgaatttatttcttattaaaatatgtagtttttaagactttttttctgacagtattatgtaattttttagcgtgggtagatgggagtgtcgcttgtatgttatcgtacagctgacatgtatttttgtctattctttattatcttagtttcatgctatgtatgtaccataaccaacctattgcctatgagaaacatgtaagataatgtatttacagccattgttacaagtttataatgtatttttctatcttgttttatatgtatgttatataacattcaaaaagaatttttttcttgattgagaaaaggatacaaaatgcaaaatccacaattttgataactgaaaattgccaattgttttgcagtactttattatattgggtgtcttgtcttttttgggcttttagttagctaatgaatgaatacattagacacttttgggttttagttgggattttacatagcttgcattttaattctttggttctttgctgtttctattaacccacagcattattttaataaatgttataataccacctac

SEQ ID NO: 453494 - DNA, 7140 bp, Homo sapiens
ccgggggcttctcagttttattttatcaatctatatgcatatccttatgccagtctcacacagtgttaattactgtagctttgtagtcagttttgaaatcaagaagtatgagtccttcgttcttatttttcaaaattatcttggctgttctgtgtcccgtgtgtttctagataaattttaggatcatcttgtcaatttctggggatattggctgggttcttggtttacttccatgtgttctctttaaatggctagactgggctttggttttttcagtatcgggcggagcctggaatatggtcggggaaatggaaacgaaggagaagccgaagcccaccccagattacctgatgcagctgatgaacgacaagaagctcatgagcagcctgcccaacttctgcgggatcttcaaccacctcgagcggctgctggacgaagaaattagcagagtacggaaagacatgtacaatgacacattaaatggcagtacagagaaaaggagtgcagaattgcctgatgctgtgggacctattgttcagttacaagagaaactttatgtgcctgtaaaagaatacccagattttaattttgttgggagaatccttggacctagaggacttacagccaaacaacttgaagcagaaaccggatgtaaaatcatggtccgaggcaaaggctcaatgagggataaaaaaaaggaggagcaaaatagaggcaagcccaattgggagcatctaaatgaagatttacatgtactaatcactgtggaagatgctcagaacagagcagaaatcaaattgaagagagcagttgaagaagtgaagaaattattggtacctgcagcagaaggagaagacagcctgaagaagatgcagctgatggagcttgcgattctgaatggcacctacagagatgccaacattaaatcaccagcccttgccttttctcttgcagcaacagcccaggctgctccaaggatcattactgggcctgcgccggttctcccaccagctgccctgcgtactcctacgccagctggccctaccataatgcctttgatcagacaaatacagaccgctgtcatgccaaacggaactcctcacccaactgctgcaatagttcctccagggcccgaagctggtttaatctatacaccctatgagtacccctacacattggcaccagctacatcaatccttgagtatcctattgaacctagtggtgtattagagtggattgaaatgccagtcatgcctgatatttcagcccattgacttgctggatgaaggactagaatacagcagcttttaccagacaaaatttgaatactttttttcctgaattgtatatgaccttggtgctgcatgcatgctgttgacttttaggactttgatcttttaaggttttttttccccagcattaatattgatttataaagatttgaaaatctttaatgaactggagaacactaagatttaaactcgaaaattcgttgttcaagtaaagaaagccatgatgctctgtatgttatctgtgtgtgtgcatgcactcaggtgccctttgtttcatgaacaaatacatttcattgtacatgttttctgtttaaatcattgtataaagtaattgcaggtcagaattataccacagaactgtttatgagaggcttgtgtctgttgcacatttcttgaagcatttttaaaataacatgtaacctgtaaccttgttgtttaagttttcttttctattaatactctgtcctgtggtcccgtgcatgctccttttcccagaactcctctctgctgcacccacagcatctgttcccgaggagttatgactcttgacttcctgcagggctggggctcttagccaccagctgctgttccagcactttcagcgcaagatctccctgattttgccacgtggaattgtacttgtatatgattaccttatctaaaatgaataagaggtgatggaccagtttactgcttagaaatagcaagaggcactgcagtaaaacttgtttctcattgtaaagcttcatgtcttttgtttgttggaaaatttttacttatagaaacttaattattagactggtaaaataaagaccaaaatatgcagatttctaattggcattcataaggtgaataataataagtgcccaatgaaaaaatctattatggttaatttcatttcttgctttgccacctaagcagtaaaacatgatattgaccacttggagaactcagaaaattattttaaatttctaagttataataaatttgcacacagataacatgcatgctatttatgtcacatctcacattaaattattttaaaataagcagtgcccttcaaaacagatgcagacatgtgtgttggtagtagtgaggagattggtattagcatcaagtcttcattgatgactaatttttaattcccttccttttatctttaggtatggctttcccaacgaaaggctaagaattcaagaacggtcttaactgaaccctcatcagatctgaatttaacaaatgcttagtctcagcagcctccgggggaaaaaagcttagcctagcagtcagtgacttacttgcactttttgcacatagatataaagtaaaattatgttattaatttggtttagtctgtaatattacacagtaatggtaatttataaaggagtgtatagtagtatactgactgctaagtgtactatactgtttgctttactaatcacctaattcattgcagttcatacttattgactcagagtttaaaaccacaatctgtaggctttaagaattgcttttaaacctttttaagtgataaactcttgaagtggtcttaaggttagcaaataattgtctgtattaaacatggcgttatttaagtagtcctgctgcaagaaaggcacttcagtgaatatgtgactagtaaagcttaaatatgtttggatctaatagagctcatgaaatactgtaacttggggattgtaaatgaatggatacaataggttaaggcccaagatgtttgaaatgaatgcaatattaatagatgcatatatacatgacatattgtggttaattttaaaactactgtgccttaacgtgtttcttaaacttttgtagtaaatgaacatttgaaatccattttgataaacctgctgttaatgttttttccccccttgtgaatgttttctaactttgtcttggtaattgcaatttaactaggtgcggtggctactaaagttcgaaggcacgatatgcgtgtccatccttaccaaaggattgtgaccgcagaccgaggttagtttagttctgcagttcttgtctataagaaatgcgttgggtgtccataaaatttgcaacaccacacctgatggaaaaatgtaattgcttacctgcacacagttttttttccttttctaaatttgtttgtgatcattgacagatttaagggttgggttttttgttttggtttggttttttctcccttcatattttaacttattaaatcttctattattatgtactatgatttattcctactaaaacataaattagtcaatttggggagctattaaattttgatgttgcctcagttattttcattaataacttttgctaaaatttaccttttaaaagttctgaaatttggggttggtattgcaaaatgaattgaacggatggtgctttaatgagagaagtaaaggaatatatgcctcctgtgtacttttggagaaaactgaagatttagtttccatttttctttataataaaatatttgagccactgtataaacatgagggtgcacatgtcaagtacttagctaaaatcaacaaagtgaggactgtgaagataactttcatgtagttggatttttttatataaattagagcgtcaattcccttttattcttacattctcttgccaaaatggatcctttgatttttgtcatttgctgctaaaatatattatctgaaggtaaactgtctcttgaagttctgtggtggtatgagatccagctgtgtgaatataatttttgactaacctgtgactggaaaataagtcttcatttttctcctttacaacttttataatttgtgtcctgtatatgcccttggacccttttataaattatttttgcttattgaggaatggtattttcggtttattgacattgaattgttttctaagtttttccatcacaagataggaatatcaagcatggtagtaaaaaaggattttttacaagtttctattatggcacatttgtttcctacaaattaaattgatcaaagtctcaaatattagtggaggaaaaagtgctggatttgtacttcaattgtacatcttctatgaatttatgaaggacctacctgctttatgtgattaccttgagtactgatgataaatactagacacagctgttgtccacatcagaaataacatgcctttcccaaagacattgttaatatttgtttagcataatccataaagaacgttgaagacttttaaactaatgtattcatcactaacagtgattgttcagtgaacaaaatagaccccagctccgtggtcgtctatgaggatggtattccttgtaagtgttctgtatgagcacgtctcatagggatggggaagttttttggaaagtcacttgagttttaaagaaactggacaattccatgaataatttgaggttttattcatattgctaatgtctacaattgttctaaagagtattttaaagtagtttttttcccccagctaatctttccctatgtatgcccccttttaggagatttctcaccattttgctttaacacaataattattggcctacttaatactccagtgccttgagatagttggacatattttaggaagattttattgtatttggaaaattacgacacattccatgcatggatcttttgtagttacgtgttttgattagtcctgtcactgtttttatttaaaatgcagtgtcagcaaaccgaaatgctcatttcttttttagtaacagagtactcgtatacttatcactgtatgcactcattgggtctaagggagatgtctgaagtccttcacttaaattattttatgatactactgttttctctatttttgaggttaaaattattttaaaaaaatattttgaagagaagtttattagtataagcattcatttaatgcaaaaaaactcagcccttggacatataaccatgtaattctatatgaacgtttagagtactacatggttgaccaatatctagttctttactaaaagtaaactcacctctttatatatatttcaaaactgaatttgaagcctattagagaccaactgaccttttagttgtaatgaactgtatggtcttgcatggtgacacacctgtgtaggaggccaagacttggcagaggatgtagtctaggtgtcctggtatatataaatggtcactcacttcgtttatatattccacactcagaaaagaagtcagagttttttctgagtaatacaaaaaccatcacttacataatttgtataagaaactttaaacagttttaatcaaaactatgagtaacatcaaaaatgctttaagattctatattttggaatacctgtgaagtagtatgactacatcatgttaaatatttattttcttctatgattttggagcagcaatttttattttaaataaaattccacttttaagaaattcagggaagatttggtcacattgaagatacagtatttttgtagtatttataaactgttctaaatgatagactatagaaaacatttttgtcatatgaaggtaaatcagtccattattttggatcatttaaactgaacattacaccttctgggctttgatttatgaagtggcacagaatctaactttgcactgaatatcttttcattcacatctcctctgccttagtcacaatggcaacagtacagaaaattctatcaaacctcagaatatagtagaaataattaagctgttgaatgagtcttaaaaattatactactgttaagtggaccaagtttggtgaagcagaatgtgacaaaggttgattaaggaaggaacaactcaaggacattgggaatgataacttttccacttgagaactactttatgttttactgtaatttttaaagtttttttgtcctttttgttattttgcaaaagaaaatagtatttacaggtggcttcttttaaaatataaaaatataaagcaggaatgtatatgaaatgtcagattttattgtatttgcagagtattagctttgaaattgaataaagaaagctgtttgtagttttaaaatgccttattggtatcaattagaaatttcttctattttttgatgtacttagagctttttgagtgtagaattttaaatggcaggattttacagtgtttacatgcaagtgcattttataagtgttctatatgtgtaaaatagtattttcaactggaaagtgttggctagtgcaaaaggcctggccattttctggttcccatgatgttgcctacactgctagactacagtttagtatcgctttgtatcatgaggccaagaaattccatgttgtttgtaaatagaataattgaaaaagcaataaacatttattgaacaaaagaaaaaaaaaaagaacaacacaccacacacatacaatcacacaacaaccacacacacacaacacatacacacaacacacaccccccacacccacaacacaacaaaacactaacacaccacaccaaacacaaaaaaacagggggcggggcgccaaaaacaaccaaagcagccgacacaatcaccaacccatgatatgtatacgaggacgccaccactagcgagtataaatccgagcgcgggagtacaaacaaacagcaggagaaagactaccacgcatagtaatgaaaaaccccccatctggggcgaggcacagaccacacaaataatgtcccacgacacactacttgtgtaacggctcgctgagctgatgggatcacaaccacactctacacactccacgccccacacgcctaaccgaccacgactagcacatagagatacacctacagaacaccagaaccgagcgacgaaaaagaacaaagagacagt

SEQ ID NO: 453495 - DNA, 2421 bp, Homo sapiens
agagagagagagagagagagagagagagagagagagagagagagagagagagagagtttacacctaaaaaaatatgagaacaaggtacatgcattatgtgtcacattactgggcaaactgttcaagtatttttttttaaacctccctgtatagaaaaaaatcattaaggatgtaaaagccatgcttgcctatttgctgtatacatgtaatgaaattgtagataaagtgtagtgcattgaaacaaatgaacaaaaagtagatacttttactatacaagggtgctggtgcagaaaaaaatatatatatttttggaaatgtagcattttatactttcaagtgttataaaaaaaaagaaaaagaacaaagaaaccctttatttcattaaatgattttttctggtggttgtcaagaaacaaaagaccaaaagagcctttttgtctttcttttttattttttaagtattggaataagtctaaagaaaagaaagtgccttattttccttcatggtcattcagtcaagtgtctcataaagatcagctcctccctcagaatacaagttaatgcatgttactcagtcgcccagtatgtgaaagaagatatgagggagacaaatgagttgatagtttgaattataggatttttgccacgttaccttgatgcaaatttgccaaatctgatactgtgaaaagatttgataacttttctaatgcctgactagtaagttttaaaacatcattctttaaaagaatagtttaatacttttggttattccaatcttcaatgttaacccaaaggattctgagataaaaattatgtgtcatctaaacttcagtttacagacaaaattagagctttgttttatttggagaagggggatgcattcatttgattttgttttttgtttttaattaattgaatataataggatacctagcaaatgttttcacaaaagtgaatctttgtgattttcattctagaaaacaatgttttaaatcacccaaatttaatcacatgtctttatatcataccagataactggtgtagtgtatccttttactgtttcaataacctctgcctcccccaccccttaactttaaaagaatgtgaaaaactagcatcatagtgcatataaatactcaaccacatttcagcttaagcttctaatttctcaagaagttgaaacagttagttatgtagttgaagcaatttgtgtgcaaagcctacatctaaacacttgagtgaataatcattaactgctcagtaccagacgtggcaaatctcaagtgacagtggaccccccccccccgcccagcttatcaactcgtcccctcttccacaccttcccagcatcacagtcagaggtcagcaggaagctgagtcattaccttcttggtgacctcccccaccatcttgtctcacttggaaaccgttgtcagtttatttactatgcaatagacattcattgttttgtatccagctagctttggtttaatatgccactgctttgtctttctgttacacatacagttttgatttatttacaatatatgctgtgccattttgatttttatattgtttggttggttgaataaatttgcgacactcaaacacttgaggtgatagttgttaaaaacaataccagtatttgatccagtttcatctcaactatgttatacctggacattttagatgtttatcaaaggtcttttatggggaagaaagtaaatgtatgaaataataaatgtgtgacatttatagggaatgttggctctgaacaaacttttgaaaacttggttgacaaaattttggatcaactgaaaaaagcatgacttttgaaatctctgaatgccttggttctcagtattatcattctttattgaatttatttcttattaaaatatgtagtttttaagactttttttctgacagtattatgtaattttttagcgtgggtagatgggagtgtcgcttgtatgttatcgtacagctgacatgtatttttgtctattctttattatcttagtttcatgctatgtatgtaccataaccaacctattgcctatgagaaacatgtaagataatgtatttacagccattgttacaagtttataatgtatttttctatcttgttttatatgtatgttatataacattcaaaaagaatttttttcttgattgagaaaaggatacaaaatgcaaaatccacaattttgataactgaaaattgccaattgttttgcagtactttattatattgggtgtcttgtcttttttgggcttttagttagctaatgaatgaatacattagacacttttgggttttagttgggattttacatagcttgcattttaattctttggttctttgctgtttctattaacccacagcattattttaataaatgttataataccacctac

SEQ ID NO: 453496 - DNA, 1326 bp, Homo sapiens
tgaactgaggcgaactccgccgccaagtgagtgaggaggaggaggaggagaaggaggaggaggaagaggaggagcgcagtcggagcgcggcggcagcggcagaggcgccgcggcggggaccagcccagagagaccccccgagcccgcggcacaggcggcggcggcgctgagcgggctcgaccagccgagcgagcggcggccccggctcctcctcgtccggcgccagcagcccgcgccccgcgcccgcactcggccagccgagacccgcctcccgcccgcccgccggcctcgtgagggacgcgccgagccgggcggccgagagcggcggcggctgggagcgcgtcgggcccgggcggaaagtgcctgcggggggcgggcgagcgcgcggtgccggccgccccggggctcggcgcgggagccagagcgggagccggcgcggagcgggacgccgggtcccgagcggcccgcggccggggctcagcccccgcccctccctcctctccggcggcggcggcggcggcggcgggcggagtgagctgcggagcctggaatatggtcggggaaatggaaacgaaggagaagccgaagcccaccccagattacctgatgcagctgatgaacgacaagaagctcatgagcagcctgcccaacttctgcgggatcttcaaccacctcgagcggctgctggacgaagaaattagcagagtacggaaagacatgtacaatgacacattaaatggcagtacagagaaaaggagtgcagaattgcctgatgctgtgggacctattgttcagttacaagagaaactttatgtgcctgtaaaagaatacccagattttaattttgttgggagaatccttggacctagaggacttacagccaaacaacttgaagcagaaaccggatgtaaaatcatggtccgaggcaaaggctcaatgagggataaaaaaaaggaggagcaaaatagaggcaagcccaattgggagcatctaaatgaagatttacatgtactaatcactgtggaagatgctcagaacagagcagaaatcaaattgaagagagcagttgaagaagtgaagaaattattggtacctgcagcagaaggagaagacagcctgaagaagatgcagctgatggagcttgcgattctgaatggcacctacagagatgccaacattaaatcaccagcccttgccgccgcatgaaaaagagcctctcagcccccttgcacccggaatttgaagaggtctacagattcggggcagagagcaggaaactccttttgcgggaaccagtggatgctatgcccaaccgcatcacccgtt

SEQ ID NO: 453497 - DNA, 374 bp, Homo sapiens
tggcctcgtttagacttggaaaaattagatgaactaacaagtccatattataccggttaggaaggagctcgggctttgaagttaatttaataagatatgttatttgattcgtataaaaattggtttgtagtagaaattaattaaggctatagtcttgtttaaacatgggcttaatccagagaatgatagaataggccaggagctccttatttgagttttaatgctttatcaatgaaaccctcccctgccctctcttttttcctctggactagcaagaatattttttttgtctaacacatttaaaatttttacttttaacagaaattagcagagtacggaaagacatgtacaatgacacattaaatggcagtaca

SEQ ID NO: 453498 - DNA, 7912 bp, Homo sapiens
tgaactgaggcgaactccgccgccaagtgagtgaggaggaggaggaggagaaggaggaggaggaagaggaggagcgcagtcggagcgcggcggcagcggcagaggcgccgcggcggggaccagcccagagagaccccccgagcccgcggcacaggcggcggcggcgctgagcgggctcgaccagccgagcgagcggcggccccggctcctcctcgtccggcgccagcagcccgcgccccgcgcccgcactcggccagccgagacccgcctcccgcccgcccgccggcctcgtgagggacgcgccgagccgggcggccgagagcggcggcggctgggagcgcgtcgggcccgggcggaaagtgcctgcggggggcgggcgagcgcgcggtgccggccgccccggggctcggcgcgggagccagagcgggagccggcgcggagcgggacgccgggtcccgagcggcccgcggccggggctcagcccccgcccctccctcctctccggcggcggcggcggcggcggcgggcggagtgagctgcggagcctggaatatggtcggggaaatggaaacgaaggagaagccgaagcccaccccagattacctgatgcagctgatgaacgacaagaagctcatgagcagcctgcccaacttctgcgggatcttcaaccacctcgagcggctgctggacgaagaaattagcagagtacggaaagacatgtacaatgacacattaaatggcagtacagagaaaaggagtgcagaattgcctgatgctgtgggacctattgttcagttacaagagaaactttatgtgcctgtaaaagaatacccagattttaattttgttgggagaatccttggacctagaggacttacagccaaacaacttgaagcagaaaccggatgtaaaatcatggtccgaggcaaaggctcaatgagggataaaaaaaaggaggagcaaaatagaggcaagcccaattgggagcatctaaatgaagatttacatgtactaatcactgtggaagatgctcagaacagagcagaaatcaaattgaagagagcagttgaagaagtgaagaaattattggtacctgcagcagaaggagaagacagcctgaagaagatgcagctgatggagcttgcgattctgaatggcacctacagagatgccaacattaaatcaccagcccttgccttttctcttgcagcaacagcccaggctgctccaaggatcattactgggcctgcgccggttctcccaccagctgccctgcgtactcctacgccagctggccctaccataatgcctttgatcagacaaatacagaccgctgtcatgccaaacggaactcctcacccaactgctgcaatagttcctccagggcccgaagctggtttaatctatacaccctatgagtacccctacacattggcaccagctacatcaatccttgagtatcctattgaacctagtggtgtattaggtaagttcttctccccatggggttaacaacattctctttataaatatttttgctccctcagattttgaaatgattttatcagttttagagaggcaagacaagtttgcattagggaagaccgaaaactaaattttgttttatttcagcctctcataagggttcccctttgaaataattgcaccttaaatttattcagatccactttggtaactgaggttcagtttggttgggtaaatctgttgtgtacatttcaacaaatacttttacatttgacattactgaggtcattctgagttttaggtcccaccccattggcccgtcacctccatcagctccacttctcaaactttatttgagatttattttatctcacaggtttgtgtaattgttggaaaatttttaaacttctaagtgaaagtagtctgagcgctttataaaattcatattattgtgtgtgttttgtaatatttgcgatcacttaaaatatcagataaatacagtcatgcatcgcttaacaacggggatacagtctaagaattgccttgtctggcagtttcatcatttggtgtacatcatagagtgtacttacacagacatagatgatatcgtttactacacacctaggctgtgtggtatagccattataatcttatgggaccacatagtataagtggtccgttgttgaccaaaatgttgttatgcaggcatgactgtagttgtattcttaagatttttcagttcttgtgttttggagtcctagtcatattaaacatgagagatactcttaatttcagtagtacagtatggaatagttaaataaatagcaaatcactgaattcagaatctcacttaaggcagaaattaaaatcataatataaacgcttggttttacatgaacaaaaagtggtgtgctcgaaaaagacattactgatgccttttttttatagagtggattgaaatgccagtcatgcctgatatttcagcccattgacttgctggatgaaggactagaatacagcagctgttataacacgaccagtcaatgtggaacaaactgtttctgtgcaacccctttgttttaccagacaaaatttgaatactttttttcctgaattgtatatgaccttggtgctgcatgcatgctgttgacttttaggactttgatcttttaaggttttttttccccagcattaatattgatttataaagatttgaaaatctttaatgaactggagaacactaagatttaaactcgaaaattcgttgttcaagtaaagaaagccatgatgctctgtatgttatctgtgtgtgtgcatgcactcaggtgccctttgtttcatgaacaaatacatttcattgtacatgttttctgtttaaatcattgtataaagtaattgcaggtcagaattataccacagaactgtttatgagaggcttgtgtctgttgcacatttcttgaagcatttttaaaataacatgtaacctgtaaccttgttgtttaagttttcttttctattaatactctgtcctgtggtcccgtgcatgctccttttcccagaactcctctctgctgcacccacagcatctgttcccgaggagttatgactcttgacttcctgcagggctggggctcttagccaccagctgctgttccagcactttcagcgcaagatctccctgattttgccacgtggaattgtacttgtatatgattaccttatctaaaatgaataagaggtgatggaccagtttactgcttagaaatagcaagaggcactgcagtaaaacttgtttctcattgtaaagcttcatgtcttttgtttgttggaaaatttttacttatagaaacttaattattagactggtaaaataaagaccaaaatatgcagatttctaattggcattcataaggtgaataataataagtgcccaatgaaaaaatctattatggttaatttcatttcttgctttgccacctaagcagtaaaacatgatattgaccacttggagaactcagaaaattattttaaatttctaagttataataaatttgcacacagataacatgcatgctatttatgtcacatctcacattaaattattttaaaataagcagtgcccttcaaaacagatgcagacatgtgtgttggtagtagtgaggagattggtattagcatcaagtcttcattgatgactaatttttaattcccttccttttatctttaggtatggctttcccaacgaaaggctaagaattcaagaacggtcttaactgaaccctcatcagatctgaatttaacaaatgcttagtctcagcagcctccgggggaaaaaagcttagcctagcagtcagtgacttacttgcactttttgcacatagatataaagtaaaattatgttattaatttggtttagtctgtaatattacacagtaatggtaatttataaaggagtgtatagtagtatactgactgctaagtgtactatactgtttgctttactaatcacctaattcattgcagttcatacttattgactcagagtttaaaaccacaatctgtaggctttaagaattgcttttaaacctttttaagtgataaactcttgaagtggtcttaaggttagcaaataattgtctgtattaaacatggcgttatttaagtagtcctgctgcaagaaaggcacttcagtgaatatgtgactagtaaagcttaaatatgtttggatctaatagagctcatgaaatactgtaacttggggattgtaaatgaatggatacaataggttaaggcccaagatgtttgaaatgaatgcaatattaatagatgcatatatacatgacatattgtggttaattttaaaactactgtgccttaacgtgtttcttaaacttttgtagtaaatgaacatttgaaatccattttgataaacctgctgttaatgttttttccccccttgtgaatgttttctaactttgtcttggtaattgcaatttaactaggtgcggtggctactaaagttcgaaggcacgatatgcgtgtccatccttaccaaaggattgtgaccgcagaccgaggttagtttagttctgcagttcttgtctataagaaatgcgttgggtgtccataaaatttgcaacaccacacctgatggaaaaatgtaattgcttacctgcacacagttttttttccttttctaaatttgtttgtgatcattgacagatttaagggttgggttttttgttttggtttggttttttctcccttcatattttaacttattaaatcttctattattatgtactatgatttattcctactaaaacataaattagtcaatttggggagctattaaattttgatgttgcctcagttattttcattaataacttttgctaaaatttaccttttaaaagttctgaaatttggggttggtattgcaaaatgaattgaacggatggtgctttaatgagagaagtaaaggaatatatgcctcctgtgtacttttggagaaaactgaagatttagtttccatttttctttataataaaatatttgagccactgtataaacatgagggtgcacatgtcaagtacttagctaaaatcaacaaagtgaggactgtgaagataactttcatgtagttggatttttttatataaattagagcgtcaattcccttttattcttacattctcttgccaaaatggatcctttgatttttgtcatttgctgctaaaatatattatctgaaggtaaactgtctcttgaagttctgtggtggtatgagatccagctgtgtgaatataatttttgactaacctgtgactggaaaataagtcttcatttttctcctttacaacttttataatttgtgtcctgtatatgcccttggacccttttataaattatttttgcttattgaggaatggtattttcggtttattgacattgaattgttttctaagtttttccatcacaagataggaatatcaagcatggtagtaaaaaaggattttttacaagtttctattatggcacatttgtttcctacaaattaaattgatcaaagtctcaaatattagtggaggaaaaagtgctggatttgtacttcaattgtacatcttctatgaatttatgaaggacctacctgctttatgtgattaccttgagtactgatgataaatactagacacagctgttgtccacatcagaaataacatgcctttcccaaagacattgttaatatttgtttagcataatccataaagaacgttgaagacttttaaactaatgtattcatcactaacagtgattgttcagtgaacaaaatagaccccagctccgtggtcgtctatgaggatggtattccttgtaagtgttctgtatgagcacgtctcatagggatggggaagttttttggaaagtcacttgagttttaaagaaactggacaattccatgaataatttgaggttttattcatattgctaatgtctacaattgttctaaagagtattttaaagtagtttttttcccccagctaatctttccctatgtatgcccccttttaggagatttctcaccattttgctttaacacaataattattggcctacttaatactccagtgccttgagatagttggacatattttaggaagattttattgtatttggaaaattacgacacattccatgcatggatcttttgtagttacgtgttttgattagtcctgtcactgtttttatttaaaatgcagtgtcagcaaaccgaaatgctcatttcttttttagtaacagagtactcgtatacttatcactgtatgcactcattgggtctaagggagatgtctgaagtccttcacttaaattattttatgatactactgttttctctatttttgaggttaaaattattttaaaaaaatattttgaagagaagtttattagtataagcattcatttaatgcaaaaaaactcagcccttggacatataaccatgtaattctatatgaacgtttagagtactacatggttgaccaatatctagttctttactaaaagtaaactcacctctttatatatatttcaaaactgaatttgaagcctattagagaccaactgaccttttagttgtaatgaactgtatggtcttgcatggtgacacacctgtgtaggaggccaagacttggcagaggatgtagtctaggtgtcctggtatatataaatggtcactcacttcgtttatatattccacactcagaaaagaagtcagagttttttctgagtaatacaaaaaccatcacttacataatttgtataagaaactttaaacagttttaatcaaaactatgagtaacatcaaaaatgctttaagattctatattttggaatacctgtgaagtagtatgactacatcatgttaaatatttattttcttctatgattttggagcagcaatttttattttaaataaaattccacttttaagaaattcagggaagatttggtcacattgaagatacagtatttttgtagtatttataaactgttctaaatgatagactatagaaaacatttttgtcatatgaaggtaaatcagtccattattttggatcatttaaactgaacattacaccttctgggctttgatttatgaagtggcacagaatctaactttgcactgaatatcttttcattcacatctcctctgccttagtcacaatggcaacagtacagaaaattctatcaaacctcagaatatagtagaaataattaagctgttgaatgagtcttaaaaattatactactgttaagtggaccaagtttggtgaagcagaatgtgacaaaggttgattaaggaaggaacaactcaaggacattgggaatgataacttttccacttgagaactactttatgttttactgtaatttttaaagtttttttgtcctttttgttattttgcaaaagaaaatagtatttacaggtggcttcttttaaaatataaaaatataaagcaggaatgtatatgaaatgtcagattttattgtatttgcagagtattagctttgaaattgaataaagaaagctgtttgtagttttaaaatgccttattggtatcaattagaaatttcttctattttttgatgtacttagagctttttgagtgtagaattttaaatggcaggattttacagtgtttacatgcaagtgcattttataagtgttctatatgtgtaaaatagtattttcaactggaaagtgttggctagtgcaaaaggcctggccattttctggttcccatgatgttgcctacactgctagactacagtttagtatcgctttgtatcatgaggccaagaaattccatgttgtttgtaaatagaataattgaaaaagcaataaacatttattgaacaaaagaaa

SEQ ID NO: 453499 - DNA, 5686 bp, Homo sapiens
tgaactgaggcgaactccgccgccaagtgagtgaggaggaggaggaggagaaggaggaggaggaagaggaggagcgcagtcggagcgcggcggcagcggcagaggcgccgcggcggggaccagcccagagagaccccccgagcccgcggcacaggcggcggcggcgctgagcgggctcgaccagccgagcgagcggcggccccggctcctcctcgtccggcgccagcagcccgcgccccgcgcccgcactcggccagccgagacccgcctcccgcccgcccgccggcctcgtgagggacgcgccgagccgggcggccgagagcggcggcggctgggagcgcgtcgggcccgggcggaaagtgcctgcggggggcgggcgagcgcgcggtgccggccgccccggggctcggcgcgggagccagagcgggagccggcgcggagcgggacgccgggtcccgagcggcccgcggccggggctcagcccccgcccctccctcctctccggcggcggcggcggcggcggcgggcggagtgagctgcggagcctggaatatggtcggggaaatggaaacgaaggagaagccgaagcccaccccagattacctgatgcagctgatgaacgacaagaagctcatgagcagcctgcccaacttctgcgggatcttcaaccacctcgagcggctgctggacgaagaaattagcagagtacggaaagacatgtacaatgacacattaaatggcagtacagagaaaaggagtgcagaattgcctgatgctgtgggacctattgttcagttacaagagaaactttatgtgcctgtaaaagaatacccagattttaattttgttgggagaatccttggacctagaggacttacagccaaacaacttgaagcagaaaccggatgtaaaatcatggtccgaggcaaaggctcaatgagggataaaaaaaaggaggagcaaaatagaggcaagcccaattgggagcatctaaatgaagatttacatgtactaatcactgtggaagatgctcagaacagagcagaaatcaaattgaagagagcagttgaagaagtgaagaaattattggtacctgcagcagaaggagaagacagcctgaagaagatgcagctgatggagcttgcgattctgaatggcacctacagagatgccaacattaaatcaccagcccttgccttttctcttgcagcaacagcccaggctgctccaaggatcattactgggcctgcgccggttctcccaccagctgccctgcgtactcctacgccagctggccctaccataatgcctttgatcagacaaatacagaccgctgtcatgccaaacggaactcctcacccaactgctgcaatagttcctccagggcccgaagctggtttaatctatacaccctatgagtacccctacacattggcaccagctacatcaatccttgagtatcctattgaacctagtggtgtattaggtatggctttcccaacgaaaggctaagaattcaagaacggtcttaactgaaccctcatcagatctgaatttaacaaatgcttagtctcagcagcctccgggggaaaaaagcttagcctagcagtcagtgacttacttgcactttttgcacatagatataaagtaaaattatgttattaatttggtttagtctgtaatattacacagtaatggtaatttataaaggagtgtatagtagtatactgactgctaagtgtactatactgtttgctttactaatcacctaattcattgcagttcatacttattgactcagagtttaaaaccacaatctgtaggctttaagaattgcttttaaacctttttaagtgataaactcttgaagtggtcttaaggttagcaaataattgtctgtattaaacatggcgttatttaagtagtcctgctgcaagaaaggcacttcagtgaatatgtgactagtaaagcttaaatatgtttggatctaatagagctcatgaaatactgtaacttggggattgtaaatgaatggatacaataggttaaggcccaagatgtttgaaatgaatgcaatattaatagatgcatatatacatgacatattgtggttaattttaaaactactgtgccttaacgtgtttcttaaacttttgtagtaaatgaacatttgaaatccattttgataaacctgctgttaatgttttttccccccttgtgaatgttttctaactttgtcttggtaattgcaatttaactaggtgcggtggctactaaagttcgaaggcacgatatgcgtgtccatccttaccaaaggattgtgaccgcagaccgaggttagtttagttctgcagttcttgtctataagaaatgcgttgggtgtccataaaatttgcaacaccacacctgatggaaaaatgtaattgcttacctgcacacagttttttttccttttctaaatttgtttgtgatcattgacagatttaagggttgggttttttgttttggtttggttttttctcccttcatattttaacttattaaatcttctattattatgtactatgatttattcctactaaaacataaattagtcaatttggggagctattaaattttgatgttgcctcagttattttcattaataacttttgctaaaatttaccttttaaaagttctgaaatttggggttggtattgcaaaatgaattgaacggatggtgctttaatgagagaagtaaaggaatatatgcctcctgtgtacttttggagaaaactgaagatttagtttccatttttctttataataaaatatttgagccactgtataaacatgagggtgcacatgtcaagtacttagctaaaatcaacaaagtgaggactgtgaagataactttcatgtagttggatttttttatataaattagagcgtcaattcccttttattcttacattctcttgccaaaatggatcctttgatttttgtcatttgctgctaaaatatattatctgaaggtaaactgtctcttgaagttctgtggtggtatgagatccagctgtgtgaatataatttttgactaacctgtgactggaaaataagtcttcatttttctcctttacaacttttataatttgtgtcctgtatatgcccttggacccttttataaattatttttgcttattgaggaatggtattttcggtttattgacattgaattgttttctaagtttttccatcacaagataggaatatcaagcatggtagtaaaaaaggattttttacaagtttctattatggcacatttgtttcctacaaattaaattgatcaaagtctcaaatattagtggaggaaaaagtgctggatttgtacttcaattgtacatcttctatgaatttatgaaggacctacctgctttatgtgattaccttgagtactgatgataaatactagacacagctgttgtccacatcagaaataacatgcctttcccaaagacattgttaatatttgtttagcataatccataaagaacgttgaagacttttaaactaatgtattcatcactaacagtgattgttcagtgaacaaaatagaccccagctccgtggtcgtctatgaggatggtattccttgtaagtgttctgtatgagcacgtctcatagggatggggaagttttttggaaagtcacttgagttttaaagaaactggacaattccatgaataatttgaggttttattcatattgctaatgtctacaattgttctaaagagtattttaaagtagtttttttcccccagctaatctttccctatgtatgcccccttttaggagatttctcaccattttgctttaacacaataattattggcctacttaatactccagtgccttgagatagttggacatattttaggaagattttattgtatttggaaaattacgacacattccatgcatggatcttttgtagttacgtgttttgattagtcctgtcactgtttttatttaaaatgcagtgtcagcaaaccgaaatgctcatttcttttttagtaacagagtactcgtatacttatcactgtatgcactcattgggtctaagggagatgtctgaagtccttcacttaaattattttatgatactactgttttctctatttttgaggttaaaattattttaaaaaaatattttgaagagaagtttattagtataagcattcatttaatgcaaaaaaactcagcccttggacatataaccatgtaattctatatgaacgtttagagtactacatggttgaccaatatctagttctttactaaaagtaaactcacctctttatatatatttcaaaactgaatttgaagcctattagagaccaactgaccttttagttgtaatgaactgtatggtcttgcatggtgacacacctgtgtaggaggccaagacttggcagaggatgtagtctaggtgtcctggtatatataaatggtcactcacttcgtttatatattccacactcagaaaagaagtcagagttttttctgagtaatacaaaaaccatcacttacataatttgtataagaaactttaaacagttttaatcaaaactatgagtaacatcaaaaatgctttaagattctatattttggaatacctgtgaagtagtatgactacatcatgttaaatatttattttcttctatgattttggagcagcaatttttattttaaataaaattccacttttaagaaattcagggaagatttggtcacattgaagatacagtatttttgtagtatttataaactgttctaaatgatagactatagaaaacatttttgtcatatgaaggtaaatcagtccattattttggatcatttaaactgaacattacaccttctgggctttgatttatgaagtggcacagaatctaactttgcactgaatatcttttcattcacatctcctctgccttagtcacaatggcaacagtacagaaaattctatcaaacctcagaatatagtagaaataattaagctgttgaatgagtcttaaaaattatactactgttaagtggaccaagtttggtgaagcagaatgtgacaaaggttgattaaggaaggaacaactcaaggacattgggaatgataacttttccacttgagaactactttatgttttactgtaatttttaaagtttttttgtcctttttgttattttgcaaaagaaaatagtatttacaggtggcttcttttaaaatataaaaatataaagcaggaatgtatatgaaatgtcagattttattgtatttgcagagtattagctttgaaattgaataaagaaagctgtttgtagttttaaaatgccttattggtatcaattagaaatttcttctattttttgatgtacttagagctttttgagtgtagaattttaaatggcaggattttacagtgtttacatgcaagtgcattttataagtgttctatatgtgtaaaatagtattttcaactggaaagtgttggctagtgcaaaaggcctggccattttctggttcccatgatgttgcctacactgctagactacagtttagtatcgctttgtatcatgaggccaagaaattccatgttgtttgtaaatagaataattgaaaaagcaataaacatttattgaacaaaagaaa

SEQ ID NO: 453500 - DNA, 4218 bp, Homo sapiens
caagaacggtcttaactgaaccctcatcagatctgaatttaacaaatgcttagtctcagcagcctccgccggaattccggccggaattccggcggagcctggaatatggtcggggaaatggaaacgaaggagaagccgaagcccaccccagattacctgatgcagctgatgaacgacaagaagctcatgagcagcctgcccaacttctgcgggatcttcaaccacctcgagcggctgctggacgaagaaattagcagagtacggaaagacatgtacaatgacacattaaatggcagtacagagaaaaggagtgcagaattgcctgatgctgtgggacctattgttcagttacaagagaaactttatgtgcctgtaaaagaatacccagattttaattttgttgggagaatccttggacctagaggacttacagccaaacaacttgaagcagaaaccggatgtaaaatcatggtccgaggcaaaggctcaatgagggataaaaaaaaggaggagcaaaatagaggcaagcccaattgggagcatctaaatgaagatttacatgtactaatcactgtggaagatgctcagaacagagcagaaatcaaattgaagagagcagttgaagaagtgaagaaattattggtacctgcagcagaaggagaagacagcctgaagaagatgcagctgatggagcttgcgattctgaatggcacctacagagatgccaacattaaatcaccagcccttgccttttctcttgcagcaacagcccaggctgctccaaggatcattactgggcctgcgccggttctcccaccagctgccctgcgtactcctacgccagctggccctaccataatgcctttgatcagacaaatacagaccgctgtcatgccaaacggaactcctcacccaactgctgcaatagttcctccagggcccgaagctggtttaatctatacaccctatgagtacccctacacattggcaccagctacatcaatccttgagtatcctattgaacctagtggtgtattaggtgcggtggctactaaagttcgaaggcacgatatgcgtgtccatccttaccaaaggattgtgaccgcagaccgagccgccaccggcaactaacctatgaccttctgacctctgaactcttcacccaatgatgacctgaccatgcctgcctgctgatcagttaactggtaatcgcctttgcttgcctgtcgtcagtgcagcgagctgaggcacttgtccgttcgtcttaccatctaaccaaacaaaagacaaagaaattgttgtcctccaactcagctttttttttttttttttcctgtttgggtgaaagtggttctagaaactgcactgaatagtagtaaagcaataaggcccaattcatcccacagcactgatcatcttttaatatcccaccctaagcgaacggtaagaaggcctctcttaagaaggggagacagatggtccttaactactcaatgacagaggcagttactgtgagagacttctaggaatctttttcttctcatagcgaagtcaaagctctctctgaatgtactgtgtgatgatgcatcatgcatgaaccttcggtcagggatatcattggtgaagtgatttcaaaaagtattcaaaatttgatatgctgtttagtcactacagtgccctcaaagggcagaagttgcagccttttttatattgcctgccaaaatttgaagtattagaagaaagtgtgccatgagagaaaaacttaaggagttttgaaaagtaatgcaaataacaaaactgcaacactatttttaaaaagataaatatctgagttaaaattactgaatctttattttacacctaaaaaaatatgagaacaaggtacatgcattatgtgtcacattactgggcaaactgttcaagtatttttttttaaacctccctgtatagaaaaaaatcattaaggatgtaaaagccatgcttgcctatttgctgtatacatgtaatgaaattgtagataaagtgtagtgcattgaaacaaatgaacaaaaagtagatacttttactatacaagggtgctggtgcagaaaaaaatatatatatttttggaaatgtagcattttatactttcaagtgttataaaaaaaaagaaaaagaacaaagaaaccctttatttcattaaatgattttttctggtggttgtcaagaaacaaaagaccaaaagagcctttttgtctttcttttttattttttaagtattggaataagtctaaagaaaagaaagtgccttattttccttcatggtcattcagtcaagtgtctcataaagatcagctcctccctcagaatacaagttaatgcatgttactcagtcgcccagtatgtgaaagaagatatgagggagacaaatgagttgatagtttgaattataggatttttgccacgttaccttgatgcaaatttgccaaatctgatactgtgaaaagatttgataacttttctaatgcctgactagtaagttttaaaacatcattctttaaaagaatagtttaatacttttggttattccaatcttcaatgttaacccaaaggattctgagataaaaattatgtgtcatctaaacttcagtttacagacaaaattagagctttgttttatttggagaagggggatgcattcatttgattttgttttttgtttttaattaattgaatataataggatacctagcaaatgttttcacaaaagtgaatctttgtgattttcattctagaaaacaatgttttaaatcacccaaatttaatcacatgtctttatatcataccagataactggtgtagtgtatccttttactgtttcaataacctctgcctcccccaccccttaactttaaaagaatgtgaaaaactagcatcatagtgcatataaatactcaaccacatttcagcttaagcttctaatttctcaagaagttgaaacagttagttatgtagttgaagcaatttgtgtgcaaagcctacatctaaacacttgagtgaataatcattaactgctcagtaccagacgtggcaaatctcaagtgacagtggaccccccccccccgcccagcttatcaactcgtcccctcttccacaccttcccagcatcacagtcagaggtcagcaggaagctgagtcattaccttcttggtgacctcccccaccatcttgtctcacttggaaaccgttgtcagtttatttactatgcaatagacattcattgttttgtatccagctagctttggtttaatatgccactgctttgtctttctgttacacatacagttttgatttatttacaatatatgctgtgccattttgatttttatattgtttggttggttgaataaatttgcgacactcaaacacttgaggtgatagttgttaaaaacaataccagtatttgatccagtttcatctcaactatgttatacctggacattttagatgtttatcaaaggtcttttatggggaagaaagtaaatgtatgaaataataaatgtgtgacatttatagggaatgttggctctgaacaaacttttgaaaacttggttgacaaaattttggatcaactgaaaaaagcatgacttttgaaatctctgaatgccttggttctcagtattatcattctttattgaatttatttcttattaaaatatgtagtttttaagactttttttctgacagtattatgtaattttttagcgtgggtagatgggagtgtcgcttgtatgttatcgtacagctgacatgtatttttgtctattctttattatcttagtttcatgctatgtatgtaccataaccaacctattgcctatgagaaacatgtaagataatgtatttacagccattgttacaagtttataatgtatttttctatcttgttttatatgtatgttatataacattcaaaaagaatttttttcttgattgagaaaaggatacaaaatgcaaaatccacaattttgataactgaaaattgccaattgttttgcagtactttattatattgggtgtcttgtcttttttgggcttttagttagctaatgaatgaatacattagacacttttgggttttagttgggattttacatagcttgcattttaattctttggttctttgctgtttctattaacccacagcattattttaataaatgttataataccacctac

SEQ ID NO: 453501 - DNA, 8176 bp, Homo sapiens
  misc_feature (8132)..(8132): n is a, c, g, or t
  misc_feature (8141)..(8141): n is a, c, g, or t
  misc_feature (8155)..(8155): n is a, c, g, or t
ccgggggcttctcagttttattttatcaatctatatgcatatccttatgccagtctcacacagtgttaattactgtagctttgtagtcagttttgaaatcaagaagtatgagtccttcgttcttatttttcaaaattatcttggctgttctgtgtcccgtgtgtttctagataaattttaggatcatcttgtcaatttctggggatattggctgggttcttggtttacttccatgtgttctctttaaatggctagactgggctttggttttttcagtatcgggcggagcctggaatatggtcggggaaatggaaacgaaggagaagccgaagcccaccccagattacctgatgcagctgatgaacgacaagaagctcatgagcagcctgcccaacttctgcgggatcttcaaccacctcgagcggctgctggacgaagaaattagcagagtacggaaagacatgtacaatgacacattaaatggcagtacagagaaaaggagtgcagaattgcctgatgctgtgggacctattgttcagttacaagagaaactttatgtgcctgtaaaagaatacccagattttaattttgttgggagaatccttggacctagaggacttacagccaaacaacttgaagcagaaaccggatgtaaaatcatggtccgaggcaaaggctcaatgagggataaaaaaaaggaggagcaaaatagaggcaagcccaattgggagcatctaaatgaagatttacatgtactaatcactgtggaagatgctcagaacagagcagaaatcaaattgaagagagcagttgaagaagtgaagaaattattggtacctgcagcagaaggagaagacagcctgaagaagatgcagctgatggagcttgcgattctgaatggcacctacagagatgccaacattaaatcaccagcccttgccttttctcttgcagcaacagcccaggctgctccaaggatcattactgggcctgcgccggttctcccaccagctgccctgcgtactcctacgccagctggccctaccataatgcctttgatcagacaaatacagaccgctgtcatgccaaacggaactcctcacccaactgctgcaatagttcctccagggcccgaagctggtttaatctatacaccctatgagtacccctacacattggcaccagctacatcaatccttgagtatcctattgaacctagtggtgtattagagtggattgaaatgccagtcatgcctgatatttcagcccattgacttgctggatgaaggactagaatacagcagcttttaccagacaaaatttgaatactttttttcctgaattgtatatgaccttggtgctgcatgcatgctgttgacttttaggactttgatcttttaaggttttttttccccagcattaatattgatttataaagatttgaaaatctttaatgaactggagaacactaagatttaaactcgaaaattcgttgttcaagtaaagaaagccatgatgctctgtatgttatctgtgtgtgtgcatgcactcaggtgccctttgtttcatgaacaaatacatttcattgtacatgttttctgtttaaatcattgtataaagtaattgcaggtcagaattataccacagaactgtttatgagaggcttgtgtctgttgcacatttcttgaagcatttttaaaataacatgtaacctgtaaccttgttgtttaagttttcttttctattaatactctgtcctgtggtcccgtgcatgctccttttcccagaactcctctctgctgcacccacagcatctgttcccgaggagttatgactcttgacttcctgcagggctggggctcttagccaccagctgctgttccagcactttcagcgcaagatctccctgattttgccacgtggaattgtacttgtatatgattaccttatctaaaatgaataagaggtgatggaccagtttactgcttagaaatagcaagaggcactgcagtaaaacttgtttctcattgtaaagcttcatgtcttttgtttgttggaaaatttttacttatagaaacttaattattagactggtaaaataaagaccaaaatatgcagatttctaattggcattcataaggtgaataataataagtgcccaatgaaaaaatctattatggttaatttcatttcttgctttgccacctaagcagtaaaacatgatattgaccacttggagaactcagaaaattattttaaatttctaagttataataaatttgcacacagataacatgcatgctatttatgtcacatctcacattaaattattttaaaataagcagtgcccttcaaaacagatgcagacatgtgtgttggtagtagtgaggagattggtattagcatcaagtcttcattgatgactaatttttaattcccttccttttatctttaggtatggctttcccaacgaaaggctaagaattcaagaacggtcttaactgaaccctcatcagatctgaatttaacaaatgcttagtctcagcagcctccgggggaaaaaagcttagcctagcagtcagtgacttacttgcactttttgcacatagatataaagtaaaattatgttattaatttggtttagtctgtaatattacacagtaatggtaatttataaaggagtgtatagtagtatactgactgctaagtgtactatactgtttgctttactaatcacctaattcattgcagttcatacttattgactcagagtttaaaaccacaatctgtaggctttaagaattgcttttaaacctttttaagtgataaactcttgaagtggtcttaaggttagcaaataattgtctgtattaaacatggcgttatttaagtagtcctgctgcaagaaaggcacttcagtgaatatgtgactagtaaagcttaaatatgtttggatctaatagagctcatgaaatactgtaacttggggattgtaaatgaatggatacaataggttaaggcccaagatgtttgaaatgaatgcaatattaatagatgcatatatacatgacatattgtggttaattttaaaactactgtgccttaacgtgtttcttaaacttttgtagtaaatgaacatttgaaatccattttgataaacctgctgttaatgttttttccccccttgtgaatgttttctaactttgtcttggtaattgcaatttaactaggtgcggtggctactaaagttcgaaggcacgatatgcgtgtccatccttaccaaaggattgtgaccgcagaccgaggttagtttagttctgcagttcttgtctataagaaatgcgttgggtgtccataaaatttgcaacaccacacctgatggaaaaatgtaattgcttacctgcacacagttttttttccttttctaaatttgtttgtgatcattgacagatttaagggttgggttttttgttttggtttggttttttctcccttcatattttaacttattaaatcttctattattatgtactatgatttattcctactaaaacataaattagtcaatttggggagctattaaattttgatgttgcctcagttattttcattaataacttttgctaaaatttaccttttaaaagttctgaaatttggggttggtattgcaaaatgaattgaacggatggtgctttaatgagagaagtaaaggaatatatgcctcctgtgtacttttggagaaaactgaagatttagtttccatttttctttataataaaatatttgagccactgtataaacatgagggtgcacatgtcaagtacttagctaaaatcaacaaagtgaggactgtgaagataactttcatgtagttggatttttttatataaattagagcgtcaattcccttttattcttacattctcttgccaaaatggatcctttgatttttgtcatttgctgctaaaatatattatctgaaggtaaactgtctcttgaagttctgtggtggtatgagatccagctgtgtgaatataatttttgactaacctgtgactggaaaataagtcttcatttttctcctttacaacttttataatttgtgtcctgtatatgcccttggacccttttataaattatttttgcttattgaggaatggtattttcggtttattgacattgaattgttttctaagtttttccatcacaagataggaatatcaagcatggtagtaaaaaaggattttttacaagtttctattatggcacatttgtttcctacaaattaaattgatcaaagtctcaaatattagtggaggaaaaagtgctggatttgtacttcaattgtacatcttctatgaatttatgaaggacctacctgctttatgtgattaccttgagtactgatgataaatactagacacagctgttgtccacatcagaaataacatgcctttcccaaagacattgttaatatttgtttagcataatccataaagaacgttgaagacttttaaactaatgtattcatcactaacagtgattgttcagtgaacaaaatagaccccagctccgtggtcgtctatgaggatggtattccttgtaagtgttctgtatgagcacgtctcatagggatggggaagttttttggaaagtcacttgagttttaaagaaactggacaattccatgaataatttgaggttttattcatattgctaatgtctacaattgttctaaagagtattttaaagtagtttttttcccccagctaatctttccctatgtatgcccccttttaggagatttctcaccattttgctttaacacaataattattggcctacttaatactccagtgccttgagatagttggacatattttaggaagattttattgtatttggaaaattacgacacattccatgcatggatcttttgtagttacgtgttttgattagtcctgtcactgtttttatttaaaatgcagtgtcagcaaaccgaaatgctcatttcttttttagtaacagagtactcgtatacttatcactgtatgcactcattgggtctaagggagatgtctgaagtccttcacttaaattattttatgatactactgttttctctatttttgaggttaaaattattttaaaaaaatattttgaagagaagtttattagtataagcattcatttaatgcaaaaaaactcagcccttggacatataaccatgtaattctatatgaacgtttagagtactacatggttgaccaatatctagttctttactaaaagtaaactcacctctttatatatatttcaaaactgaatttgaagcctattagagaccaactgaccttttagttgtaatgaactgtatggtcttgcatggtgacacacctgtgtaggaggccaagacttggcagaggatgtagtctaggtgtcctggtatatataaatggtcactcacttcgtttatatattccacactcagaaaagaagtcagagttttttctgagtaatacaaaaaccatcacttacataatttgtataagaaactttaaacagttttaatcaaaactatgagtaacatcaaaaatgctttaagattctatattttggaatacctgtgaagtagtatgactacatcatgttaaatatttattttcttctatgattttggagcagcaatttttattttaaataaaattccacttttaagaaattcagggaagatttggtcacattgaagatacagtatttttgtagtatttataaactgttctaaatgatagactatagaaaacatttttgtcatatgaaggtaaatcagtccattattttggatcatttaaactgaacattacaccttctgggctttgatttatgaagtggcacagaatctaactttgcactgaatatcttttcattcacatctcctctgccttagtcacaatggcaacagtacagaaaattctatcaaacctcagaatatagtagaaataattaagctgttgaatgagtcttaaaaattatactactgttaagtggaccaagtttggtgaagcagaatgtgacaaaggttgattaaggaaggaacaactcaaggacattgggaatgataacttttccacttgagaactactttatgttttactgtaatttttaaagtttttttgtcctttttgttattttgcaaaagaaaatagtatttacaggtggcttcttttaaaatataaaaatataaagcaggaatgtatatgaaatgtcagattttattgtatttgcagagtattagctttgaaattgaataaagaaagctgtttgtagttttaaaatgccttattggtatcaattagaaatttcttctattttttgatgtacttagagctttttgagtgtagaattttaaatggcaggattttacagtgtttacatgcaagtgcattttataagtgttctatatgtgtaaaatagtattttcaactggaaagtgttggctagtgcaaaaggcctggccattttctggttcccatgatgttgcctacactgctagactacagtttagtatcgctttgtatcatgaggccaagaaattccatgttgtttgtaaatagaataattgaaaaagcaataaacatttattgaacaaaagaaaccttgtttggcccagagtttatgttgaaccaaatggttcatagaattttgaatttctttagattcatttctgttaatcatcagttattaataatcacatccatcattaatagttgctttaatgcttgcatcttagagaatactaatgcttaatagcagtcagatactgataactgcactgactgtttaaaaattctgtataccaaacctattcattgttgtttttcaatttccttcattgactgctactaactattagttgttagttgtattttatttctattttttcttgttaaccagtttttttctttttcattgggggagtgggctcttcttcatttgttcaaatcatgatacgaaattgtcatgattttaattgtattctgtagatggtgtcaatcagtttgtcagaattaaacatgcttttttttttattagttgtgattagtttttcatgttgtcattaagccgtcactagctgaaactaatctcttctctatcttttcttttcttttttttgttttgtttttttttgtttctaaccacccagccgccaccggcaactaacctatgaccttctgacctctgaactcttcacccaatgatgacctgaccatgcctgcctgctgatcagttaactggtaatcgcctttgcttgcctgtcgtcagtgcagcgagctgaggcacttgtccgttcgtcttaccatctaaccaaacaaaagacaaagaaattgttgtcctccaactcagctttttttttttttttttcctgtttgggtgaaagtggttctagaaactgcactgaatagtagtaaagcaataaggcccaattcatcccacagcactgatcatcttttaatatcccaccctaagcgaacggtaagaaggcctctcttaagaaggggagacagatggtccttaactactcaatgacagaggcagttactgtgagagacttctaggaatctttttcttctcatagcgaagtcaaagctctctctgaatgtactgtgtgatgatgcatcatgcatgaaccttcggtcagggatatcattggtgaagtgatttcaaaaagtattcaaaatttgatatgctgtttagtcactacagtgccctcaaagggcagaagttgcagccttttttatattgcctgccaaaatttgaagtattagaagaaagtgtgccatgagagaaaaacttaaggagttttgaaaagtaatgcaaataacaaaactgcaacactatttttaaaaagataaatatctgagttaaaattactgaatctttattttacacctaaaaaaatatgagaacaaggtacatgcattatgtgtcacattactgggcaaactgttcaagtatttttttttaaacctccctgtatagaaaaaaatcattaaggatgtaaaagccatgcttgcctatttgctgtatacatgtaatgaaattgtagataaagtgtagtgcattaacaattncccaaaaanatctatcttccatngtcgggcgttaaaattttata

SEQ ID NO: 453502 - DNA, 1653 bp, Homo sapiens
  misc_feature (1570)..(1570): n is a, c, g, or t
  misc_feature (1578)..(1578): n is a, c, g, or t
  misc_feature (1583)..(1583): n is a, c, g, or t
  misc_feature (1590)..(1590): n is a, c, g, or t
  misc_feature (1602)..(1602): n is a, c, g, or t
  misc_feature (1640)..(1640): n is a, c, g, or t
  misc_feature (1648)..(1648): n is a, c, g, or t
tgaactgaggcgaactccgccgccaagtgagtgaggaggaggaggaggagaaggaggaggaggaagaggaggagcgcagtcggagcgcggcggcagcggcagaggcgccgcggcggggaccagcccagagagaccccccgagcccgcggcacaggcggcggcggcgctgagcgggctcgaccagccgagcgagcggcggccccggctcctcctcgtccggcgccagcagcccgcgccccgcgcccgcactcggccagccgagacccgcctcccgcccgcccgccggcctcgtgagggacgcgccgagccgggcggccgagagcggcggcggctgggagcgcgtcgggcccgggcggaaagtgcctgcggggggcgggcgagcgcgcggtgccggccgccccggggctcggcgcgggagccagagcgggagccggcgcggagcgggacgccgggtcccgagcggcccgcggccggggctcagcccccgcccctccctcctctccggcggcggcggcggcggcggcgggcggagtgagctgcggagcctggaatatggtcggggaaatggaaacgaaggagaagccgaagcccaccccagattacctgatgcagctgatgaacgacaagaagctcatgagcagcctgcccaacttctgcgggatcttcaaccacctcgagcggctgctggacgaagaaattagcagagtacggaaagacatgtacaatgacacattaaatggcagtacagagaaaaggagtgcagaattgcctgatgctgtgggacctattgttcagttacaagagaaactttatgtgcctgtaaaagaatacccagattttaattttgttgggagaatccttggacctagaggacttacagccaaacaacttgaagcagaaaccggatgtaaaatcatggtccgaggcaaaggctcaatgagggataaaaaaaaggaggagcaaaatagaggcaagcccaattgggagcatctaaatgaagatttacatgtactaatcactgtggaagatgctcagaacagagcagaaatcaaattgaagagagcagttgaagaagtgaagaaattattggtacctgcagcagaaggagaagacagcctgaagaagatgcagctgatggagcttgcgattctgaatggcacctacagagatgccaacattaaatcaccagcccttgccttttctcttgcagcaacagcccaggctgctccaaggatcattactgggcctgcgccggttctcccaccagctgccctgcgtactcctacgccagctggccctaccataatgcctttgatcagacaaatacagaccgctgtcatgccaaacggaactcctcacccaactgctgcaatagttcctccagggcccgaagctggtttaatctatacaccctatgagtacccctacacattggcaccagctacatcaatccttgagtatcctattgaacctagtggtgtattaggtgcggtggctactaaagttcgaaggcacgatatgcgtgtccatccttaccaaaggattgtgaccgcagaccgaggccggccancgggaaanttaanctttggnacttttggaacnttggaaattttttaacccatggatgggactgggaacangggctggnctggt

SEQ ID NO: 453503 - DNA, 1034 bp, Homo sapiens
tgaactgaggcgaactccgccgccaagtgagtgaggaggaggaggaggagaaggaggaggaggaagaggaggagcgcagtcggagcgcggcggcagcggcagaggcgccgcggcggggaccagcccagagagaccccccgagcccgcggcacaggcggcggcggcgctgagcgggctcgaccagccgagcgagcggcggccccggctcctcctcgtccggcgccagcagcccgcgccccgcgcccgcactcggccagccgagacccgcctcccgcccgcccgccggcctcgtgagggacgcgccgagccgggcggccgagagcggcggcggctgggagcgcgtcgggcccgggcggaaagtgcctgcggggggcgggcgagcgcgcggtgccggccgccccggggctcggcgcgggagccagagcgggagccggcgcggagcgggacgccgggtcccgagcggcccgcggccggggctcagcccccgcccctccctcctctccggcggcggcggcggcggcggcgggcggagtgagctgcggagcctggaatatggtcggggaaatggaaacgaaggagaagccgaagcccaccccagattacctgatgcagctgatgaacgacaagaagctcatgagcagcctgcccaacttctgcgggatcttcaaccacctcgagcggctgctggacgaagaaattagcagagtacggaaagacatgtacaatgacacattaaatggcagtacagagaaaaggagtgcagaattgcctgatgctgtgggacctattgttcagttacaagagaaactttatgtgcctgtaaaagaatacccagattttaattttgttgggagaatccttggacctagaggacttacagccaaacaacttgaagcagaaaccggatgtaaaatcatggtccgaggcaaaggctcaatgagggataaaaaaaaggaggatgctaaatagagctagcccattgcgagcataatgaagattacatcgtattatcctctgaaagtaggtaccgctca

SEQ ID NO: 453504 - DNA, 10117 bp, Homo sapiens
caagaacggtcttaactgaaccctcatcagatctgaatttaacaaatgcttagtctcagcagcctccgccggaattccggccggaattccggcggagcctggaatatggtcggggaaatggaaacgaaggagaagccgaagcccaccccagattacctgatgcagctgatgaacgacaagaagctcatgagcagcctgcccaacttctgcgggatcttcaaccacctcgagcggctgctggacgaagaaattagcagagtacggaaagacatgtacaatgacacattaaatggcagtacagagaaaaggagtgcagaattgcctgatgctgtgggacctattgttcagttacaagagaaactttatgtgcctgtaaaagaatacccagattttaattttgttgggagaatccttggacctagaggacttacagccaaacaacttgaagcagaaaccggatgtaaaatcatggtccgaggcaaaggctcaatgagggataaaaaaaaggaggagcaaaatagaggcaagcccaattgggagcatctaaatgaagatttacatgtactaatcactgtggaagatgctcagaacagagcagaaatcaaattgaagagagcagttgaagaagtgaagaaattattggtacctgcagcagaaggagaagacagcctgaagaagatgcagctgatggagcttgcgattctgaatggcacctacagagatgccaacattaaatcaccagcccttgccttttctcttgcagcaacagcccaggctgctccaaggatcattactgggcctgcgccggttctcccaccagctgccctgcgtactcctacgccagctggccctaccataatgcctttgatcagacaaatacagaccgctgtcatgccaaacggaactcctcacccaactgctgcaatagttcctccagggcccgaagctggtttaatctatacaccctatgagtacccctacacattggcaccagctacatcaatccttgagtatcctattgaacctagtggtgtattagagtggattgaaatgccagtcatgcctgatatttcagcccattgacttgctggatgaaggactagaatacagcagcttttaccagacaaaatttgaatactttttttcctgaattgtatatgaccttggtgctgcatgcatgctgttgacttttaggactttgatcttttaaggttttttttccccagcattaatattgatttataaagatttgaaaatctttaatgaactggagaacactaagatttaaactcgaaaattcgttgttcaagtaaagaaagccatgatgctctgtatgttatctgtgtgtgtgcatgcactcaggtgccctttgtttcatgaacaaatacatttcattgtacatgttttctgtttaaatcattgtataaagtaattgcaggtcagaattataccacagaactgtttatgagaggcttgtgtctgttgcacatttcttgaagcatttttaaaataacatgtaacctgtaaccttgttgtttaagttttcttttctattaatactctgtcctgtggtcccgtgcatgctccttttcccagaactcctctctgctgcacccacagcatctgttcccgaggagttatgactcttgacttcctgcagggctggggctcttagccaccagctgctgttccagcactttcagcgcaagatctccctgattttgccacgtggaattgtacttgtatatgattaccttatctaaaatgaataagaggtgatggaccagtttactgcttagaaatagcaagaggcactgcagtaaaacttgtttctcattgtaaagcttcatgtcttttgtttgttggaaaatttttacttatagaaacttaattattagactggtaaaataaagaccaaaatatgcagatttctaattggcattcataaggtgaataataataagtgcccaatgaaaaaatctattatggttaatttcatttcttgctttgccacctaagcagtaaaacatgatattgaccacttggagaactcagaaaattattttaaatttctaagttataataaatttgcacacagataacatgcatgctatttatgtcacatctcacattaaattattttaaaataagcagtgcccttcaaaacagatgcagacatgtgtgttggtagtagtgaggagattggtattagcatcaagtcttcattgatgactaatttttaattcccttccttttatctttaggtatggctttcccaacgaaaggctaagaattcaagaacggtcttaactgaaccctcatcagatctgaatttaacaaatgcttagtctcagcagcctccgggggaaaaaagcttagcctagcagtcagtgacttacttgcactttttgcacatagatataaagtaaaattatgttattaatttggtttagtctgtaatattacacagtaatggtaatttataaaggagtgtatagtagtatactgactgctaagtgtactatactgtttgctttactaatcacctaattcattgcagttcatacttattgactcagagtttaaaaccacaatctgtaggctttaagaattgcttttaaacctttttaagtgataaactcttgaagtggtcttaaggttagcaaataattgtctgtattaaacatggcgttatttaagtagtcctgctgcaagaaaggcacttcagtgaatatgtgactagtaaagcttaaatatgtttggatctaatagagctcatgaaatactgtaacttggggattgtaaatgaatggatacaataggttaaggcccaagatgtttgaaatgaatgcaatattaatagatgcatatatacatgacatattgtggttaattttaaaactactgtgccttaacgtgtttcttaaacttttgtagtaaatgaacatttgaaatccattttgataaacctgctgttaatgttttttccccccttgtgaatgttttctaactttgtcttggtaattgcaatttaactaggtgcggtggctactaaagttcgaaggcacgatatgcgtgtccatccttaccaaaggattgtgaccgcagaccgaggttagtttagttctgcagttcttgtctataagaaatgcgttgggtgtccataaaatttgcaacaccacacctgatggaaaaatgtaattgcttacctgcacacagttttttttccttttctaaatttgtttgtgatcattgacagatttaagggttgggttttttgttttggtttggttttttctcccttcatattttaacttattaaatcttctattattatgtactatgatttattcctactaaaacataaattagtcaatttggggagctattaaattttgatgttgcctcagttattttcattaataacttttgctaaaatttaccttttaaaagttctgaaatttggggttggtattgcaaaatgaattgaacggatggtgctttaatgagagaagtaaaggaatatatgcctcctgtgtacttttggagaaaactgaagatttagtttccatttttctttataataaaatatttgagccactgtataaacatgagggtgcacatgtcaagtacttagctaaaatcaacaaagtgaggactgtgaagataactttcatgtagttggatttttttatataaattagagcgtcaattcccttttattcttacattctcttgccaaaatggatcctttgatttttgtcatttgctgctaaaatatattatctgaaggtaaactgtctcttgaagttctgtggtggtatgagatccagctgtgtgaatataatttttgactaacctgtgactggaaaataagtcttcatttttctcctttacaacttttataatttgtgtcctgtatatgcccttggacccttttataaattatttttgcttattgaggaatggtattttcggtttattgacattgaattgttttctaagtttttccatcacaagataggaatatcaagcatggtagtaaaaaaggattttttacaagtttctattatggcacatttgtttcctacaaattaaattgatcaaagtctcaaatattagtggaggaaaaagtgctggatttgtacttcaattgtacatcttctatgaatttatgaaggacctacctgctttatgtgattaccttgagtactgatgataaatactagacacagctgttgtccacatcagaaataacatgcctttcccaaagacattgttaatatttgtttagcataatccataaagaacgttgaagacttttaaactaatgtattcatcactaacagtgattgttcagtgaacaaaatagaccccagctccgtggtcgtctatgaggatggtattccttgtaagtgttctgtatgagcacgtctcatagggatggggaagttttttggaaagtcacttgagttttaaagaaactggacaattccatgaataatttgaggttttattcatattgctaatgtctacaattgttctaaagagtattttaaagtagtttttttcccccagctaatctttccctatgtatgcccccttttaggagatttctcaccattttgctttaacacaataattattggcctacttaatactccagtgccttgagatagttggacatattttaggaagattttattgtatttggaaaattacgacacattccatgcatggatcttttgtagttacgtgttttgattagtcctgtcactgtttttatttaaaatgcagtgtcagcaaaccgaaatgctcatttcttttttagtaacagagtactcgtatacttatcactgtatgcactcattgggtctaagggagatgtctgaagtccttcacttaaattattttatgatactactgttttctctatttttgaggttaaaattattttaaaaaaatattttgaagagaagtttattagtataagcattcatttaatgcaaaaaaactcagcccttggacatataaccatgtaattctatatgaacgtttagagtactacatggttgaccaatatctagttctttactaaaagtaaactcacctctttatatatatttcaaaactgaatttgaagcctattagagaccaactgaccttttagttgtaatgaactgtatggtcttgcatggtgacacacctgtgtaggaggccaagacttggcagaggatgtagtctaggtgtcctggtatatataaatggtcactcacttcgtttatatattccacactcagaaaagaagtcagagttttttctgagtaatacaaaaaccatcacttacataatttgtataagaaactttaaacagttttaatcaaaactatgagtaacatcaaaaatgctttaagattctatattttggaatacctgtgaagtagtatgactacatcatgttaaatatttattttcttctatgattttggagcagcaatttttattttaaataaaattccacttttaagaaattcagggaagatttggtcacattgaagatacagtatttttgtagtatttataaactgttctaaatgatagactatagaaaacatttttgtcatatgaaggtaaatcagtccattattttggatcatttaaactgaacattacaccttctgggctttgatttatgaagtggcacagaatctaactttgcactgaatatcttttcattcacatctcctctgccttagtcacaatggcaacagtacagaaaattctatcaaacctcagaatatagtagaaataattaagctgttgaatgagtcttaaaaattatactactgttaagtggaccaagtttggtgaagcagaatgtgacaaaggttgattaaggaaggaacaactcaaggacattgggaatgataacttttccacttgagaactactttatgttttactgtaatttttaaagtttttttgtcctttttgttattttgcaaaagaaaatagtatttacaggtggcttcttttaaaatataaaaatataaagcaggaatgtatatgaaatgtcagattttattgtatttgcagagtattagctttgaaattgaataaagaaagctgtttgtagttttaaaatgccttattggtatcaattagaaatttcttctattttttgatgtacttagagctttttgagtgtagaattttaaatggcaggattttacagtgtttacatgcaagtgcattttataagtgttctatatgtgtaaaatagtattttcaactggaaagtgttggctagtgcaaaaggcctggccattttctggttcccatgatgttgcctacactgctagactacagtttagtatcgctttgtatcatgaggccaagaaattccatgttgtttgtaaatagaataattgaaaaagcaataaacatttattgaacaaaagaaaccttgtttggcccagagtttatgttgaaccaaatggttcatagaattttgaatttctttagattcatttctgttaatcatcagttattaataatcacatccatcattaatagttgctttaatgcttgcatcttagagaatactaatgcttaatagcagtcagatactgataactgcactgactgtttaaaaattctgtataccaaacctattcattgttgtttttcaatttccttcattgactgctactaactattagttgttagttgtattttatttctattttttcttgttaaccagtttttttctttttcattgggggagtgggctcttcttcatttgttcaaatcatgatacgaaattgtcatgattttaattgtattctgtagatggtgtcaatcagtttgtcagaattaaacatgcttttttttttattagttgtgattagtttttcatgttgtcattaagccgtcactagctgaaactaatctcttctctatcttttcttttcttttttttgttttgtttttttttgtttctaaccacccagccgccaccggcaactaacctatgaccttctgacctctgaactcttcacccaatgatgacctgaccatgcctgcctgctgatcagttaactggtaatcgcctttgcttgcctgtcgtcagtgcagcgagctgaggcacttgtccgttcgtcttaccatctaaccaaacaaaagacaaagaaattgttgtcctccaactcagctttttttttttttttttcctgtttgggtgaaagtggttctagaaactgcactgaatagtagtaaagcaataaggcccaattcatcccacagcactgatcatcttttaatatcccaccctaagcgaacggtaagaaggcctctcttaagaaggggagacagatggtccttaactactcaatgacagaggcagttactgtgagagacttctaggaatctttttcttctcatagcgaagtcaaagctctctctgaatgtactgtgtgatgatgcatcatgcatgaaccttcggtcagggatatcattggtgaagtgatttcaaaaagtattcaaaatttgatatgctgtttagtcactacagtgccctcaaagggcagaagttgcagccttttttatattgcctgccaaaatttgaagtattagaagaaagtgtgccatgagagaaaaacttaaggagttttgaaaagtaatgcaaataacaaaactgcaacactatttttaaaaagataaatatctgagttaaaattactgaatctttattttacacctaaaaaaatatgagaacaaggtacatgcattatgtgtcacattactgggcaaactgttcaagtatttttttttaaacctccctgtatagaaaaaaatcattaaggatgtaaaagccatgcttgcctatttgctgtatacatgtaatgaaattgtagataaagtgtagtgcattgaaacaaatgaacaaaaagtagatacttttactatacaagggtgctggtgcagaaaaaaatatatatatttttggaaatgtagcattttatactttcaagtgttataaaaaaaaagaaaaagaacaaagaaaccctttatttcattaaatgattttttctggtggttgtcaagaaacaaaagaccaaaagagcctttttgtctttcttttttattttttaagtattggaataagtctaaagaaaagaaagtgccttattttccttcatggtcattcagtcaagtgtctcataaagatcagctcctccctcagaatacaagttaatgcatgttactcagtcgcccagtatgtgaaagaagatatgagggagacaaatgagttgatagtttgaattataggatttttgccacgttaccttgatgcaaatttgccaaatctgatactgtgaaaagatttgataacttttctaatgcctgactagtaagttttaaaacatcattctttaaaagaatagtttaatacttttggttattccaatcttcaatgttaacccaaaggattctgagataaaaattatgtgtcatctaaacttcagtttacagacaaaattagagctttgttttatttggagaagggggatgcattcatttgattttgttttttgtttttaattaattgaatataataggatacctagcaaatgttttcacaaaagtgaatctttgtgattttcattctagaaaacaatgttttaaatcacccaaatttaatcacatgtctttatatcataccagataactggtgtagtgtatccttttactgtttcaataacctctgcctcccccaccccttaactttaaaagaatgtgaaaaactagcatcatagtgcatataaatactcaaccacatttcagcttaagcttctaatttctcaagaagttgaaacagttagttatgtagttgaagcaatttgtgtgcaaagcctacatctaaacacttgagtgaataatcattaactgctcagtaccagacgtggcaaatctcaagtgacagtggaccccccccccccgcccagcttatcaactcgtcccctcttccacaccttcccagcatcacagtcagaggtcagcaggaagctgagtcattaccttcttggtgacctcccccaccatcttgtctcacttggaaaccgttgtcagtttatttactatgcaatagacattcattgttttgtatccagctagctttggtttaatatgccactgctttgtctttctgttacacatacagttttgatttatttacaatatatgctgtgccattttgatttttatattgtttggttggttgaataaatttgcgacactcaaacacttgaggtgatagttgttaaaaacaataccagtatttgatccagtttcatctcaactatgttatacctggacattttagatgtttatcaaaggtcttttatggggaagaaagtaaatgtatgaaataataaatgtgtgacatttatagggaatgttggctctgaacaaacttttgaaaacttggttgacaaaattttggatcaactgaaaaaagcatgacttttgaaatctctgaatgccttggttctcagtattatcattctttattgaatttatttcttattaaaatatgtagtttttaagactttttttctgacagtattatgtaattttttagcgtgggtagatgggagtgtcgcttgtatgttatcgtacagctgacatgtatttttgtctattctttattatcttagtttcatgctatgtatgtaccataaccaacctattgcctatgagaaacatgtaagataatgtatttacagccattgttacaagtttataatgtatttttctatcttgttttatatgtatgttatataacattcaaaaagaatttttttcttgattgagaaaaggatacaaaatgcaaaatccacaattttgataactgaaaattgccaattgttttgcagtactttattatattgggtgtcttgtcttttttgggcttttagttagctaatgaatgaatacattagacacttttgggttttagttgggattttacatagcttgcattttaattctttggttctttgctgtttctattaacccacagcattattttaataaatgttataataccacctac

SEQ ID NO: 453505 - DNA, 1421 bp, Homo sapiens
tgacgtaaaaggaaagagacggaagaggaagaattctacctgagtttgccataaagtgcctgccctctagcctctactcttccagttgcggcttattgcatcacagtaattgctgtacgaaggtcagaatcgctacctattgtccaaagcagtcgtaagaagaggtcccaatcccccactctttccgccctaatggaggtctccagtttcggtaaaagtttcatttgatctgaatagtattaaaataaaatacctggatgaggaagatgaagagagatgaagtctcgctctgtcaccaggctggagtgcagtggcgtgatcttggctcactgcaacctctgcctccgggttcaagcaattctcctgcttcagcctcccgagtagcttgggactacagacgcgcgcaaccatgcccagctaattctttttttctttattttattttatttttttttttgagatggagtctcgctctgtcgcccaggctggagtgtagtggcgcgatcttggctcactgcaagctctgcctcccgggttcacgccattctcctgcctcagcttcctgagtagctgggactgcaggtgcctgccaccacgtccagctaattttttatgtttagtagagatggggtttcaccatcttggccaggctggtctcgaactcctgaccttgcgatccacccacctcggcctcccaaagtgctgggattacaggcgtgagccaccgtgcctggccagtacccagtagtttttttggctcctctccctcctcccacccttcaccctcaggtagggcccagtgtctgttgttcccttctttgtgtttatgagttctcatcatttagctcccacttataagtgagaacgtgtggtgtttggttttctgttcctttcttagtttgctgaggataatggcctcaagatccatctgtgttcctacaaaagagatgatcttgttcttttttatgattgcacatcttttgttctaacgtttggtccttcaccttggttcctgacacaaggattcctaaatcccttggaattttctgcatgataggagcgtcctttgttctcatgaggtgactcttggtgggctccttatttggggactggtcaccaaaaatacctaactatggttggaagcttagtgctttcagccccattccccatcctctggggtggggagcagagctggagctcgatcatgcctgcgtgacaaagcctccagaaaaatccttgaaagacaggacatggagagctgctgggttggcgaacacatccatgtgccgggaggatggtgcaccccaactccacaaggacccttccagacctcaccctgtgtatctcttcatctggctgttcatttgtatcctttaaaatatcctttgtaataaatcagcaatagtaagtaaactattttc

SEQ ID NO: 453506 - DNA, 2061 bp, Homo sapiens
tgacgtaaaaggaaagagacggaagaggaagaattctacctgagtttgccataaagtgcctgccctctagcctctactcttccagttgcggcttattgcatcacagtaattgctgtacgaaggtcagaatcgctacctattgtccaaagcagtcgtaagaagaggtcccaatcccccactctttccgccctaatggaggtctccagtttcggtaaaagtttcatttgatctgaatagtattaaaataaaatacctggatgaggaagatgaagagagatgaagtctcgctctgtcaccaggctggagtgcagtggcgtgatcttggctcactgcaacctctgcctccgggttcaagcaattctcctgcttcagcctcccgagtagcttgggactacagactagagacggggtttcactgtgttagccaggatggtctcgatcccctgacatcgtgatccgctgtcctcggtctcccaaagtgctgggattacaggcgtgagccaccgcacctggtcgattaacctcttttaagcctgttttctcatccatacaatggagataatggcagcacccactgcttgactgggcaacaagagcgaaactccatctcaaaaggaaaaaaaagcaaaagagaaaaaacccaaacaaacaaaacccctgaacttccctgcgggcacattttctctggcagcctttttcaatgagagctatgttttctccgatactatatggcctgcggaccgctcagctttcattccagtgaaaacattccagaacaaactccaggtcggtcccaggtgtttctccaatcaactcagggcatggttgtgtgtcacctgctgcccagctagaatgacacctctccaggcctctgacttagctaggtctccaccatgtgactccaccgtagactccatgccttcttcttttgcaaagcctcggacacccaaacacctaccaaaagtgggtagggtgccaggacacctccaagtataagtagggctccccaccatgcctggatttggagttgtgctgcagagtggtggctgctcatgacattcatttcacccctttctgtgcaggtgctggaagcccaggaagcacacatcaaggctcccttgccagcagggtgctgccaataaaaggtagtcacgtggaatttggaatgtggaaaggaggtagaagtcatcctttcctcccctgtagcagcaggcgtgcaggctctggtggtcagctggactccatactcccccaccagtcaccagcctggggaccgtggggctgcaaggacctcagcagcggtgtcccaagtttcctgacttcttccatcctctggaaatcagctgtggtaaagtagcctgaaagccagtggtacaaccccctccccacaaccttcaccacctctagcccctccaatgaaaagcactaattgcctatatacaacccctttttgtttgaaatatctagagtaatttctgttttcctatctggggtagtgtaacgtaagaagaaatatacatttggtctctgcccccggttcctaacacaaagctcctaaaacccttggaaattcctgaaagatgggggtgctaggagcattgtctttttttttttttaaatttatcatttttcttttctcccaggtgttttttccttttttttttttttaacttttattttagattaggggatacatgtgaacgtttgttatatagctaaacttgtgtcacatgggtttgttgtacagattatttcgtcacccaggcactaggcctaatacccgatagtttttttctttttttttttttgagactagagcgagactccatctcaataaaaaaaataaagtgaattttcctccatcttgtaagggcgaaaagccccctaccatgtctgaatgaacattcatgcatgggcttgagggcttgggaaaaagacagggcttggccacacagtgcaggtaggcccagtgatcctatgagaggggccaggaggtggtaggtcccctgtgggcaggaggtcaagtatgtggtattatacttgatgaaccaggggagaggg

SEQ ID NO: 453507 - DNA, 1745 bp, Homo sapiens
tgacgtaaaaggaaagagacggaagaggaagaattctacctgagtttgccataaagtgcctgccctctagcctctactcttccagttgcggcttattgcatcacagtaattgctgtacgaaggtcagaatcgctacctattgtccaaagcagtcgtaagaagaggtcccaatcccccactctttccgccctaatggaggtctccagtttcggtaaaagtttcatttgatctgaatagtattaaaataaaatacctggatgaggaagatgaagagagatgaagtctcgctctgtcaccaggctggagtgcagtggcgtgatcttggctcactgcaacctctgcctccgggttcaagcaattctcctgcttcagcctcccgagtagcttgggactacagacgcgcgcaaccatgcccagctaattctttttttctttattttattttatttttttttttgagatggagtctcgctctgtcgcccaggctggagtgtagtggcgcgatcttggctcactgcaagctctgcctcccgggttcacgccattctcctgcctcagcttcctgagtagctgggactgcaggtgcctgccaccacgtccagctaattttttatgtttagtagagatggggtttcaccatcttggccaggctggtctcgaactcctgaccttgcgatccacccacctcggcctcccaaagtgctgggattacaggcgtgagccaccgtgcctggccagtacccagtagtttttttggctcctctccctcctcccacccttcaccctcaggtagggcccagtgtctgttgttcccttctttgtgtttatgagttctcatcatttagctcccacttataagtgagaacgtgtggtgtttggttttctgttcctttcttagtttgctgaggataatggcctcaagatccatctgtgttcctacaaaagagatgatcttgttcttttttatgattgcacatcttttgttctaacgtttggtccttcaccttggttcctgacacaaggattcctaaatcccttggaattttctgcatgataggagcgtcctttgttctcatgaggtgactcttggtgggctccttatttggggactggtcaccaaaaatacctaactatggttggaagcttagtgctttcagccccattccccatcctctggggtggggagcagagctggagctcgatcatgcctgcgtgacaaagcctccagaaaaatccttgaaagacaggacatggagagctgctgggttggcgaacacatccatgtgccgggaggatggtgcaccccaactccacaaggacccttccagacctcaccctgtgtatctcttcatctggctgttcatttagcagctccgagggcaggcatggtggctcatgcctgtagtcccagcactttgggaggccgaggcaggtggttcatctaaggtctggagttcgagaccagcctggccaacatagcgagagcagctccggtggcgggaggagtggcagcggccaggcagcccagcttcgcgaaggctgtaggcacaccgcggccagcaggcacctggcacccaccttccctgctgccaggatgcccaagaaaaaggtcagctccaccgaaggggctgccatggaagagcccaagaggagatcagcgcaattgtcagctaaacctcctgcaaaagtggaagcgaagccgaaaaaggcagcagcgaaggataaattttcagacacaaaagtgc

SEQ ID NO: 453508 - DNA, 1253 bp, Homo sapiens
tgacgtaaaaggaaagagacggaagaggaagaattctacctgagtttgccataaagtgcctgccctctagcctctactcttccagttgcggcttattgcatcacagtaattgctgtacgaaggtcagaatcgctacctattgtccaaagcagtcgtaagaagaggtcccaatcccccactctttccgccctaatggaggtctccagtttcggtaaaagtttcatttgatctgaatagtattaaaataaaatacctggatgaggaagatgaagaggtgctggaagcccaggaagcacacatcaaggctcccttgccagcagggtgctgccaataaaaggtagtcacgtggaatttggaatgtggaaaggaggtagaagtcatcctttcctcccctgtagcagcaggcgtgcaggctctggtggtcagctggactccatactcccccaccagtcaccagcctggggaccgtggggctgcaaggacctcagcagcggtgtcccaagtttcctgacttcttccatcctctggaaatcagctgtggtaaagtagcctgaaagccagtggtacaaccccctccccacaaccttcaccacctctagcccctccaatgaaaagcactaattgcctatatacaacccctttttgtttgaaatatctagagtaatttctgttttcctatctggggtagtgtaacgtaagaagaaatatacatttggtctctgcccccggttcctaacacaaagctcctaaaacccttggaaattcctgaaagatgggggtgctaggagcattgtctttttttttttttaaatttatcatttttcttttctcccaggtgttttttccttttttttttttttaacttttattttagattaggggatacatgtgaacgtttgttatatagctaaacttgtgtcacatgggtttgttgtacagattatttcgtcacccaggcactaggcctaatacccgatagtttttttctttttttttttttgagactagagcgagactccatctcaataaaaaaaataaagtgaattttcctccatcttgtaagggcgaaaagccccctaccatgtctgaatgaacattcatgcatgggcttgagggcttgggaaaaagacagggcttggccacacagtgcaggtaggcccagtgatcctatgagaggggccaggaggtggtaggtcccctgtgggcaggaggtcaagtatgtggtattatacttgatgaaccaggggagaggg

SEQ ID NO: 453509 - DNA, 942 bp, Homo sapiens
tgacgtaaaaggaaagagacggaagaggaagaattctacctgagtttgccataaagtgcctgccctctagcctctactcttccagttgcggcttattgcatcacagtaattgctgtacgaaggtcagaatcgctacctattgtccaaagcagtcgtaagaagaggtcccaatcccccactctttccgccctaatggaggtctccagtttcggtaaaagtttcatttgatctgaatagtattaaaataaaatacctggatgaggaagatgaagaggtgctggaagcccaggaagcacacatcaaggctcccttgccagcagggtgctgccaataaaaggtagtcacgtggaatttggaatgtggaaaggaggtagaagtcatcctttcctcccctgtagcagcaggcgtgcaggctctggtggtcagctggactccatactcccccaccagtcaccagcctggggaccgtggggctgcaaggacctcagcagcggtgtcccaagtttcctgacttcttccatcctctggaaatcagctgtgaaggattcctaaatcccttggaattttctgcatgataggagcgtcctttgttctcatgaggtgactcttggtgggctccttatttggggactggtcaccaaaaatacctaactatggttggaagcttagtgctttcagccccattccccatcctctggggtggggagcagagctggagctcgatcatgcctgcgtgacaaagcctccagaaaaatccttgaaagacaggacatggagagctgctgggttggcgaacacatccatgtgccgggaggatggtgcaccccaactccacaaggacccttccagacctcaccctgtgtatctcttcatctggctgttcatttgtatcctttaaaatatcctttgtaataaatcagcaatagtaagtaaactattttc

SEQ ID NO: 453510 - DNA, 1009 bp, Homo sapiens
tgacgtaaaaggaaagagacggaagaggaagaattctacctgagtttgccataaagtgcctgccctctagcctctactcttccagttgcggcttattgcatcacagtaattgctgtacgaaggtcagaatcgctacctattgtccaaagcagtcgtaagaagaggtcccaatcccccactctttccgccctaatggaggtctccagtttcggtaaaagtttcatttgatctgaatagtattaaaataaaatacctggatgaggaagatgaagaggtgctggaagcccaggaagcacacatcaaggctcccttgccagcagggtgctgccaatcctcccctgtagcagcaggcgtgcaggctctggtggtcagctggactccatactcccccaccagtcaccagcctggggaccgtggggctgcaaggacctcagcagcggtgtcccaagtttcctgacttcttccatcctctggaaatcagctgtgtttgctgaggataatggcctcaagatccatctgtgttcctacaaaagagatgatcttgttcttttttatgattgcacatcttttgttctaacgtttggtccttcaccttggttcctgacacaaggattcctaaatcccttggaattttctgcatgataggagcgtcctttgttctcatgaggtgactcttggtgggctccttatttggggactggtcaccaaaaatacctaactatggttggaagcttagtgctttcagccccattccccatcctctggggtggggagcagagctggagctcgatcatgcctgcgtgacaaagcctccagaaaaatccttgaaagacaggacatggagagctgctgggttggcgaacacatccatgtgccgggaggatggtgcaccccaactccacaaggacccttccagacctcaccctgtgtatctcttcatctggctgttcatttgtatcctttaaaatatcctttgtaataaatcagcaatagtaagtaaactattttc

SEQ ID NO: 453511 - DNA, 731 bp, Homo sapiens
tgacgtaaaaggaaagagacggaagaggaagaattctacctgagtttgccataaagtgcctgccctctagcctctactcttccagttgcggcttattgcatcacagtaattgctgtacgaaggtcagaatcgctacctattgtccaaagcagtcgtaagaagaggtcccaatcccccactctttccgccctaatggaggtctccagtttcggtaaaagtttcatttgatctgaatagtattaaaataaaatacctggatgaggaagatgaagaggtgctggaagcccaggaagcacacatcaaggctcccttgccagcagggtgctgccaataaaaggtagtcacgtggaatttggaatgtggaaaggaggtagaagtcatcctttcctcccctgtagcagcaggcgtgcaggctctggtggtcagctggactccatactcccccaccagtcaccagcctggggaccgtggggctgcaaggacctcagcagcggtgtcccaagtttcctgacttcttccatcctctggaaatcagctgtggacatggagagctgctgggttggcgaacacatccatgtgccgggaggatggtgcaccccaactccacaaggacccttccagacctcaccctgtgtatctcttcatctggctgttcatttggctcagtcctttggatgttaatccacctgggctggtgcacctaaataataaagatcctcctcaatcccaaa

SEQ ID NO: 453512 - DNA, 1346 bp, Homo sapiens
tgacgtaaaaggaaagagacggaagaggaagaattctacctgagtttgccataaagtgcctgccctctagcctctactcttccagttgcggcttattgcatcacagtaattgctgtacgaaggtcagaatcgctacctattgtccaaagcagtcgtaagaagaggtcccaatcccccactctttccgccctaatggaggtctccagtttcggtaaaagtttcatttgatctgaatagtattaaaataaaatacctggatgaggaagatgaagagagatgaagtctcgctctgtcaccaggctggagtgcagtggcgtgatcttggctcactgcaacctctgcctccgggttcaagcaattctcctgcttcagcctcccgagtagcttgggactacagactagagacggggtttcactgtgttagccaggatggtctcgatcccctgacatcgtgatccgctgtcctcggtctcccaaagtgctgggattacaggcgtgagccaccgcacctggtcgattaacctcttttaagcctgttttctcatccatacaatggagataatggcagcacccactgcttggtaaggaatattaggtgaacacaggtgcctatgtgggttcctccattttccataaatgttaattcccttatccctcatctcctaggttagtcccagaggacagatttgaagttgaaaacagaaagtaactgccaaaagggattatttagggcagagattgtccccttttattatgctttaggtcctcagtggtgagggcaggggacaggagaagtgggatccagcccaaattcttggatctcatcgtagagtgactctttaggggcttaggattctgcattttggacccgtccccagggcattctgatgcctgcagttctcctgtctggctttgaataactctgggtagtgctttaaatctaagctgacataccagtgggatgtgaactgtccttgcaaatgttttgagcccttcctgcgctggcctccaactctgccttgctcagtctgtctttagctcctttccattctggccttctccctttcctttttcacttccttttttttttttttggagacaggatctcactctgttacccaggctggagtgcagtggcatgatcttcgctcactgcaagctccgcctcccgggttcaagcaattatcataccttagcctcctgagtagctgggactacaggcgcacaccaccacacccagctaatttttgtagttttagtagagatggggtttcaccatgttggccaggctggtctcaaactcctgacctcaagtgatccgcctgcctcggacactcaaagtgcta

SEQ ID NO: 453513 - DNA, 1080 bp, Homo sapiens
tgacgtaaaaggaaagagacggaagaggaagaattctacctgagtttgccataaagtgcctgccctctagcctctactcttccagttgcggcttattgcatcacagtaattgctgtacgaaggtcagaatcgctacctattgtccaaagcagtcgtaagaagaggtcccaatcccccactctttccgccctaatggaggtctccagtttcggtaaaagtttcatttgatctgaatagtattaaaataaaatacctggatgaggaagatgaagaggtgctggaagcccaggaagcacacatcaaggctcccttgccagcagggtgctgccaataaaaggtagtcacgtggaatttggaatgtggaaaggaggtagaagtcatcctttcctcccctgtagcagcaggcgtgcaggctctggtggtcagctggactccatactcccccaccagtcaccagcctggggaccgtggggctgcaaggacctcagcagcggtgtcccaagtttcctgacttcttccatcctctggaaatcagctgtgtttgctgaggataatggcctcaagatccatctgtgttcctacaaaagagatgatcttgttcttttttatgattgcacatcttttgttctaacgtttggtccttcaccttggttcctgacacaaggattcctaaatcccttggaattttctgcatgataggagcgtcctttgttctcatgaggtgactcttggtgggctccttatttggggactggtcaccaaaaatacctaactatggttggaagcttagtgctttcagccccattccccatcctctggggtggggagcagagctggagctcgatcatgcctgcgtgacaaagcctccagaaaaatccttgaaagacaggacatggagagctgctgggttggcgaacacatccatgtgccgggaggatggtgcaccccaactccacaaggacccttccagacctcaccctgtgtatctcttcatctggctgttcatttggctcagtcctttggatgttaatccacctgggctggtgcacctaaataataaagatcctcctcaatcccaaa

SEQ ID NO: 453514 - DNA, 740 bp, Homo sapiens
tgacgtaaaaggaaagagacggaagaggaagaattctacctgagtttgccataaagtgcctgccctctagcctctactcttccagttgcggcttattgcatcacagtaattgctgtacgaaggtcagaatcgctacctattgtccaaagcagtcgtaagaagaggtcccaatcccccactctttccgccctaatggaggtctccagtttcggtaaaagtttcatttgatctgaatagtattaaaataaaatacctggatgaggaagatgaagaggtgctggaagcccaggaagcacacatcaaggctcccttgccagcagggtgctgccaataaaaggtagtcacgtggaatttggaatgtggaaaggaggtagaagtcatcctttcctcccctgtagcagcaggcgtgcaggctctggtggtcagctggactccatactcccccaccagtcaccagcctggggaccgtggggctgcaaggacctcagcagcggtgtcccaagtttcctgacttcttccatcctctggaaatcagctgtggacatggagagctgctgggttggcgaacacatccatgtgccgggaggatggtgcaccccaactccacaaggacccttccagacctcaccctgtgtatctcttcatctggctgttcatttcacctcgctgctatctcaaaggttgggattacaggtgtgagcccctgtgcatcaccctcaaacttatgctagctctactcg

SEQ ID NO: 453515 - DNA, 1435 bp, Homo sapiens
tgacgtaaaaggaaagagacggaagaggaagaattctacctgagtttgccataaagtgcctgccctctagcctctactcttccagttgcggcttattgcatcacagtaattgctgtacgaaggtcagaatcgctacctattgtccaaagcagtcgtaagaagaggtcccaatcccccactctttccgccctaatggaggtctccagtttcggtaaaagtttcatttgatctgaatagtattaaaataaaatacctggatgaggaagatgaagagtagagacggggtttcactgtgttagccaggatggtctcgatcccctgacatcgtgatccgctgtcctcggtctcccaaagtgctgggattacaggcgtgagccaccgcacctggtcgattaacctcttttaagcctgttttctcatccatacaatggagataatggcagcacccactgcttggtgctggaagcccaggaagcacacatcaaggctcccttgccagcagggtgctgccaataaaaggtagtcacgtggaatttggaatgtggaaaggaggtagaagtcatcctttcctcccctgtagcagcaggcgtgcaggctctggtggtcagctggactccatactcccccaccagtcaccagcctggggaccgtggggctgcaaggacctcagcagcggtgtcccaagtttcctgacttcttccatcctctggaaatcagctgtggtaaagtagcctgaaagccagtggtacaaccccctccccacaaccttcaccacctctagcccctccaatgaaaagcactaattgcctatatacaacccctttttgtttgaaatatctagagtaatttctgttttcctatctggggtagtgtaacgtaagaagaaatatacatttggtctctgcccccggttcctaacacaaagctcctaaaacccttggaaattcctgaaagatgggggtgctaggagcattgtctttttttttttttaaatttatcatttttcttttctcccaggtgttttttccttttttttttttttaacttttattttagattaggggatacatgtgaacgtttgttatatagctaaacttgtgtcacatgggtttgttgtacagattatttcgtcacccaggcactaggcctaatacccgatagtttttttctttttttttttttgagactagagcgagactccatctcaataaaaaaaataaagtgaattttcctccatcttgtaagggcgaaaagccccctaccatgtctgaatgaacattcatgcatgggcttgagggcttgggaaaaagacagggcttggccacacagtgcaggtaggcccagtgatcctatgagaggggccaggaggtggtaggtcccctgtgggcaggaggtcaagtatgtggtattatacttgatgaaccaggggagaggg

SEQ ID NO: 453516 - DNA, 1387 bp, Homo sapiens
tgacgtaaaaggaaagagacggaagaggaagaattctacctgagtttgccataaagtgcctgccctctagcctctactcttccagttgcggcttattgcatcacagtaattgctgtacgaaggtcagaatcgctacctattgtccaaagcagtcgtaagaagaggtcccaatcccccactctttccgccctaatggaggtctccagtttcggtaaaagtttcatttgatctgaatagtattaaaataaaatacctggatgaggaagatgaagaggtgctggaagcccaggaagcacacatcaaggctcccttgccagcagggtgctgccaataaaaggtagtcacgtggaatttggaatgtggaaaggaggtagaagtcatcctttcctcccctgtagcagcaggcgtgcaggctctggtggtcagctggactccatactcccccaccagtcaccagcctggggaccgtggggctgcaaggacctcagcagcggtgtcccaagtttcctgacttcttccatcctctggaaatcagctgtgtttgctgaggataatggcctcaagatccatctgtgttcctacaaaagagatgatcttgttcttttttatgattgcacatcttttgttctaacgtttggtccttcaccttggttcctgacacaaggattcctaaatcccttggaattttctgcatgataggagcgtcctttgttctcatgaggtgactcttggtgggctccttatttggggactggtcaccaaaaatacctaactatggttggaagcttagtgctttcagccccattccccatcctctggggtggggagcagagctggagctcgatcatgcctgcgtgacaaagcctccagaaaaatccttgaaagacaggacatggagagctgctgggttggcgaacacatccatgtgccgggaggatggtgcaccccaactccacaaggacccttccagacctcaccctgtgtatctcttcatctggctgttcatttagcagctccgagggcaggcatggtggctcatgcctgtagtcccagcactttgggaggccgaggcaggtggttcatctaaggtctggagttcgagaccagcctggccaacatagcgagagcagctccggtggcgggaggagtggcagcggccaggcagcccagcttcgcgaaggctgtaggcacaccgcggccagcaggcacctggcacccaccttccctgctgccaggatgcccaagaaaaaggtcagctccaccgaaggggctgccatggaagagcccaagaggagatcagcgcaattgtcagctaaacctcctgcaaaagtggaagcgaagccgaaaaaggcagcagcgaaggataaattttcagacacaaaagtgc

SEQ ID NO: 453517 - DNA, 2029 bp, Homo sapiens
cctgcgcgccgctggccgacggaggggagcctgccgatgccgagcgggtgctacgtcccgcggtcggagccgcgtcttctcccggctccgccaccagccggggctcgggtgggggcccggggccccggggcatggccctccggagtgcgcagggcgacggccccacctccggccactgggacggcggcgcggagaaggcagactttaacgccaaaaggaaaaagaaagtggcagagatacaccaggctctgaacagtgatcccactgatgtggctgcccttagacgcatggctatcagtgaaggagggctcctgactgatgagatcagacgaaaagtgtggcccaagctcctcaatgtcaatgccaatgacccacctcctatatcagggaagaacctacggcagatgagcaaggactaccaacaagtgttgctggacgtccggcggtcattgcggcggttccctcctggcatgccagaggaacagagagaagggctccaggaagaactgattgacatcatcctcctcatcttggagcgcaaccctcagctgcactactaccagggctaccatgacattgtggtcacatttctgctggtggtaggcgagaggctggcaacatccctggtagaaaaattatctacccaccacctcagggattttatggatccaacaatggacaacaccaagcatatattaaactatctgatgcccatcattgaccaggtgaatccagagctccatgacttcatgcagagtgctgaggtagggaccatctttgccctcagctggctcatcacctggtttgggcatgtcctgtctgacttcaggcacgtcgtgcggttatatgacttcttcctggcctgccacccactgatgccgatttactttgcagccgtgattgtgttgtatcgcgagcaggaagtcctggactgtgactgtgacatggcctcggtccaccacctgttgtcccagatccctcaggacttgccctatgagacactgatcagcagagcaggagacctttttgttcagtttcccccatccgaacttgctcgggaggccgctgcccaacagcaagctgagaggacggcagcctctactttcaaagactttgagctggcatcagcccagcagaggcctgatatggtgctgcggcagcggtttcggggacttctgcggcctgaagatcgaacaaaagatgtcctgaccaagccaaggaccaaccgctttgtgaaattggcagtgatggggctgacagtggcacttggagcggctgcactggctgtggtgaaaagtgccctggaatgggcccctaagtttcagctgcagctgtttccctgaaagccagagaagaccttcctcttacatcacattaaggcacccactcactaccttggcgtcgttttttgggtctgacttgactcgtcaactgctggtctctcccacctggttggaaatgtcgttggaaacttgcaaagactctccagaccttagggaacaagaggcatcactcagtccttctgggacagcttccctgcctcagaaaacggaatctctgtctgtgaccttctcctgccccatttcacttgctcaacaccagactttaatctgactgtagctcataagaccctcattccagagagggtgctgccccatacccggaaggaggaacgctgcacagagaggccaagaagcatctggacagacaggccttgctgggtttagaccttatgctttttgtccagtttcatctcaacacagctgccatgcttcagccatgcctatccaatgacgtctccataaaaggcccaggaacacgggagcttctgaagagctgaacatgtggagggaggggaacgagaacttgtccatgtgccaagagggtggcgcacccccactccatggggacagaagctccagcatttgcccaggacccgtccagacctcaccctgtgtgtatcttcatctggctgtttacttatttgtatccttttctaataacgtttgtaataaactggtaaacataa

SEQ ID NO: 453518 - DNA, 688 bp, Homo sapiens
tacctagttcgtctagtggtgactcgtggccgctagttagtgttcgctgaagattggtgtcgtattcactggtgtcgccttaggcaaactcctggctaatcgacctacgttgcgtctgcgtttcatcaccaaataaaagaatcgccacggggagtggaattccagtatgctgctactggatctaagtcgcccatggtgggtgctgtaggtcgttaattcgtggatcgtattaatatggaatcacgatggtgaatttcgttatcggacattaggacactgttctggaggtgatgatgcggcagatattcccagtgctctcccaaagcaagctggccctcttgtcatcctctcagtgggcggcaccagctgcccctccttccacaagtactcaagcctgtttgtaaatactgaaggaattgatggggttgaggaaaggaggtgcatgtgaccagggtcccaaggccacagcttttcagatcctaggaagcaagtggcatttgcttgagttgtggcctcggaaggagaatgtttatctgttttctaactttgctgacaccaggattctccctgtcattgagaagaaagcattatctaattaccttcaggtggtttacttattctgtaaagaatatgtgtaaatattttgtacagagccctgtatcaaataaacagccatatgtggttacta

SEQ ID NO: 453519 - DNA, 4378 bp, Homo sapiens
cctgcgcgccgctggccgacggaggggagcctgccgatgccgagcgggtgctacgtcccgcggtcggagccgcgtcttctcccggctccgccaccagccggggctcgggtgggggcccggggccccggggcatggccctccggagtgcgcagggcgacggccccacctccggccactgggacggcggcgcggagaaggcagactttaacgccaaaaggaaaaagaaagtggcagagatacaccaggctctgaacagtgatcccactgatgtggctgcccttagacgcatggctatcagtgaaggagggctcctgactgatgagatcagacgaaaagtgtggcccaagctcctcaatgtcaatgccaatgacccacctcctatatcagggaagaacctacggcagatgagcaaggactaccaacaagtgttgctggacgtccggcggtcattgcggcggttccctcctggcatgccagaggaacagagagaagggctccaggaagaactgattgacatcatcctcctcatcttggagcgcaaccctcagctgcactactaccagggctaccatgacattgtggtcacatttctgctggtggtaggcgagaggctggcaacatccctggtagaaaaattatctacccaccacctcagggattttatggatccaacaatggacaacaccaagcatatattaaactatctgatgcccatcattgaccaggtgaatccagagctccatgacttcatgcagaggcacgtcgtgcggttatatgacttcttcctggcctgccacccactgatgccgatttactttgcagccgtgattgtgttgtatcgcgagcaggaagtcctggactgtgactgtgacatggcctcggtccaccacctgttgtcccagatccctcaggacttgccctatgagacactgatcagcagagcaggagacctttttgttcagtttcccccatccgaacttgctcgggaggccgctgcccaacagcaagctgagaggacggcagcctctactttcaaagactttgagctggcatcagcccagcagaggcctgatatggtgctgcggcagcggtttcggggacttctgcggcctgaagatcgaacaaaagatgtcctgaccaagccaaggaccaaccgctttgtgaaattggcagtgatggggctgacagtggcacttggagcggctgcactggctgtggtgaaaagtgccctggaatgggcccctaagtttcagctgcagctgtttccctgaaagccagagaagaccttcctcttacatcacattaaggtctcacccttccatggaaggattgggaggggtggaatttcctttattaaaagggtttctgtccagagttttttattcctgccaccctgccctgcccgtttgtgtttgcctttacttcagaggccaatagcagagcctacctgacacagaggggacctgggggcctggcacagaatcttatgcctctcccagtgggcttttggatgggctctctgccacctccctggtgttggaggaagtgggtttctgaagcttgcagctgcttttgcaacctgctgggcctgggctgccctagttaccgggaacctcctagtcaccccatagaaggtgaactggaacatgggatgccctcttactgctcctgcttgcctgcatcagatggacacagaaggagggggctgctgctgaaggagtcaggcttgggatggagagcaagaggccaaaggactcgtctgggagcatgatcggcccctcttactagcagctccatcagctgatcagaaatcagagacagaagggaactaggttactcgttaaatcctacctattttcagcctagaaatcacatgggcgtttccagtcaagtgggaaggaagctcatttttagggcctagacctagactagttttgcctgcctttttttcctccctgctttcttctacaagccacacaacattgcttataaaaggtacttttattactatttttagaatatatacaccccatatgtaaattaccctcacttttaaagtaataatagttccttcacggaaaaaaaaatagttctcatcagaaggatgagcttctaagatcctgaattttactttctacttgattaacattttcgctttagccagagttgctatttgcaaacagctttccacttccaaagtgccactttctgaccggtttttcttcctgttttcctcaaatcatcctactcccaaataggcacccactcactaccttggcgtcgttttttgggtctgacttgactcgtcaactgctggtctctcccacctggttggaaatgtcgttggaaacttgcaaagactctccagaccttagggaacaagaggcatcactcagtccttctgggacagcttccctgtaagcaaagccaggtttgttttagattcactctggcctgaaaaaaaaagtgccttttgctgctttaaagaattggggtatatggtatgaagcagccatgtacttgtattttcctggtctttcctgggcactcttctctcttggcagatgttttcttaaagtgaacacaccagaagcactctaccccaccatatccagtcctctttgcatgcctgttgtgtgcagggtggagggtgtcccacgtgccagagcagctgggagccctgtccgctgagttacactaagcactttatttttatttattttattattattttcttttttctgagatggagtctcactctgttgcccaggctggagtgcagtggtgcagtctcagctcactgcaacctccgcctcccaagttcaggcaattctcgctgcctctagcctcccgagtagctgggactacaggcacctgctaccacgcctgactaatttttgtatttttagtagagatggggtttcgccacgttggccaggctggtctcgaactcctgacctcaggtgatctgcccgtctcgtcctcccaaagtgctgggattacaggtgtgagccaccacgcccagccaccactacgcactttaaaaccaaaaaaagctcaaagggatggatcattgtccatggctcaggagccccactgtggggtaagtgtgatgtcgatggattaatttagacagtggtgtattcatcagggcaaaggaaattcttccagaggtgatgatgcggcagatattcccagtgctctcccaaagcaagctggccctcttgtcatcctctcagtgggcggcaccagctgcccctccttccacaagtactcaagcctgtttgtaaatactgaaggaattgatggggttgaggaaaggaggtgcatgtgaccagggtcccaaggccacagcttttcagatcctaggaagcaagtggcatttgcttgagttgtggcctcggaaggagaatgtttatctgttttctaactttgctgacaccaggattctccctgtcattgagaagaaagcattatctaattaccttcaggtggtttacttattctgtaaagaatatgtgtaaatattttgtacagagccctgtatcaaataaacagccatatgtggttactaatcacctcttctgtcattccgtccttggccaccgctcagtgggaatggtctctgatctggatgctcccaccttccatgtcaggcccagaactgtgccatggtctgtggactcctggtcagccttgactggctaggagaccttgggcagtacctacagtcttgctgtttctgtttcatctgcaagaattatgacccacacactccagctgcagcccagggcactgtgatattttatacgtgtgtagatgtttttgtccacagttcctggttcatcactcccataaccctttgttataatgttgggacactgcaggcctcagaaaacggaatctctgtctgtgaccttctcctgccccatttcacttgctcaacaccagactttaatctgactgtagctcataagaccctcattccagagagggtgctgccccatacccggaaggaggaacgctgcacagagaggccaagaagcatctggacagacaggccttgctgggtttagaccttatgctttttgtccagtttcatctcaacacagctgccatgcttcagccatgcctatccaatgacgtctccataaaaggcccaggaacacgggagcttctgaagagctgaacatgtggagggaggggaacgagaacttgtccatgtgccaagagggtggcgcacccccactccatggggacagaagctccagcatttgcccaggacccgtccagacctcaccctgtgtgtatcttcatctggctgtttacttatttgtatccttttctaataacgtttgtaataaactggtaaacataa

SEQ ID NO: 453520 - DNA, 2558 bp, Homo sapiens
atcatggagcgctctccgatctcgtcccggtcttccttctcctggaagttggctgtcgcgcatcgcggacgatcccctcccgtctgtgtcgtggcccgcattgtcctcagctcgatatttctattcattctcctatagttttttccgtgtttacaaacaacattgcttataaaaggtacttttattactatttttagaatatatacaccccatatgtaaattaccctcacttttaaagtaataatagttccttcacggaaaaaaaaatagttctcatcagaaggatgagcttctaagatcctgaattttactttctacttgattaacattttcgctttagccagagttgctatttgcaaacagctttccacttccaaagtgccactttctgaccggtttttcttcctgttttcctcaaatcatcctactcccaaataggcacccactcactaccttggcgtcgttttttgggtctgacttgactcgtcaactgctggtctctcccacctggttggaaatgtcgttggaaacttgcaaagactctccagaccttagggaacaagaggcatcactcagtccttctgggacagcttccctgtaagcaaagccaggtttgttttagattcactctggcctgaaaaaaaaagtgccttttgctgctttaaagaattggggtatatggtatgaagcagccatgtacttgtattttcctggtctttcctgggcactcttctctcttggcagatgttttcttaaagtgaacacaccagaagcactctaccccaccatatccagtcctctttgcatgcctgttgtgtgcagggtggagggtgtcccacgtgccagagcagctgggagccctgtccgctgagttacactaagcactttatttttatttattttattattattttcttttttctgagatggagtctcactctgttgcccaggctggagtgcagtggtgcagtctcagctcactgcaacctccgcctcccaagttcaggcaattctcgctgcctctagcctcccgagtagctgggactacaggcacctgctaccacgcctgactaatttttgtatttttagtagagatggggtttcgccacgttggccaggctggtctcgaactcctgacctcaggtgatctgcccgtctcgtcctcccaaagtgctgggattacaggtgtgagccaccacgcccagccaccactacgcactttaaaaccaaaaaaagctcaaagggatggatcattgtccatggctcaggagccccactgtggggtaagtgtgatgtcgatggattaatttagacagtggtgtattcatcagggcaaaggaaattcttccagaggtgatgatgcggcagatattcccagtgctctcccaaagcaagctggccctcttgtcatcctctcagtgggcggcaccagctgcccctccttccacaagtactcaagcctgtttgtaaatactgaaggaattgatggggttgaggaaaggaggtgcatgtgaccagggtcccaaggccacagcttttcagatcctaggaagcaagtggcatttgcttgagttgtggcctcggaaggagaatgtttatctgttttctaactttgctgacaccaggattctccctgtcattgagaagaaagcattatctaattaccttcaggtggtttacttattctgtaaagaatatgtgtaaatattttgtacagagccctgtatcaaataaacagccatatgtggttactaatcacctcttctgtcattccgtccttggccaccgctcagtgggaatggtctctgatctggatgctcccaccttccatgtcaggcccagaactgtgccatggtctgtggactcctggtcagccttgactggctaggagaccttgggcagtacctacagtcttgctgtttctgtttcatctgcaagaattatgacccacacactccagctgcagcccagggcactgtgatattttatacgtgtgtagatgtttttgtccacagttcctggttcatcactcccataaccctttgttataatgttgggacactgcaggcctcagaaaacggaatctctgtctgtgaccttctcctgccccatttcacttgctcaacaccagactttaatctgactgtagctcataagaccctcattccagagagggtgctgccccatacccggaaggaggaacgctgcacagagaggccaagaagcatctggacagacaggccttgctgggtttagaccttatgctttttgtccagtttcatctcaacacagctgccatgcttcagccatgcctatccaatgacgtctccataaaaggcccaggaacacgggagcttctgaagagctgaacatgtggagggaggggaacgagaacttgtccatgtgccaagagggtggcgcacccccactccatggggacagaagctccagcatttgcccaggacccgtccagacctcaccctgtgtgtatcttcatctggctgtttacttatttgtatccttttctaataacgtttgtaataaactggtaaacataa

SEQ ID NO: 453521 - DNA, 3646 bp, Homo sapiens
cctgcgcgccgctggccgacggaggggagcctgccgatgccgagcgggtgctacgtcccgcggtcggagccgcgtcttctcccggctccgccaccagccggggctcgggtgggggcccggggccccggggcatggccctccggagtgcgcagggcgacggccccacctccggccactgggacggcggcgcggagaaggcagactttaacgccaaaaggaaaaagaaagtggcagagatacaccaggctctgaacagtgatcccactgatgtggctgcccttagacgcatggctatcagtgaaggagggctcctgactgatgagatcagacgaaaagtgtggcccaagctcctcaatgtcaatgccaatgacccacctcctatatcagggaagaacctacggcagatgagcaaggactaccaacaagtgttgctggacgtccggcggtcattgcggcggttccctcctggcatgccagaggaacagagagaagggctccaggaagaactgattgacatcatcctcctcatcttggagcgcaaccctcagctgcactactaccagggctaccatgacattgtggtcacatttctgctggtggtaggcgagaggctggcaacatccctggtagaaaaattatctacccaccacctcagggattttatggatccaacaatggacaacaccaagcatatattaaactatctgatgcccatcattgaccaggtgaatccagagctccatgacttcatgcagagtgctgaggtagggaccatctttgccctcagctggctcatcacctggtttgggcatgtcctgtctgacttcaggcacgtcgtgcggttatatgacttcttcctggcctgccacccactgatgccgatttactttgcagccgtgattgtgttgtatcgcgagcaggaagtcctggactgtgactgtgacatggcctcggtccaccacctgttgtcccagatccctcaggacttgccctatgagacactgatcagcagagcaggagacctttttgttcagtttcccccatccgaacttgctcgggaggccgctgcccaacagcaagctgagaggacggcagcctctactttcaaagactttgagctggcatcagcccagcagaggcctgatatggtgctgcggcagcggtttcggggacttctgcggcctgaagatcgaacaaaagatgtcctgaccaagccaaggaccaaccgctttgtgaaattggcagtgatggggctgacagtggcacttggagcggctgcactggctgtggtgaaaagtgccctggaatgggcccctaagtttcagctgcagctgtttccctgaaagccagagaagaccttcctcttacatcacattaaggtctcacccttccatggaaggattgggaggggtggaatttcctttattaaaagggtttctgtccagagttttttattcctgccaccctgccctgcccgtttgtgtttgcctttacttcagaggccaatagcagagcctacctgacacagaggggacctgggggcctggcacagaatcttatgcctctcccagtgggcttttggatgggctctctgccacctccctggtgttggaggaagtgggtttctgaagcttgcagctgcttttgcaacctgctgggcctgggctgccctagttaccgggaacctcctagtcaccccatagaaggtgaactggaacatgggatgccctcttactgctcctgcttgcctgcatcagatggacacagaaggagggggctgctgctgaaggagtcaggcttgggatggagagcaagaggccaaaggactcgtctgggagcatgatcggcccctcttactagcagctccatcagctgatcagaaatcagagacagaagggaactaggttactcgttaaatcctacctattttcagcctagaaatcacatgggcgtttccagtcaagtgggaaggaagctcatttttagggcctagacctagactagttttgcctgcctttttttcctccctgctttcttctacaagccacacaacattgcttataaaaggtacttttattactatttttagaatatatacaccccatatgtaaattaccctcacttttaaagtaataatagttccttcacggaaaaaaaaatagttctcatcagaaggatgagcttctaagatcctgaattttactttctacttgattaacattttcgctttagccagagttgctatttgcaaacagctttccacttccaaagtgccactttctgaccggtttttcttcctgttttcctcaaatcatcctactcccaaataggcacccactcactaccttggcgtcgttttttgggtctgacttgactcgtcaactgctggtctctcccacctggttggaaatgtcgttggaaacttgcaaagactctccagaccttagggaacaagaggcatcactcagtccttctgggacagcttccctgtaagcaaagccaggtttgttttagattcactctggcctgaaaaaaaaagtgccttttgctgctttaaagaattggggtatatggtatgaagcagccatgtacttgtattttcctggtctttcctgggcactcttctctcttggcagatgttttcttaaagtgaacacaccagaagcactctaccccaccatatccagtcctctttgcatgcctgttgtgtgcagggtggagggtgtcccacgtgccagagcagctgggagccctgtccgctgagttacactaagcactttatttttatttattttattattattttcttttttctgagatggagtctcactctgttgcccaggctggagtgcagtggtgcagtctcagctcactgcaacctccgcctcccaagttcaggcaattctcgctgcctctagcctcccgagtagctgggactacaggcacctgctaccacgcctgactaatttttgtatttttagtagagatggggtttcgccacgttggccaggctggtctcgaactcctgacctcaggtgatctgcccgtctcgtcctcccaaagtgctgggattacaggtgtgagccaccacgcccagccaccactacgcactttaaaaccaaaaaaagctcaaagggatggatcattgtccatggctcaggagccccactgtggggtaagtgtgatgtcgatggattaatttagacagtggtgtattcatcagggcaaaggaaattcttccagaggtgatgatgcggcagatattcccagtgctctcccaaagcaagctggccctcttgtcatcctctcagtgggcggcaccagctgcccctccttccacaagtactcaagcctgtttgtaaatactgaaggaattgatggggttgaggaaaggaggtgcatgtgaccagggtcccaaggccacagcttttcagatcctaggaagcaagtggcatttgcttgagttgtggcctcggaaggagaatgtttatctgttttctaactttgctgacaccaggattctccctgtcattgagaagaaagcattatctaattaccttcaggtggtttacttattctgtaaagaatatgtgtaaatattttgtacagagccctgtatcaaataaacagccatatgtggttacta

SEQ ID NO: 453522 - DNA, 3013 bp, Homo sapiens
cctgcgcgccgctggccgacggaggggagcctgccgatgccgagcgggtgctacgtcccgcggtcggagccgcgtcttctcccggctccgccaccagccggggctcgggtgggggcccggggccccggggcatggccctccggagtgcgcagggcgacggccccacctccggccactgggacggcggcgcggagaaggcagactttaacgccaaaaggaaaaagaaagtggcagagatacaccaggctctgaacagtgatcccactgatgtggctgcccttagacgcatggctatcagtgaaggagggctcctgactgatgagatcagacgaaaagtgtggcccaagctcctcaatgtcaatgccaatgacccacctcctatatcagggaagaacctacggcagatgagcaaggactaccaacaagtgttgctggacgtccggcggtcattgcggcggttccctcctggcatgccagaggaacagagagaagggctccaggaagaactgattgacatcatcctcctcatcttggagcgcaaccctcagctgcactactaccagggctaccatgacattgtggtcacatttctgctggtggtaggcgagaggctggcaacatccctggtagaaaaattatctacccaccacctcagggattttatggatccaacaatggacaacaccaagcatatattaaactatctgatgcccatcattgaccaggtgaatccagagctccatgacttcatgcagagtgctgaggtagggaccatctttgccctcagctggctcatcacctggtttgggcatgtcctgtctgacttcaggcacgtcgtgcggttatatgacttcttcctggcctgccacccactgatgccgatttactttgcagccgtgattgtgttgtatcgcgagcaggaagtcctggactgtgactgtgacatggcctcggtccaccacctgttgtcccagatccctcaggacttgccctatgagacactgatcagcagagcaggagacctttttgttcagtttcccccatccgaacttgctcgggaggccgctgcccaacagcaagctgagaggacggcagcctctactttcaaagactttgagctggcatcagcccagcagaggcctgatatggtgctgcggcagcggtttcggggacttctgcggcctgaagatcgaacaaaagatgtcctgaccaagccaaggaccaaccgctttgtgaaattggcagtgatggggctgacagtggcacttggagcggctgcactggctgtggtgaaaagtgccctggaatgggcccctaagtttcagctgcagctgtttccctgaaagccagagaagaccttcctcttacatcacattaaggtctcacccttccatggaaggattgggaggggtggaatttcctttattaaaagggtttctgtccagagttttttattcctgccaccctgccctgcccgtttgtgtttgcctttacttcagaggccaatagcagagcctacctgacacagaggggacctgggggcctggcacagaatcttatgcctctcccagtgggcttttggatgggctctctgccacctccctggtgttggaggaagtgggtttctgaagcttgcagctgcttttgcaacctgctgggcctgggctgccctagttaccgggaacctcctagtcaccccatagaaggtgaactggaacatgggatgccctcttactgctcctgcttgcctgcatcagatggacacagaaggagggggctgctgctgaaggagtcaggcttgggatggagagcaagaggccaaaggactcgtctgggagcatgatcggcccctcttactagcagctccatcagctgatcagaaatcagagacagaagggaactaggttactcgttaaatcctacctattttcagcctagaaatcacatgggcgtttccagtcaagtgggaaggaagctcatttttagggcctagacctagactagttttgcctgcctttttttcctccctgctttcttctacaagccacacaacattgcttataaaaggtacttttattactatttttagaatatatacaccccatatgtaaattaccctcacttttaaagtaataatagttccttcacggaaaaaaaaatagttctcatcagaaggatgagcttctaagatcctgaattttactttctacttgattaacattttcgctttagccagagttgctatttgcaaacagctttccacttccaaagtgccactttctgaccggtttttcttcctgttttcctcaaatcatcctactcccaaataggcacccactcactaccttggcgtcgttttttgggtctgacttgactcgtcaactgctggtctctcccacctggttggaaatgtcgttggaaacttgcaaagactctccagaccttagggaacaagaggcatcactcagtccttctgggacagcttccctgtaagcaaagccaggtttgttttagattcactctggcctgaaaaaaaaagtgccttttgctgctttaaagaattggggtatatggtatgaagcagccatgtacttgtattttcctggtctttcctgggcactcttctctcttggcagatgttttcttaaagtgaacacaccagaagcactctaccccaccatatccagtcctctttgcatgcctgttgtgtgcagggtggagggtgtcccacgtgccagagcagctgggagccctgtccgctgagttacactaagcactttatttttatttattttattattattttcttttttctgagatggagtctcactctgttgcccaggctggagtgcagtggtgcagtctcagctcactgcaacctccgcctcccaagttcaggcaattctcgctgcctctacttggggagctgagacaagaatcgcttgaacccgggagttggaggttgcagtgagctgcactccagcctggcgacagagagagattccatcttaaa

SEQ ID NO: 453523 - DNA, 1320 bp, Homo sapiens
cctgcgcgccgctggccgacggaggggagcctgccgatgccgagcgggtgctacgtcccgcggtcggagccgcgtcttctcccggctccgccaccagccggggctcgggtgggggcccggggccccggggcatggccctccggagtgcgcagggcgacggccccacctccggccactgggacggcggcgcggagaaggcagactttaacgccaaaaggaaaaagaaagtggcagagatacaccaggctctgaacagtgatcccactgatgtggctgcccttagacgcatggctatcagtgaaggagggctcctgactgatgagatcagacgaaaagtgtggcccaagctcctcaatgtcaatgccaatgacccacctcctatatcagggaagaacctacggcagatgagcaaggactaccaacaagtgttgctggacgtccggcggtcattgcggcggttccctcctggtgagaagctctcccggtcctgccacatttggaaagactgtatctgttccaggtcataccatgtgacctaatatgctggaccctgccgcctcagggaccttcagagctctccttttgctgagtcatccttttcttgactggtcactttcagacccccactgtgaaagcctgaaccaaaaataatttctcctggcctagaggtggtgaatgagagaagaggtttttgtttttccttgaagccacaaaaaggagttaataaggattgttagagccatcagtctggcattaaagagcagattggtgtggaattgggcaccaacaagaatgagtaatatcttaattaggtttaaaaacgatggtaccttgcgcatacatatgtaagattccttagagggaagagaggccattccctgtttgtgtaagagtatattccttaattaacaaattaagcagcaatagataaaaaaataaataaataaaaacaaaacaaacaaacaaaaaagaatgtattcctaaaattacctctttatttcaggaagaaagaaaagaaggaccgttgtctcaattttcacagtgaagggaactgggcaacaaacctcacatggatgacctatttttcttcctctggcaactccacctttaggtcatgaagagaggagaattgctaaagggaacaggagcctctaagctggctgcctccctcttctgcactgtgctctggcctggcttttgttgttgaaggggctgctttcctgctggcattcttgctccctggacagattcttgcaatacccaggtagcagtagcctgccagcgtggttttgataaaagcacatgcccacggtccattcc

SEQ ID NO: 453524 - DNA, 261 bp, Homo sapiens
attatctacccaccacctcaggtaccagtagagaggaacacaagacgacgggcatcactcctcagccgtcctggggataactcactggcctgttttctggtcagcttttttaggagtttgagccctcgccaccctgagccctgatctaagtgtttggtaaccaggcttattgaattgtctccctccagggattttatggatccaacaatggacaacaccaagcatatattaaactatctgatgcccatcattgaccaggtg

SEQ ID NO: 453525 - DNA, 428 bp, Homo sapiens
gtttcccccatccgaacttgctcgggaggccgctgcccaacagcaagctgagaggtgagcaaggctgggacactggttgaatgggggtggctgtaaatgagcagaagcgagggaaggtttgtgtctggtgggatagggttggggcatgtttccagagatctgagcttaggccagtggaatccccactgtagacatatgggtctttatcataaagagctttcccagcaatgaaaggctctgcccgcagcctatgtggtgtagttttgctttcctcctcctctttcataccacttccttccttccgtctctttcccctgcaggacggcagcctctactttcaaagactttgagctggcatcagcccagcagaggcctgatatggtgctgcggcagcggtttcggggacttctgcggcctgaagatcgaac

SEQ ID NO: 453526 - DNA, 4450 bp, Homo sapiens
cctgcgcgccgctggccgacggaggggagcctgccgatgccgagcgggtgctacgtcccgcggtcggagccgcgtcttctcccggctccgccaccagccggggctcgggtgggggcccggggccccggggcatggccctccggagtgcgcagggcgacggccccacctccggccactgggacggcggcgcggagaaggcagactttaacgccaaaaggaaaaagaaagtggcagagatacaccaggctctgaacagtgatcccactgatgtggctgcccttagacgcatggctatcagtgaaggagggctcctgactgatgagatcagacgaaaagtgtggcccaagctcctcaatgtcaatgccaatgacccacctcctatatcagggaagaacctacggcagatgagcaaggactaccaacaagtgttgctggacgtccggcggtcattgcggcggttccctcctggcatgccagaggaacagagagaagggctccaggaagaactgattgacatcatcctcctcatcttggagcgcaaccctcagctgcactactaccagggctaccatgacattgtggtcacatttctgctggtggtaggcgagaggctggcaacatccctggtagaaaaattatctacccaccacctcagggattttatggatccaacaatggacaacaccaagcatatattaaactatctgatgcccatcattgaccaggtgaatccagagctccatgacttcatgcagagtgctgaggtagggaccatctttgccctcagctggctcatcacctggtttgggcatgtcctgtctgacttcaggcacgtcgtgcggttatatgacttcttcctggcctgccacccactgatgccgatttactttgcagccgtgattgtgttgtatcgcgagcaggaagtcctggactgtgactgtgacatggcctcggtccaccacctgttgtcccagatccctcaggacttgccctatgagacactgatcagcagagcaggagacctttttgttcagtttcccccatccgaacttgctcgggaggccgctgcccaacagcaagctgagaggacggcagcctctactttcaaagactttgagctggcatcagcccagcagaggcctgatatggtgctgcggcagcggtttcggggacttctgcggcctgaagatcgaacaaaagatgtcctgaccaagccaaggaccaaccgctttgtgaaattggcagtgatggggctgacagtggcacttggagcggctgcactggctgtggtgaaaagtgccctggaatgggcccctaagtttcagctgcagctgtttccctgaaagccagagaagaccttcctcttacatcacattaaggtctcacccttccatggaaggattgggaggggtggaatttcctttattaaaagggtttctgtccagagttttttattcctgccaccctgccctgcccgtttgtgtttgcctttacttcagaggccaatagcagagcctacctgacacagaggggacctgggggcctggcacagaatcttatgcctctcccagtgggcttttggatgggctctctgccacctccctggtgttggaggaagtgggtttctgaagcttgcagctgcttttgcaacctgctgggcctgggctgccctagttaccgggaacctcctagtcaccccatagaaggtgaactggaacatgggatgccctcttactgctcctgcttgcctgcatcagatggacacagaaggagggggctgctgctgaaggagtcaggcttgggatggagagcaagaggccaaaggactcgtctgggagcatgatcggcccctcttactagcagctccatcagctgatcagaaatcagagacagaagggaactaggttactcgttaaatcctacctattttcagcctagaaatcacatgggcgtttccagtcaagtgggaaggaagctcatttttagggcctagacctagactagttttgcctgcctttttttcctccctgctttcttctacaagccacacaacattgcttataaaaggtacttttattactatttttagaatatatacaccccatatgtaaattaccctcacttttaaagtaataatagttccttcacggaaaaaaaaatagttctcatcagaaggatgagcttctaagatcctgaattttactttctacttgattaacattttcgctttagccagagttgctatttgcaaacagctttccacttccaaagtgccactttctgaccggtttttcttcctgttttcctcaaatcatcctactcccaaataggcacccactcactaccttggcgtcgttttttgggtctgacttgactcgtcaactgctggtctctcccacctggttggaaatgtcgttggaaacttgcaaagactctccagaccttagggaacaagaggcatcactcagtccttctgggacagcttccctgtaagcaaagccaggtttgttttagattcactctggcctgaaaaaaaaagtgccttttgctgctttaaagaattggggtatatggtatgaagcagccatgtacttgtattttcctggtctttcctgggcactcttctctcttggcagatgttttcttaaagtgaacacaccagaagcactctaccccaccatatccagtcctctttgcatgcctgttgtgtgcagggtggagggtgtcccacgtgccagagcagctgggagccctgtccgctgagttacactaagcactttatttttatttattttattattattttcttttttctgagatggagtctcactctgttgcccaggctggagtgcagtggtgcagtctcagctcactgcaacctccgcctcccaagttcaggcaattctcgctgcctctagcctcccgagtagctgggactacaggcacctgctaccacgcctgactaatttttgtatttttagtagagatggggtttcgccacgttggccaggctggtctcgaactcctgacctcaggtgatctgcccgtctcgtcctcccaaagtgctgggattacaggtgtgagccaccacgcccagccaccactacgcactttaaaaccaaaaaaagctcaaagggatggatcattgtccatggctcaggagccccactgtggggtaagtgtgatgtcgatggattaatttagacagtggtgtattcatcagggcaaaggaaattcttccagaggtgatgatgcggcagatattcccagtgctctcccaaagcaagctggccctcttgtcatcctctcagtgggcggcaccagctgcccctccttccacaagtactcaagcctgtttgtaaatactgaaggaattgatggggttgaggaaaggaggtgcatgtgaccagggtcccaaggccacagcttttcagatcctaggaagcaagtggcatttgcttgagttgtggcctcggaaggagaatgtttatctgttttctaactttgctgacaccaggattctccctgtcattgagaagaaagcattatctaattaccttcaggtggtttacttattctgtaaagaatatgtgtaaatattttgtacagagccctgtatcaaataaacagccatatgtggttactaatcacctcttctgtcattccgtccttggccaccgctcagtgggaatggtctctgatctggatgctcccaccttccatgtcaggcccagaactgtgccatggtctgtggactcctggtcagccttgactggctaggagaccttgggcagtacctacagtcttgctgtttctgtttcatctgcaagaattatgacccacacactccagctgcagcccagggcactgtgatattttatacgtgtgtagatgtttttgtccacagttcctggttcatcactcccataaccctttgttataatgttgggacactgcaggcctcagaaaacggaatctctgtctgtgaccttctcctgccccatttcacttgctcaacaccagactttaatctgactgtagctcataagaccctcattccagagagggtgctgccccatacccggaaggaggaacgctgcacagagaggccaagaagcatctggacagacaggccttgctgggtttagaccttatgctttttgtccagtttcatctcaacacagctgccatgcttcagccatgcctatccaatgacgtctccataaaaggcccaggaacacgggagcttctgaagagctgaacatgtggagggaggggaacgagaacttgtccatgtgccaagagggtggcgcacccccactccatggggacagaagctccagcatttgcccaggacccgtccagacctcaccctgtgtgtatcttcatctggctgtttacttatttgtatccttttctaataacgtttgtaataaactggtaaacataa

SEQ ID NO: 453527 - DNA, 2980 bp, Homo sapiens
cctgcgcgccgctggccgacggaggggagcctgccgatgccgagcgggtgctacgtcccgcggtcggagccgcgtcttctcccggctccgccaccagccggggctcgggtgggggcccggggccccggggcatggccctccggagtgcgcagggcgacggccccacctccggccactgggacggcggcgcggagaaggcagactttaacgccaaaaggaaaaagaaagtggcagagatacaccaggctctgaacagtgatcccactgatgtggctgcccttagacgcatggctatcagtgaaggagggctcctgactgatgagatcagacgaaaagtgtggcccaagctcctcaatgtcaatgccaatgacccacctcctatatcagggaagaacctacggcagatgagcaaggactaccaacaagtgttgctggacgtccggcggtcattgcggcggttccctcctggcatgccagaggaacagagagaagggctccaggaagaactgattgacatcatcctcctcatcttggagcgcaaccctcagctgcactactaccagggctaccatgacattgtggtcacatttctgctggtggtaggcgagaggctggcaacatccctggtagaaaaattatctacccaccacctcagggattttatggatccaacaatggacaacaccaagcatatattaaactatctgatgcccatcattgaccaggtgaatccagagctccatgacttcatgcagagtgctgaggtagggaccatctttgccctcagctggctcatcacctggtttgggcatgtcctgtctgacttcaggcacgtcgtgcggttatatgacttcttcctggcctgccacccactgatgccgatttactttgcagccgtgattgtgttgtatcgcgagcaggaagtcctggactgtgactgtgacatggcctcggtccaccacctgttgtcccagatccctcaggacttgccctatgagacactgatcagcagagcaggagacctttttgttcagtttcccccatccgaacttgctcgggaggccgctgcccaacagcaagctgagaggacggcagcctctactttcaaagactttgagctggcatcagcccagcagaggcctgatatggtgctgcggcagcggtttcggggacttctgcggcctgaagatcgaacaaaagatgtcctgaccaagccaaggaccaaccgctttgtgaaattggcagtgatggggctgacagtggcacttggagcggctgcactggctgtggtgaaaagtgccctggaatgggcccctaagtttcagctgcagctgtttccctgaaagccagagaagaccttcctcttacatcacattaaggtctcacccttccatggaaggattgggaggggtggaatttcctttattaaaagggtttctgtccagagttttttattcctgccaccctgccctgcccgtttgtgtttgcctttacttcagaggccaatagcagagcctacctgacacagaggggacctgggggcctggcacagaatcttatgcctctcccagtgggcttttggatgggctctctgccacctccctggtgttggaggaagtgggtttctgaagcttgcagctgcttttgcaacctgctgggcctgggctgccctagttaccgggaacctcctagtcaccccatagaaggtgaactggaacatgggatgccctcttactgctcctgcttgcctgcatcagatggacacagaaggagggggctgctgctgaaggagtcaggcttgggatggagagcaagaggccaaaggactcgtctgggagcatgatcggcccctcttactagcagctccatcagctgatcagaaatcagagacagaagggaactaggttactcgttaaatcctacctattttcagcctagaaatcacatgggcgtttccagtcaagtgggaaggaagctcatttttagggcctagacctagactagttttgcctgcctttttttcctccctgctttcttctacaagccacacaacattgcttataaaaggtacttttattactatttttagaatatatacaccccatatgtaaattaccctcacttttaaagtaataatagttccttcacggaaaaaaaaatagttctcatcagaaggatgagcttctaagatcctgaattttactttctacttgattaacattttcgctttagccagagttgctatttgcaaacagctttccacttccaaagtgccactttctgaccggtttttcttcctgttttcctcaaatcatcctactcccaaataggcacccactcactaccttggcgtcgttttttgggtctgacttgactcgtcaactgctggtctctcccacctggttggaaatgtcgttggaaacttgcaaagactctccagaccttagggaacaagaggcatcactcagtccttctgggacagcttccctgcctcagaaaacggaatctctgtctgtgaccttctcctgccccatttcacttgctcaacaccagactttaatctgactgtagctcataagaccctcattccagagagggtgctgccccatacccggaaggaggaacgctgcacagagaggccaagaagcatctggacagacaggccttgctgggtttagaccttatgctttttgtccagtttcatctcaacacagctgccatgcttcagccatgcctatccaatgacgtctccataaaaggcccaggaacacgggagcttctgaagagctgaacatgtggagggaggggaacgagaacttgtccatgtgccaagagggtggcgcacccccactccatggggacagaagctccagcatttgcccaggacccgtccagacctcaccctgtgtgtatcttcatctggctgtttacttatttgtatccttttctaataacgtttgtaataaactggtaaacataa

SEQ ID NO: 453528 - DNA, 1492 bp, Homo sapiens
tacctagttcgtctagtggtgactcgtggccgctagttagtgttcgctgaagattggtgtcgtattcactggtgtcgccttaggcaaactcctggctaatcgacctacgttgcgtctgcgtttcatcaccaaataaaagaatcgccacggggagtggaattccagtatgctgctactggatctaagtcgcccatggtgggtgctgtaggtcgttaattcgtggatcgtattaatatggaatcacgatggtgaatttcgttatcggacattaggacactgttctggaggtgatgatgcggcagatattcccagtgctctcccaaagcaagctggccctcttgtcatcctctcagtgggcggcaccagctgcccctccttccacaagtactcaagcctgtttgtaaatactgaaggaattgatggggttgaggaaaggaggtgcatgtgaccagggtcccaaggccacagcttttcagatcctaggaagcaagtggcatttgcttgagttgtggcctcggaaggagaatgtttatctgttttctaactttgctgacaccaggattctccctgtcattgagaagaaagcattatctaattaccttcaggtggtttacttattctgtaaagaatatgtgtaaatattttgtacagagccctgtatcaaataaacagccatatgtggttactaatcacctcttctgtcattccgtccttggccaccgctcagtgggaatggtctctgatctggatgctcccaccttccatgtcaggcccagaactgtgccatggtctgtggactcctggtcagccttgactggctaggagaccttgggcagtacctacagtcttgctgtttctgtttcatctgcaagaattatgacccacacactccagctgcagcccagggcactgtgatattttatacgtgtgtagatgtttttgtccacagttcctggttcatcactcccataaccctttgttataatgttgggacactgcaggcctcagaaaacggaatctctgtctgtgaccttctcctgccccatttcacttgctcaacaccagactttaatctgactgtagctcataagaccctcattccagagagggtgctgccccatacccggaaggaggaacgctgcacagagaggccaagaagcatctggacagacaggccttgctgggtttagaccttatgctttttgtccagtttcatctcaacacagctgccatgcttcagccatgcctatccaatgacgtctccataaaaggcccaggaacacgggagcttctgaagagctgaacatgtggagggaggggaacgagaacttgtccatgtgccaagagggtggcgcacccccactccatggggacagaagctccagcatttgcccaggacccgtccagacctcaccctgtgtgtatcttcatctggctgtttacttatttgtatccttttctaataacgtttgtaataaactggtaaacataa

SEQ ID NO: 453529 - DNA, 2943 bp, Homo sapiens
cctgcgcgccgctggccgacggaggggagcctgccgatgccgagcgggtgctacgtcccgcggtcggagccgcgtcttctcccggctccgccaccagccggggctcgggtgggggcccggggccccggggcatggccctccggagtgcgcagggcgacggccccacctccggccactgggacggcggcgcggagaaggcagactttaacgccaaaaggaaaaagaaagtggcagagatacaccaggctctgaacagtgatcccactgatgtggctgcccttagacgcatggctatcagtgaaggagggctcctgactgatgagatcagacgaaaagtgtggcccaagctcctcaatgtcaatgccaatgacccacctcctatatcagggaagaacctacggcagatgagcaaggactaccaacaagtgttgctggacgtccggcggtcattgcggcggttccctcctggcatgccagaggaacagagagaagggctccaggaagaactgattgacatcatcctcctcatcttggagcgcaaccctcagctgcactactaccagggctaccatgacattgtggtcacatttctgctggtggtaggcgagaggctggcaacatccctggtagaaaaattatctacccaccacctcagggattttatggatccaacaatggacaacaccaagcatatattaaactatctgatgcccatcattgaccaggtgaatccagagctccatgacttcatgcagagtgctgaggtagggaccatctttgccctcagctggctcatcacctggtttgggcatgtcctgtctgacttcaggcacgtcgtgcggttatatgacttcttcctggcctgccacccactgatgccgatttactttgcagccgtgattgtgttgtatcgcgagcaggaagtcctggactgtgactgtgacatggcctcggtccaccacctgttgtcccagatccctcaggacttgccctatgagacactgatcagcagagcaggagacctttttgttcagtttcccccatccgaacttgctcgggaggccgctgcccaacagcaagctgagaggacggcagcctctactttcaaagactttgagctggcatcagcccagcagaggcctgatatggtgctgcggcagcggtttcggggacttctgcggcctgaagatcgaacaaaagatgtcctgaccaagccaaggaccaaccgctttgtgaaattggcagtgatggggctgacagtggcacttggagcggctgcactggctgtggtgaaaagtgccctggaatgggcccctaagtttcagctgcagctgtttccctgaaagccagagaagaccttcctcttacatcacattaaggtctcacccttccatggaaggattgggaggggtggaatttcctttattaaaagggtttctgtccagagttttttattcctgccaccctgccctgcccgtttgtgtttgcctttacttcagaggccaatagcagagcctacctgacacagaggggacctgggggcctggcacagaatcttatgcctctcccagtgggcttttggatgggctctctgccacctccctggtgttggaggaagtgggtttctgaagcttgcagctgcttttgcaacctgctgggcctgggctgccctagttaccgggaacctcctagtcaccccatagaaggtgaactggaacatgggatgccctcttactgctcctgcttgcctgcatcagatggacacagaaggagggggctgctgctgaaggagtcaggcttgggatggagagcaagaggccaaaggactcgtctgggagcatgatcggcccctcttactagcagctccatcagctgatcagaaatcagagacagaagggaactaggttactcgttaaatcctacctattttcagcctagaaatcacatgggcgtttccagtcaagtgggaaggaagctcatttttagggcctagacctagactagttttgcctgcctttttttcctccctgctttcttctacaagccacacaacattgcttataaaaggtacttttattactatttttagaatatatacaccccatatgtaaattaccctcacttttaaagtaataatagttccttcacggaaaaaaaaatagttctcatcagaaggatgagcttctaagatcctgaattttactttctacttgattaacattttcgctttagccagagttgctatttgcaaacagctttccacttccaaagtgccactttctgaccggtttttcttcctgttttcctcaaatcatcctactcccaaataggcacccactcactaccttggcgtcgttttttgggtctgacttgactcgtcaactgctggtctctcccacctggttggaaatgtcgttggaaacttgcaaagactctccagaccttagggaacaagaggcatcactcagtccttctgggacagcttccctgtaagcaaagccaggtttgttttagattcactctggcctgaaaaaaaaagtgccttttgctgctttaaagaattggggtatatggtatgaagcagccatgtacttgtattttcctggtctttcctgggcactcttctctcttggcagatgttttcttaaagtgaacacaccagaagcactctaccccaccatatccagtcctctttgcatgcctgttgtgtgcagggtggagggtgtcccacgtgccagagcagctgggagccctgtccgctgagttacactaagcactttatttttatttattttattattattttcttttttctgggcattagagcagactccatctcataataataatacataataagctattattttctacctgatgtcatcaggtgttaatccacctctatatctgttggccagtgaaatactttgggctgggacgttg

SEQ ID NO: 453530 - DNA, 1598 bp, Homo sapiens
aatgattatagtcttctctctttcttaagcagtgataaaccttttaatgagaacaaaaaggaaataaattgctaactctgaaggaaccagtaagaaatacactgaagtatggtctgttgttttagaataatttgttaaatggaccagagtaatatagtggaacatgcatcaccttataccatatagtaactgattcttctaagtttacttgaacagatttcagtcaggaaaaaacattgctcaattgtgttcttcaatttattcaacaaacaattgaaaataatattttaaaggacataatctcttcatatcacatcttaacaattcttgaatgagatccagtttgtccatgccttgtaagtaagtttataacctactatgctttagggcctcctgctaccttaggttgacatatatttaagaaaaataatttcatttcaatagtagcataaacattagaaaaataaatttgctggaaacatgaatgcaatctaaaccaaatgtgattttaaaattatttctgccattaattccctccatatgtgtgaataattgagttgattttatagtgaagtaccttatgagccatacttaagggtttctgagagggactatgaagtttttcctggcttaaattcaattaagttttcattatagggtcactatgacatgaaaaggaaccagtatgaacacttttatacttattcccttctattttaaaaataacttgattatggatttgtattctggcattggtttttgaaccattgtgctttcattctttctagtctgtctaaaaatcactggagcgtttaagatggcagctgactaacataggcctttgaggtcttttggtcttctaaaggaagaaggccaaattttgggcccagtttcttaaggatgttttcaaaatgtacagtggctaaaatcttgtaagcagtaattttgtgtttatgatggctgtctccaagtttgggggaaaataatggcaaaacaaaaaatcacatttgagtagttcttagagcaattcctagagatgtatttcttacctggcctttcctctctaccctgtatctttgcattatttaatacttggaaaaacccacatagcattaaaaacaaagtactactgaacaaagtgataaatacattttcttaaatctttcttttctaaccacaggaacatttaaacttacaatagaattcactgaagaatatccaaataaaccacctacagttagatttgtctctaagatgttccatccaaatgtctatgcagatggtagtatatgtctggacatacttcagaaccgttggagtccaacctatgatgtgtcttccattctaacatccatacagtctctgttggatgaacccaatcccaatagtccagcaaacagccaggctgctcagctgtaccaggagaacaaacgggaatatgaaaagcgtgtttctgcaatagtagaacaaagctggcgtgattgttgaccccgggtacagtttaaagaagctggccataagaaaaatatatattgatgtgtttgtcacctccctactcctgtcattacatttactttattaaaagcaaaataactgtt

SEQ ID NO: 453531 - DNA, 1800 bp, Homo sapiens
tacactggggtggtgcttagccggcgccagaccgaccctcgacttcggagaggcagcgcggttcctctgggtgcttccgcctccccttctcctgcttctccagcctcttcggcctcctcgcccgccgcgggaacccgagaccccagtgtatgccccacccctgaccccgctcgcgacatgtccaccccggctcggcggcgcctcatgcgggacttcaagaggttgcaggaggatcctccagccggagtcagcggggctccgtccgagaacaacataatggtgtggaacgcggtcattttcgggcctgaagggaccccgtttgaggatggaacatttaaacttacaatagaattcactgaagaatatccaaataaaccacctacagttagatttgtctctaagatgttccatccaaatgtctatgcagatggtagtatatgtctggacatacttcagaaccgttggagtccaacctatgatgtgtcttccattctaacatccatacagtctctgttggatgaacccaatcccaatagtccagcaaacagccaggctgctcagctgtaccaggagaacaaacgggaatatgaaaagcgtgtttctgcaatagtagaacaaagctggcgtgattgttgaccccgggtacagtttaaagaagctggccataagaaaaatatatattgatgtgtttgtcacctccctactcctgtcattacatttactttattaaaagcaaaataactgttgtgctgtttccatcttccttgccaagttttcctaccccttctaccctctccttaaacatcagaaaacaccctctatgaaatcaaatgtactgtacctgggttacttgcaaaaattactaatgcttcagtttttctgttgtatttcatttccagttttcaggcagttatttttattattgtactttaagcttttaagatgaattgttatacaagaggtgcttatgcttagcttgatgaccaggatgttatttttaacaaaatgattgctgaagtgtttcatcctggctggtccttcacttgtgttggatttagaagtgaatgtgtttggaatatggcctacagagaatagaaacaaatccatgtaaacaattttgaaggaggcatgggagctaaaaatcctgtgatactaagatctcagtcatatgaattacaacgtagtatttactggcaagaaggagaaagttgaaggactcagctaaaggagtacagcaattgtagtaactgacacatcctctctttgcaagctgctgactgggcacactcatgccaagtttcagaattattggtcttctgggtttttgctttttaaaagaggtgtgggagcagaggaatggaaacaatcgtgagtttttgagctagggaaagttggagctcctttaatctttttaaaggatcagtgctgccctaagtgaataaactcaattgtccatctttattttagagttttaatgaattcaaggaagggagcatagcatatctgtggcaaactattttccactcaaatcctgagttattgctgcatgctttaatttcttccctttcagcatctgagaaccttaaagccaatgtctgcgatctttttttggatatttatacttttagatatatagtacctttaagtagcagtatgggacaaggcttgtaaatgttttgtctaatgttctattgtcaccttttatgcatttatcacttccaaatctaactttgcacaagtaacccatgtaaaaaaaaatgtacatttttcaaaagttgtaaataaaaataaccttaaaat

SEQ ID NO: 453532 - DNA, 421 bp, Homo sapiens
cccttaaaaaaaaaaaaagccgcatatattttcctagctactagcagattcacataactctgggtttgtatgctaaagacaagaaatgtagctgtacttaggacaattcaattgagtgtcactaccttataaaatagttgttttgcattaaggaactgacattttaaaaattgtctctttagtctctgttggatgaacccaatcccaatagtccagcaaacagccaggctgctcagctgtaccaggagaacaaacgggaatatgaaaagcgtgtttctgcaatagtagaacaaagctggcgtgattgttgaccccgggtacagtttaaagaagctggccataagaaaaatatatattgatgtgtttgtcacctccctactcctgtcattacatttactttattaaaagcaaaataactgtt

SEQ ID NO: 453533 - DNA, 265 bp, Homo sapiens
ccaaccctttatacccttaacccagtcctctacccaaaccctcccatttgccaaccctttatacccttaacccagtcctctacccaaaccctcccatttggtaacatcttgaatgactagaccctatcacaaccggaaaaatgacactgatagttctacactcagttgtgtgtgtgtgtggttgttttttgaaagtttaatacatttaaaggatgattaaagtatttgaactcatgaaattctttaatatttgaggttttaaaaa

SEQ ID NO: 453534 - DNA, 2652 bp, Homo sapiens
aatgattatagtcttctctctttcttaagcagtgataaaccttttaatgagaacaaaaaggaaataaattgctaactctgaaggaaccagtaagaaatacactgaagtatggtctgttgttttagaataatttgttaaatggaccagagtaatatagtggaacatgcatcaccttataccatatagtaactgattcttctaagtttacttgaacagatttcagtcaggaaaaaacattgctcaattgtgttcttcaatttattcaacaaacaattgaaaataatattttaaaggacataatctcttcatatcacatcttaacaattcttgaatgagatccagtttgtccatgccttgtaagtaagtttataacctactatgctttagggcctcctgctaccttaggttgacatatatttaagaaaaataatttcatttcaatagtagcataaacattagaaaaataaatttgctggaaacatgaatgcaatctaaaccaaatgtgattttaaaattatttctgccattaattccctccatatgtgtgaataattgagttgattttatagtgaagtaccttatgagccatacttaagggtttctgagagggactatgaagtttttcctggcttaaattcaattaagttttcattatagggtcactatgacatgaaaaggaaccagtatgaacacttttatacttattcccttctattttaaaaataacttgattatggatttgtattctggcattggtttttgaaccattgtgctttcattctttctagtctgtctaaaaatcactggagcgtttaagatggcagctgactaacataggcctttgaggtcttttggtcttctaaaggaagaaggccaaattttgggcccagtttcttaaggatgttttcaaaatgtacagtggctaaaatcttgtaagcagtaattttgtgtttatgatggctgtctccaagtttgggggaaaataatggcaaaacaaaaaatcacatttgagtagttcttagagcaattcctagagatgtatttcttacctggcctttcctctctaccctgtatctttgcattatttaatacttggaaaaacccacatagcattaaaaacaaagtactactgaacaaagtgataaatacattttcttaaatctttcttttctaaccacaggaacatttaaacttacaatagaattcactgaagaatatccaaataaaccacctacagttagatttgtctctaagatgttccatccaaatgtctatgcagatggtagtatatgtctggacatacttcagaaccgttggagtccaacctatgatgtgtcttccattctaacatccatacagtctctgttggatgaacccaatcccaatagtccagcaaacagccaggctgctcagctgtaccaggagaacaaacgggaatatgaaaagcgtgtttctgcaatagtagaacaaagctggcgtgattgttgaccccgggtacagtttaaagaagctggccataagaaaaatatatattgatgtgtttgtcacctccctactcctgtcattacatttactttattaaaagcaaaataactgttgtgctgtttccatcttccttgccaagttttcctaccccttctaccctctccttaaacatcagaaaacaccctctatgaaatcaaatgtactgtacctgggttacttgcaaaaattactaatgcttcagtttttctgttgtatttcatttccagttttcaggcagttatttttattattgtactttaagcttttaagatgaattgttatacaagaggtgcttatgcttagcttgatgaccaggatgttatttttaacaaaatgattgctgaagtgtttcatcctggctggtccttcacttgtgttggatttagaagtgaatgtgtttggaatatggcctacagagaatagaaacaaatccatgtaaacaattttgaaggaggcatgggagctaaaaatcctgtgatactaagatctcagtcatatgaattacaacgtagtatttactggcaagaaggagaaagttgaaggactcagctaaaggagtacagcaattgtagtaactgacacatcctctctttgcaagctgctgactgggcacactcatgccaagtttcagaattattggtcttctgggtttttgctttttaaaagaggtgtgggagcagaggaatggaaacaatcgtgagtttttgagctagggaaagttggagctcctttaatctttttaaaggatcagtgctgccctaagtgaataaactcaattgtccatctttattttagagttttaatgaattcaaggaagggagcatagcatatctgtggcaaactattttccactcaaatcctgagttattgctgcatgctttaatttcttccctttcagcatctgagaaccttaaagccaatgtctgcgatctttttttggatatttatacttttagatatatagtacctttaagtagcagtatgggacaaggcttgtaaatgttttgtctaatgttctattgtcaccttttatgcatttatcacttccaaatctaactttgcacaagtaacccatgtaaaaaaaaatgtacatttttcaaaagttgtaaataaaaataaccttaaaat

SEQ ID NO: 453535 - DNA, 1710 bp, Homo sapiens
tacactggggtggtgcttagccggcgccagaccgaccctcgacttcggagaggcagcgcggttcctctgggtgcttccgcctccccttctcctgcttctccagcctcttcggcctcctcgcccgccgcgggaacccgagaccccagtgtatgccccacccctgaccccgctcgcgacatgtccaccccggctcggcggcgcctcatgcgggacttcaagaggttgcaggaggatcctccagccggagtcagcggggctccgtccgagaacaacataatggtgtggaacgcggtcattttcgggcctgaagggaccccgtttgaggatgtctatgcagatggtagtatatgtctggacatacttcagaaccgttggagtccaacctatgatgtgtcttccattctaacatccatacagtctctgttggatgaacccaatcccaatagtccagcaaacagccaggctgctcagctgtaccaggagaacaaacgggaatatgaaaagcgtgtttctgcaatagtagaacaaagctggcgtgattgttgaccccgggtacagtttaaagaagctggccataagaaaaatatatattgatgtgtttgtcacctccctactcctgtcattacatttactttattaaaagcaaaataactgttgtgctgtttccatcttccttgccaagttttcctaccccttctaccctctccttaaacatcagaaaacaccctctatgaaatcaaatgtactgtacctgggttacttgcaaaaattactaatgcttcagtttttctgttgtatttcatttccagttttcaggcagttatttttattattgtactttaagcttttaagatgaattgttatacaagaggtgcttatgcttagcttgatgaccaggatgttatttttaacaaaatgattgctgaagtgtttcatcctggctggtccttcacttgtgttggatttagaagtgaatgtgtttggaatatggcctacagagaatagaaacaaatccatgtaaacaattttgaaggaggcatgggagctaaaaatcctgtgatactaagatctcagtcatatgaattacaacgtagtatttactggcaagaaggagaaagttgaaggactcagctaaaggagtacagcaattgtagtaactgacacatcctctctttgcaagctgctgactgggcacactcatgccaagtttcagaattattggtcttctgggtttttgctttttaaaagaggtgtgggagcagaggaatggaaacaatcgtgagtttttgagctagggaaagttggagctcctttaatctttttaaaggatcagtgctgccctaagtgaataaactcaattgtccatctttattttagagttttaatgaattcaaggaagggagcatagcatatctgtggcaaactattttccactcaaatcctgagttattgctgcatgctttaatttcttccctttcagcatctgagaaccttaaagccaatgtctgcgatctttttttggatatttatacttttagatatatagtacctttaagtagcagtatgggacaaggcttgtaaatgttttgtctaatgttctattgtcaccttttatgcatttatcacttccaaatctaactttgcacaagtaacccatgtaaaaaaaaatgtacatttttcaaaagttgtaaataaaaataaccttaaaat

SEQ ID NO: 453536 - DNA, 2792 bp, Homo sapiens
tacactggggtggtgcttagccggcgccagaccgaccctcgacttcggagaggcagcgcggttcctctgggtgcttccgcctccccttctcctgcttctccagcctcttcggcctcctcgcccgccgcgggaacccgagaccccagtgtatgccccacccctgaccccgctcgcgacatgtccaccccggctcggcggcgcctcatgcgggacttcaagaggttgcaggaggatcctccagccggagtcagcggggctccgtccgagaacaacataatggtgtggaacgcggtcattttcgggcctgaagggaccccgtttgaggatggaacatttaaacttacaatagaattcactgaagaatatccaaataaaccacctacagttagatttgtctctaagatgttccatccaaatggcaagtatcacttttagtacagtgttttaaactactatagtgtttattatggagtattccacatttcctgtgtattttgtggtgcctgagtatttgtttaggcagcttgctgctttcttgaaagctgaacttgttcttggttgtctgtggctgtcttgtcctagaactgaagcagtggaggtattttccctttgcttggagtctgggagcctcctgattttgatgacctttgtcatttacttattaaacaaaatgaaggatgctcttgaggtttccttttaatgctaggccagattgggatagtcttgtgttgtaattattttcactagcgtttagaaaagtagttttcattggacgcatatcagaattactgtggaacattttaaaaacacagatgccttcgccccactccaaacctaatgaataggattctgttgttgaaggccaggcatacggtattgtcagaaaagcaccacaggtgattctaacttaaccactttgcactttttaaaatagtagtaagcctagaacagcttgccttttatttaggttaatgaagtatttttcagggtatcagatatgtttatctttatgccaaaatgaaatcttgtgaactctgagtgatcttttgttatttcagataggggatacagcctacaaatttggtggaatgaatttcccacatgtctgtggatagctagggaccctgttcaaaaatgtttctgatttcctggataatagggcagccttttccaaaggatgaacactaaatatcttccagttttatactgatcacatctgacattctctgatcatcctgattatttcactagtggtggttatgacttatctttttaggcagttaactgggaagcaacataggaatctttaaacttcaaaagcaaagtattcttgactatttttgttttgtctataatgttaaaaccttagtggtcttgttacgtttaatgtacctacttctttgttcttagtctatgcagatggtagtatatgtctggacatacttcagaaccgttggagtccaacctatgatgtgtcttccattctaacatccatacagtctctgttggatgaacccaatcccaatagtccagcaaacagccaggctgctcagctgtaccaggagaacaaacgggaatatgaaaagcgtgtttctgcaatagtagaacaaagctggcgtgattgttgaccccgggtacagtttaaagaagctggccataagaaaaatatatattgatgtgtttgtcacctccctactcctgtcattacatttactttattaaaagcaaaataactgttgtgctgtttccatcttccttgccaagttttcctaccccttctaccctctccttaaacatcagaaaacaccctctatgaaatcaaatgtactgtacctgggttacttgcaaaaattactaatgcttcagtttttctgttgtatttcatttccagttttcaggcagttatttttattattgtactttaagcttttaagatgaattgttatacaagaggtgcttatgcttagcttgatgaccaggatgttatttttaacaaaatgattgctgaagtgtttcatcctggctggtccttcacttgtgttggatttagaagtgaatgtgtttggaatatggcctacagagaatagaaacaaatccatgtaaacaattttgaaggaggcatgggagctaaaaatcctgtgatactaagatctcagtcatatgaattacaacgtagtatttactggcaagaaggagaaagttgaaggactcagctaaaggagtacagcaattgtagtaactgacacatcctctctttgcaagctgctgactgggcacactcatgccaagtttcagaattattggtcttctgggtttttgctttttaaaagaggtgtgggagcagaggaatggaaacaatcgtgagtttttgagctagggaaagttggagctcctttaatctttttaaaggatcagtgctgccctaagtgaataaactcaattgtccatctttattttagagttttaatgaattcaaggaagggagcatagcatatctgtggcaaactattttccactcaaatcctgagttattgctgcatgctttaatttcttccctttcagcatctgagaaccttaaagccaatgtctgcgatctttttttggatatttatacttttagatatatagtacctttaagtagcagtatgggacaaggcttgtaaatgttttgtctaatgttctattgtcaccttttatgcatttatcacttccaaatctaactttgcacaagtaacccatgtaaaaaaaaatgtacatttttcaaaagttgtaaataaaaataaccttaaaat

SEQ ID NO: 453537 - DNA, 3644 bp, Homo sapiens
aatgattatagtcttctctctttcttaagcagtgataaaccttttaatgagaacaaaaaggaaataaattgctaactctgaaggaaccagtaagaaatacactgaagtatggtctgttgttttagaataatttgttaaatggaccagagtaatatagtggaacatgcatcaccttataccatatagtaactgattcttctaagtttacttgaacagatttcagtcaggaaaaaacattgctcaattgtgttcttcaatttattcaacaaacaattgaaaataatattttaaaggacataatctcttcatatcacatcttaacaattcttgaatgagatccagtttgtccatgccttgtaagtaagtttataacctactatgctttagggcctcctgctaccttaggttgacatatatttaagaaaaataatttcatttcaatagtagcataaacattagaaaaataaatttgctggaaacatgaatgcaatctaaaccaaatgtgattttaaaattatttctgccattaattccctccatatgtgtgaataattgagttgattttatagtgaagtaccttatgagccatacttaagggtttctgagagggactatgaagtttttcctggcttaaattcaattaagttttcattatagggtcactatgacatgaaaaggaaccagtatgaacacttttatacttattcccttctattttaaaaataacttgattatggatttgtattctggcattggtttttgaaccattgtgctttcattctttctagtctgtctaaaaatcactggagcgtttaagatggcagctgactaacataggcctttgaggtcttttggtcttctaaaggaagaaggccaaattttgggcccagtttcttaaggatgttttcaaaatgtacagtggctaaaatcttgtaagcagtaattttgtgtttatgatggctgtctccaagtttgggggaaaataatggcaaaacaaaaaatcacatttgagtagttcttagagcaattcctagagatgtatttcttacctggcctttcctctctaccctgtatctttgcattatttaatacttggaaaaacccacatagcattaaaaacaaagtactactgaacaaagtgataaatacattttcttaaatctttcttttctaaccacaggaacatttaaacttacaatagaattcactgaagaatatccaaataaaccacctacagttagatttgtctctaagatgttccatccaaatggcaagtatcacttttagtacagtgttttaaactactatagtgtttattatggagtattccacatttcctgtgtattttgtggtgcctgagtatttgtttaggcagcttgctgctttcttgaaagctgaacttgttcttggttgtctgtggctgtcttgtcctagaactgaagcagtggaggtattttccctttgcttggagtctgggagcctcctgattttgatgacctttgtcatttacttattaaacaaaatgaaggatgctcttgaggtttccttttaatgctaggccagattgggatagtcttgtgttgtaattattttcactagcgtttagaaaagtagttttcattggacgcatatcagaattactgtggaacattttaaaaacacagatgccttcgccccactccaaacctaatgaataggattctgttgttgaaggccaggcatacggtattgtcagaaaagcaccacaggtgattctaacttaaccactttgcactttttaaaatagtagtaagcctagaacagcttgccttttatttaggttaatgaagtatttttcagggtatcagatatgtttatctttatgccaaaatgaaatcttgtgaactctgagtgatcttttgttatttcagataggggatacagcctacaaatttggtggaatgaatttcccacatgtctgtggatagctagggaccctgttcaaaaatgtttctgatttcctggataatagggcagccttttccaaaggatgaacactaaatatcttccagttttatactgatcacatctgacattctctgatcatcctgattatttcactagtggtggttatgacttatctttttaggcagttaactgggaagcaacataggaatctttaaacttcaaaagcaaagtattcttgactatttttgttttgtctataatgttaaaaccttagtggtcttgttacgtttaatgtacctacttctttgttcttagtctatgcagatggtagtatatgtctggacatacttcagaaccgttggagtccaacctatgatgtgtcttccattctaacatccatacagtctctgttggatgaacccaatcccaatagtccagcaaacagccaggctgctcagctgtaccaggagaacaaacgggaatatgaaaagcgtgtttctgcaatagtagaacaaagctggcgtgattgttgaccccgggtacagtttaaagaagctggccataagaaaaatatatattgatgtgtttgtcacctccctactcctgtcattacatttactttattaaaagcaaaataactgttgtgctgtttccatcttccttgccaagttttcctaccccttctaccctctccttaaacatcagaaaacaccctctatgaaatcaaatgtactgtacctgggttacttgcaaaaattactaatgcttcagtttttctgttgtatttcatttccagttttcaggcagttatttttattattgtactttaagcttttaagatgaattgttatacaagaggtgcttatgcttagcttgatgaccaggatgttatttttaacaaaatgattgctgaagtgtttcatcctggctggtccttcacttgtgttggatttagaagtgaatgtgtttggaatatggcctacagagaatagaaacaaatccatgtaaacaattttgaaggaggcatgggagctaaaaatcctgtgatactaagatctcagtcatatgaattacaacgtagtatttactggcaagaaggagaaagttgaaggactcagctaaaggagtacagcaattgtagtaactgacacatcctctctttgcaagctgctgactgggcacactcatgccaagtttcagaattattggtcttctgggtttttgctttttaaaagaggtgtgggagcagaggaatggaaacaatcgtgagtttttgagctagggaaagttggagctcctttaatctttttaaaggatcagtgctgccctaagtgaataaactcaattgtccatctttattttagagttttaatgaattcaaggaagggagcatagcatatctgtggcaaactattttccactcaaatcctgagttattgctgcatgctttaatttcttccctttcagcatctgagaaccttaaagccaatgtctgcgatctttttttggatatttatacttttagatatatagtacctttaagtagcagtatgggacaaggcttgtaaatgttttgtctaatgttctattgtcaccttttatgcatttatcacttccaaatctaactttgcacaagtaacccatgtaaaaaaaaatgtacatttttcaaaagttgtaaataaaaataaccttaaaat

SEQ ID NO: 453538 - DNA, 1755 bp, Homo sapiens
tacactggggtggtgcttagccggcgccagaccgaccctcgacttcggagaggcagcgcggttcctctgggtgcttccgcctccccttctcctgcttctccagcctcttcggcctcctcgcccgccgcgggaacccgagaccccagtgtatgccccacccctgaccccgctcgcgacatgtccaccccggctcggcggcgcctcatgcgggacttcaagaggttgcaggaggatcctccagccggagtcagcggggctccgtccgagaacaacataatggtgtggaacgcggtcattttcgggcctgaagggaccccgtttgaggatggaacatttaaacttacaatagaattcactgaagaatatccaaatatctatgcagatggtagtatatgtctggacatacttcagaaccgttggagtccaacctatgatgtgtcttccattctaacatccatacagtctctgttggatgaacccaatcccaatagtccagcaaacagccaggctgctcagctgtaccaggagaacaaacgggaatatgaaaagcgtgtttctgcaatagtagaacaaagctggcgtgattgttgaccccgggtacagtttaaagaagctggccataagaaaaatatatattgatgtgtttgtcacctccctactcctgtcattacatttactttattaaaagcaaaataactgttgtgctgtttccatcttccttgccaagttttcctaccccttctaccctctccttaaacatcagaaaacaccctctatgaaatcaaatgtactgtacctgggttacttgcaaaaattactaatgcttcagtttttctgttgtatttcatttccagttttcaggcagttatttttattattgtactttaagcttttaagatgaattgttatacaagaggtgcttatgcttagcttgatgaccaggatgttatttttaacaaaatgattgctgaagtgtttcatcctggctggtccttcacttgtgttggatttagaagtgaatgtgtttggaatatggcctacagagaatagaaacaaatccatgtaaacaattttgaaggaggcatgggagctaaaaatcctgtgatactaagatctcagtcatatgaattacaacgtagtatttactggcaagaaggagaaagttgaaggactcagctaaaggagtacagcaattgtagtaactgacacatcctctctttgcaagctgctgactgggcacactcatgccaagtttcagaattattggtcttctgggtttttgctttttaaaagaggtgtgggagcagaggaatggaaacaatcgtgagtttttgagctagggaaagttggagctcctttaatctttttaaaggatcagtgctgccctaagtgaataaactcaattgtccatctttattttagagttttaatgaattcaaggaagggagcatagcatatctgtggcaaactattttccactcaaatcctgagttattgctgcatgctttaatttcttccctttcagcatctgagaaccttaaagccaatgtctgcgatctttttttggatatttatacttttagatatatagtacctttaagtagcagtatgggacaaggcttgtaaatgttttgtctaatgttctattgtcaccttttatgcatttatcacttccaaatctaactttgcacaagtaacccatgtaaaaaaaaatgtacatttttcaaaagttgtaaataaaaataaccttaaaat

SEQ ID NO: 453539 - DNA, 932 bp, Homo sapiens
tacactggggtggtgcttagccggcgccagaccgaccctcgacttcggagaggcagcgcggttcctctgggtgcttccgcctccccttctcctgcttctccagcctcttcggcctcctcgcccgccgcgggaacccgagaccccagtgtatgccccacccctgaccccgctcgcgacatgtccaccccggctcggcggcgcctcatgcgggacttcaagaggttgcaggaggatcctccagccggagtcagcggggctccgtccgagaacaacataatggtgtggaacgcggtcattttcgggcctgaagggaccccgtttgaggatggaacatttaaacttacaatagaattcactgaagaatatccaaataaaccacctacagttagatttgtctctaagatgttccatccaaatgtctatgcagatggtagtatatgtctggacatacttcagaaccgttggagtccaacctatgatgtgtcttccattctaacatccatacagtctctgttggatgaacccaatcccaatagtccagcaaacagccaggctgctcagctgtaccaggagaacaaacgggaatatgaaaagcgtgtttctgcaatagtagaacaaagctggcgtgattgttgaccccgggtacagtttaaagaagctggccataagaaaaatatatattgatgtgtttgtcacctccctactcctgtcattacatttactttattaaaagcaaaataactgttaaaaaaaaaaaaaaaaaaaaaaaaaaaaaaaaaaaaaaaaaaaaaaaaaaacaaccacacaaagaaaaggaacaaaaaaaaaacaagaaggcgacgagccccgggcacgggccagaggcggagcgcgaggaggagaacgagcgggcggccacgacagaaaacggggagcgagcgcaccggagacag

SEQ ID NO: 453540 - DNA, 1762 bp, Homo sapiens
tacactggggtggtgcttagccggcgccagaccgaccctcgacttcggagaggcagcgcggttcctctgggtgcttccgcctccccttctcctgcttctccagcctcttcggcctcctcgcccgccgcgggaacccgagaccccagtgtatgccccacccctgaccccgctcgcgacatgtccaccccggctcggcggcgcctcatgcgggacttcaagaggttgcaggaggatcctccagccggagtcagcggggctccgtccgagaacaacataatggtgtggaacgcggtcattttcgggtgagtctgcgttcgtggcggtggcgagaaaactggggacgcgagcagcttcggtctgcgctccggggcgggccccccgcggaggccgagcgggtaggggaaaatgtttgggtctggctgggcctaggcgcctccccggagcctgtgcctcgattagctcagttcccgctgccagggggaaccgcttggggttctaggggggcggggcggggagtggtggcggttaggcgcggcggcttgccctgtgtctctgagcccgggacatccatttgtagtggcttccgaccccggtagcggtgctggagatggcagagctcgggatagccatctcagatgaagcagggagaagggggccccttaagtgggaactgaccatttttctctgtgttgcaggcgcctgaagggaccccgtttgaggatggtaagagagagtttctttacccacttttcaggagcctggtcatctggggaaagggttcccagtcatcctggaagtgtctcctgcttaggaacctgcctctgcctagcctctgtctgctaaaggcttgagtggaatgcagtgtgtggctggtggttctggatattgtatgcttgactagaactgcacctttcttcttgctttcttaaaaaaaaaatctgtgtaaggcagtcactttttaaaaggagcaatcatagcactggtattaaggatttttgaggcttgggctgtaattctgctaaattcagccctccatcactgaattagtataaacccaaccagttgctgataggcagcagagaccccagagaccatctggttcagaattctaccccaagggcaggagttgtgttcagcaggtgcttggtagatgtgtgttggatgttgagtggatgcgagaatcccttgcgtacaactgtctggtttctacaatctgacattgaatgcctgtcagcctcactgctctaagatggtcttaaatgcctcatttgagtacagtattctttcttatttttaagtgaatttgcagtgtgtgctttcatcaagacgttatgatgagtaatttcaaagcagcttcacaattgaagttagccttaatgtacccttttgatcagtgtcctgcctacctgaaagtactacatgtaccagtaggtacataatttttaattgatttaggtttaacttttaaaaacacgtgtaaattgctttttaaaaacttctgattttagataattatagattcatatgcagttgcaagaaataatagagacaccctttatacccttaacccagtcctctacccaaaccctcccatttggtaacatcttgaatgactagaccctatcacaaccggaaaaatgacactgatagttctacactcagttgtgtgtgtgtgtggttgttttttgaaagtttaatacatttaaaggatgattaaagtatttgaactcatgaaattctttaatatttgaggttttaaaaa

SEQ ID NO: 453541 - DNA, 746 bp, Homo sapiens
tacactggggtggtgcttagccggcgccagaccgaccctcgacttcggagaggcagcgcggttcctctgggtgcttccgcctccccttctcctgcttctccagcctcttcggcctcctcgcccgccgcgggaacccgagaccccagtgtatgccccacccctgaccccgctcgcgacatgtccaccccggctcggcggcgcctcatgcgggacttcaagaggttgcaggaggatcctccagccggagtcagcggggctccgtccgagaacaacataatggtgtggaacgcggtcattttcgggcctgaagggaccccgtttgaggatggaacatttaaacttacaatagaattcactgaagaatatccaaataaaccacctacagttagatttgtctctaagatgttccatccaaatgtctatgcagatggtagtatatgtctggacatacttcagaaccgttggagtccaacctatgatgtgtcttccattctaacatccatacagtctctgttggatgaacccaatcccaatagtccagcaaacagccaggctgctcagctgtaccaggagaacaaacgggaatatgaaaagcgtgtttctgcaatagtagaacaaagctggcgtgattgttgaccccgggtacagtttaaagaagctggccataagaaaaatatatattgatgtgtttgtcacctccctactcctgtcattacatttactttattaaaagcaaaataactgtt

SEQ ID NO: 453542 - DNA, 2195 bp, Homo sapiens
tacactggggtggtgcttagccggcgccagaccgaccctcgacttcggagaggcagcgcggttcctctgggtgcttccgcctccccttctcctgcttctccagcctcttcggcctcctcgcccgccgcgggaacccgagaccccagtgtatgccccacccctgaccccgctcgcgacatgtccaccccggctcggcggcgcctcatgcgggacttcaagaggttgcaggaggatcctccagccggagtcagcggggctccgtccgagaacaacataatggtgtggaacgcggtcattttcgggtgagtctgcgttcgtggcggtggcgagaaaactggggacgcgagcagcttcggtctgcgctccggggcgggccccccgcggaggccgagcgggtaggggaaaatgtttgggtctggctgggcctaggcgcctccccggagcctgtgcctcgattagctcagttcccgctgccagggggaaccgcttggggttctaggggggcggggcggggagtggtggcggttaggcgcggcggcttgccctgtgtctctgagcccgggacatccatttgtagtggcttccgaccccggtagcggtgctggagatggcagagctcgggatagccatctcagatgaagcagggagaagggggccccttaagtgggaactgaccatttttctctgtgttgcaggcgcctgaagggaccccgtttgaggatggaacatttaaacttacaatagaattcactgaagaatatccaaataaaccacctacagttagatttgtctctaagatgttccatccaaatgtctatgcagatggtagtatatgtctggacatacttcagaaccgttggagtccaacctatgatgtgtcttccattctaacatccatacagtctctgttggatgaacccaatcccaatagtccagcaaacagccaggctgctcagctgtaccaggagaacaaacgggaatatgaaaagcgtgtttctgcaatagtagaacaaagctggcgtgattgttgaccccgggtacagtttaaagaagctggccataagaaaaatatatattgatgtgtttgtcacctccctactcctgtcattacatttactttattaaaagcaaaataactgttgtgctgtttccatcttccttgccaagttttcctaccccttctaccctctccttaaacatcagaaaacaccctctatgaaatcaaatgtactgtacctgggttacttgcaaaaattactaatgcttcagtttttctgttgtatttcatttccagttttcaggcagttatttttattattgtactttaagcttttaagatgaattgttatacaagaggtgcttatgcttagcttgatgaccaggatgttatttttaacaaaatgattgctgaagtgtttcatcctggctggtccttcacttgtgttggatttagaagtgaatgtgtttggaatatggcctacagagaatagaaacaaatccatgtaaacaattttgaaggaggcatgggagctaaaaatcctgtgatactaagatctcagtcatatgaattacaacgtagtatttactggcaagaaggagaaagttgaaggactcagctaaaggagtacagcaattgtagtaactgacacatcctctctttgcaagctgctgactgggcacactcatgccaagtttcagaattattggtcttctgggtttttgctttttaaaagaggtgtgggagcagaggaatggaaacaatcgtgagtttttgagctagggaaagttggagctcctttaatctttttaaaggatcagtgctgccctaagtgaataaactcaattgtccatctttattttagagttttaatgaattcaaggaagggagcatagcatatctgtggcaaactattttccactcaaatcctgagttattgctgcatgctttaatttcttccctttcagcatctgagaaccttaaagccaatgtctgcgatctttttttggatatttatacttttagatatatagtacctttaagtagcagtatgggacaaggcttgtaaatgttttgtctaatgttctattgtcaccttttatgcatttatcacttccaaatctaactttgcacaagtaacccatgtaaaaaaaaatgtacatttttcaaaagttgtaaataaaaataaccttaaaat

SEQ ID NO: 453543 - DNA, 1552 bp, Homo sapiens
gctgatccgcttaagcgagaacaacataatggtgtggaacgcggtcattttcgggcctgaagggaccccgtttgaggatggaacatttaaacttacaatagaattcactgaagaatatccaaataaaccacctacagttagatttgtctctaagatgttccatccaaatgtctatgcagatggtagtatatgtctggacatacttcagaaccgttggagtccaacctatgatgtgtcttccattctaacatccatacagtctctgttggatgaacccaatcccaatagtccagcaaacagccaggctgctcagctgtaccaggagaacaaacgggaatatgaaaagcgtgtttctgcaatagtagaacaaagctggcgtgattgttgaccccgggtacagtttaaagaagctggccataagaaaaatatatattgatgtgtttgtcacctccctactcctgtcattacatttactttattaaaagcaaaataactgttgtgctgtttccatcttccttgccaagttttcctaccccttctaccctctccttaaacatcagaaaacaccctctatgaaatcaaatgtactgtacctgggttacttgcaaaaattactaatgcttcagtttttctgttgtatttcatttccagttttcaggcagttatttttattattgtactttaagcttttaagatgaattgttatacaagaggtgcttatgcttagcttgatgaccaggatgttatttttaacaaaatgattgctgaagtgtttcatcctggctggtccttcacttgtgttggatttagaagtgaatgtgtttggaatatggcctacagagaatagaaacaaatccatgtaaacaattttgaaggaggcatgggagctaaaaatcctgtgatactaagatctcagtcatatgaattacaacgtagtatttactggcaagaaggagaaagttgaaggactcagctaaaggagtacagcaattgtagtaactgacacatcctctctttgcaagctgctgactgggcacactcatgccaagtttcagaattattggtcttctgggtttttgctttttaaaagaggtgtgggagcagaggaatggaaacaatcgtgagtttttgagctagggaaagttggagctcctttaatctttttaaaggatcagtgctgccctaagtgaataaactcaattgtccatctttattttagagttttaatgaattcaaggaagggagcatagcatatctgtggcaaactattttccactcaaatcctgagttattgctgcatgctttaatttcttccctttcagcatctgagaaccttaaagccaatgtctgcgatctttttttggatatttatacttttagatatatagtacctttaagtagcagtatgggacaaggcttgtaaatgttttgtctaatgttctattgtcaccttttatgcatttatcacttccaaatctaactttgcacaagtaacccatgtaaaaaaaaatgtacatttttcaaaagttgtaaataaaaataaccttaaaat

SEQ ID NO: 453544 - DNA, 1746 bp, Homo sapiens
tacactggggtggtgcttagccggcgccagaccgaccctcgacttcggagaggcagcgcggttcctctgggtgcttccgcctccccttctcctgcttctccagcctcttcggcctcctcgcccgccgcgggaacccgagaccccagtgtatgccccacccctgaccccgctcgcgacatgtccaccccggctcggcggcgcctcatgcgggacttcaagaggttgcaggaggatcctccagccggagtcagcggggctccgtccgagaacaacataatggtgtggaacgcggtcattttcgggcctgaagggaccccgtttgaggatggaacatttaaacttacaatagaattcactgaagaatatccaaataaaccacctacagttagatttgtctctaagatgttccatccaaatgtctatgcagatggtagtatatgtctggacatacttcagaaccgttggagtccaacctatgatgtgtcttccattctaacatccatacagtctctgttggatgaacccaatcccaatagtccagcaaacagccaggctgctcagctgtaccaggagaacaaacgggaatatgaaaagcgtgtttctgcaatagtagaacaaagctggcgtgattgttgaccccgggtacagtttaaagaagctggccataagaaaaatatatattgatgtgtttgtcacctccctactcctgtcattacatttactttattaaaagcaaaataactgttgtgctgtttccatcttccttgccaagttttcctaccccttctaccctctccttaaacatcagaaaacaccctctatgaaatcaaatgtactgtacctgggttacttgcaaaaattactaatgcttcagtttttctgttgtatttcatttccagttttcaggcagttatttttattattgtactttaagcttttaagatgaattgttatacaagaggtgcttatgcttagcttgatgaccaggatgttatttttaacaaaatgattgctgaagtgtttcatcctggctggtccttcacttgtgttggatttagaagtgaatgtgtttggaatatggcctacagagaatagaaacaaatccatgtaaacaattttgaaggaggcatgggagctaaaaatcctgtgatactaagatctcagtcatatgaattacaacgtagtatttactggcaagaaggagaaagttgaaggactcagctaaaggagtacagcaattgtagtaactgacacatcctctctttgcaagctgctgactgggcacactcatgccaagtttcagaattattggtcttctgggtttttgctttttaaagttggagctcctttaatctttttaaaggatcagtgctgccctaagtgaataaactcaattgtccatctttattttagagttttaatgaattcaaggaagggagcatagcatatctgtggcaaactattttccactcaaatcctgagttattgctgcatgctttaatttcttccctttcagcatctgagaaccttaaagccaatgtctgcgatctttttttggatatttatacttttagatatatagtacctttaagtagcagtatgggacaaggcttgtaaatgttttgtctaatgttctattgtcaccttttatgcatttatcacttccaaatctaactttgcacaagtaacccatgtaaaaaaaaatgtacatttttcaaaagttgtaaataaaaataaccttaaaat

SEQ ID NO: 453545 - DNA, 1765 bp, Homo sapiens
tacactggggtggtgcttagccggcgccagaccgaccctcgacttcggagaggcagcgcggttcctctgggtgcttccgcctccccttctcctgcttctccagcctcttcggcctcctcgcccgccgcgggaacccgagaccccagtgtatgccccacccctgaccccgctcgcgacatgtccaccccggctcggcggcgcctcatgcgggacttcaagaggttgcaggaggatcctccagccggagtcagcggggctccgtccgagaacaacataatggtgtggaacgcggtcattttcgggcctgaagggaccccgtttgaggatggaacatttaaacttacaatagaattcactgaagaatatccaaataaaccacctacagttagatttgtctctaagatgttccatccaaatggcaagtatcacttttagtacagtgttttaaactactatagtgtttattatggagtattccacatttcctgtgtattttgtggtgcctgagtatttgtttaggcagcttgctgctttcttgaaagctgaacttgttcttggttgtctgtggctgtcttgtcctagaactgaagcagtggaggtattttccctttgcttggagtctgggagcctcctgattttgatgacctttgtcatttacttattaaacaaaatgaaggatgctcttgaggtttccttttaatgctaggccagattgggatagtcttgtgttgtaattattttcactagcgtttagaaaagtagttttcattggacgcatatcagaattactgtggaacattttaaaaacacagatgccttcgccccactccaaacctaatgaataggattctgttgttgaaggccaggcatacggtattgtcagaaaagcaccacaggtgattctaacttaaccactttgcactttttaaaatagtagtaagcctagaacagcttgccttttatttaggttaatgaagtatttttcagggtatcagatatgtttatctttatgccaaaatgaaatcttgtgaactctgagtgatcttttgttatttcagataggggatacagcctacaaatttggtggaatgaatttcccacatgtctgtggatagctagggaccctgttcaaaaatgtttctgatttcctggataatagggcagccttttccaaaggatgaacactaaatatcttccagttttatactgatcacatctgacattctctgatcatcctgattatttcactagtggtggttatgacttatctttttaggcagttaactgggaagcaacataggaatctttaaacttcaaaagcaaagtattcttgactatttttgttttgtctataatgttaaaaccttagtggtcttgttacgtttaatgtacctacttctttgttcttagtctatgcagatggtagtatatgtctggacatacttcagaaccgttggagtccaacctatgatgtgtcttccattctaacatccatacaggtgaatttttccttaatgtgacgaactataacttttaatatgtttatattagcaattgaattgtttttgaaagtcataatgtaatagatctttttatttttggtcaaagcttgtttgttttatagatgaaaagtagaccattaagacccaagtcagctgggtacagtcgctcacacctgtaacctcagcactttggcaggccaaggtgggaggattgcttgagttcaggagtttgagaccagcctgggcaacatagtgagactctt

SEQ ID NO: 453546 - DNA, 1367 bp, Homo sapiens
tacactggggtggtgcttagccggcgccagaccgaccctcgacttcggagaggcagcgcggttcctctgggtgcttccgcctccccttctcctgcttctccagcctcttcggcctcctcgcccgccgcgggaacccgagaccccagtgtatgccccacccctgaccccgctcgcgacatgtccaccccggctcggcggcgcctcatgcgggacttcaagaggttgcaggaggatcctccagccggagtcagcggggctccgtccgagaacaacataatggtgtggaacgcggtcattttcgggcctgaagggaccccgtttgaggatggtaagagagagtttctttacccacttttcaggagcctggtcatctggggaaagggttcccagtcatcctggaagtgtctcctgcttaggaacctgcctctgcctagcctctgtctgctaaaggcttgagtggaatgcagtgtgtggctggtggttctggatattgtatgcttgactagaactgcacctttcttcttgctttcttaaaaaaaaaatctgtgtaaggcagtcactttttaaaaggagcaatcatagcactggtattaaggatttttgaggcttgggctgtaattctgctaaattcagccctccatcactgaattagtataaacccaaccagttgctgataggcagcagagaccccagagaccatctggttcagaattctaccccaagggcaggagttgtgttcagcaggtgcttggtagatgtgtgttggatgttgagtggatgcgagaatcccttgcgtacaactgtctggtttctacaatctgacattgaatgcctgtcagcctcactgctctaagatggtcttaaatgcctcatttgagtacagtattctttcttatttttaagtgaatttgcagtgtgtgctttcatcaagacgttatgatgagtaatttcaaagcagcttcacaattgaagttagccttaatgtacccttttgatcagtgtcctgcctacctgaaagtactacatgtaccagtaggtacataatttttaattgatttaggtttaacttttaaaaacacgtgtaaattgctttttaaaaacttctgattttagataattatagattcatatgcagttgcaagaaataatagagacaccctttatacccttaacccagtcctctacccaaaccctcccatttggtaacatcttgaatgactagaccctatcacaaccggaaaaatgacactgatagttctacactcagttgtgtgtgtgtgtggttgttttttgaaagtttaatacatttaaaggatgattaaagtatttgaactcatgaaattctttaatatttgaggttttaaaaa

SEQ ID NO: 453547 - DNA, 2609 bp, Homo sapiens
aacgggccttcttgcgacgctcgggtctgggtccgggtccggacgtgcaacagaagccgtcagtggccccgctggctaaaaaagggcaagcatcggaggctcgagccagcggccgcggcgcttcccgacagttcctaattcggggcgctacgccggccccaccacctgttcccggcagccaatggggccgcggggggcggccggggcggagcgcggctacaaaaggcctcgggccccgcgcgcccgcccaccccgctccgggcgcgctctcgggaaggcttggaccgacgcggcccagaggccaggaacattccgcgcgtggaccagccgggccagggcgatgctgcgggtgcggtgtctgcgcggcgggagccgcggcgccgaggcggtgcactacatcggatctcggcttggacgaaccttgacaggatgggtgcagcgaactttccagagcacccaggcagctacggcttcctcccggaactcctgtgcagctgacgacaaagccactgagcctctgcccaaggactgccctgtctcttcttacaacgaatgggaccccttagaggaagtgatagtgggcagagcagaaaacgcctgtgttccaccgttcaccatcgaggtgaaggccaacacatatgaaaagtactggccattttaccagaagcaaggagggcattattttcccaaagatcatttgaaaaaggctgttgctgaaattgaagaaatgtgcaatattttaaaaacggaaggagtgacagtaaggaggcctgaccccattgactggtcattgaagtataaaactcctgattttgagtctacgggtttatacagtgcaatgcctcgagacatcctgatagttgtgggcaatgagattatcgaggctcccatggcatggcgttcacgcttctttgagtaccgagcgtacaggtcaattatcaaagactacttccaccgtggcgccaagtggacaacagctcctaagcccacaatggctgatgagctttataaccaggattatcccatccactctgtagaagacagacacaaattggctgctcagggaaaatttgtgacaactgagtttgagccatgctttgatgctgctgacttcattcgagctggaagagatatttttgcacagagaagccaggttacaaactacctaggcattgaatggatgcgtaggcatcttgctccagactacagagtgcatatcatctcctttaaagatcccaatcccatgcatattgatgctaccttcaacatcattggacctggtattgtgctttccaaccctgaccgaccatgtcaccagattgatcttttcaagaaagcaggatggactatcattactcctccaacaccaatcatcccagacgatcatccactctggatgtcatccaaatggctttccatgaatgtcttaatgctagatgaaaaacgtgttatggtggatgccaatgaagttccaattcaaaagatgtttgaaaagctgggtatcactaccattaaagttaacattcgtaatgccaattccctgggaggaggcttccattgctggacctgcgatgtccggcgccgaggcaccttacagtcctacttggactgaacaggcctgatggagcttgtggctggcctcagatacacctaagaagcttaggggcaaggttcattctcctgctttaaaaagtgcatgaactgtagtgctttaaacaatcatctccttaacaggggtcgtaagcctggtttgcttctattacttttctttgacataaagaaaataacttctgctaggtattactctctactcctaaagttatttactatttggcttcaagtataaaattttggtgaatgtgtaccaagaaaaaattagtcacctgagtaacttggccactaataattaaccatctacctctgtttttaattttctttccaaaaggcagcttgaaatgttggtcctaatcttaattttttttcctcttctatagacttgagaatgtttttctctaaatgagagaaagacttagaatgtacacagatccaaaatagaatcagattatctctttttttctaaaggagagaaagacttagaacatacacagatcctaagtagaaccaggtaattgtctctttttctaataaggaatttgggtaatttttaattttttgttttttaaaaaataacctagactatgcaaaacatcaaagtgaattttccatgaatgtttttaatattctcatctcaacattgtgatatatgctactaaaaaccttttcatatacatcttacctcatttcaagtgaattattttaatctttttctctctttccaaaaatttacaggaatgtttagtgtaattggatttcgctatcagttcccatccttaagttttgatattcaatatctgatagatacactgcatctttggtcatctaagatttgtttacaaatgtgcaaattatttagagcatagactttataagcattaaaaaaaactaatggaggtaaaacctaaatgcgatgtgaaataattttagtgttgatactgtatgtgtatttttattctaataaacttttgtgttccagattgaaaaaaaaaaaa

SEQ ID NO: 453548 - DNA, 846 bp, Homo sapiens
caagcatacaccaccatgcctggctaattttgtatttttagtagagaggggcttggccaggctggtctcgaactcctgacctcaagtgatccatccacctatgcctcccatagcattgggattatgggtgtgagctaccatgcgcgactaggaaagtctttctgaatggctcatgccaccttcctctccctggctataccaatggaccctttagtgactttgtagcctatcctcctctcaaaataattagctccttgaggaagaataatagattttctttttaaaaccccactatatctaacacaacagattcttcctaaataccattggttaaataggccatgcacatcatagccttgtcattacagatggtaccagattaaactgattgttggatttgctttggtacctgtataaccatacaaacccagatattaaaacaccagctctgttccattgtttccttatggtggcctggtgaagttaatctgtatcagataaactctccttatatgtgaatatgtaaagtcagctttttaggtcagctaaattttgctttgcctactaaattaacatggtaaaattagaaacagtctgacaaagtagttaatgtataattctaaaaggccttgagattttagtacttgaccattttgaacatttggtaggtacatctgctcagtctattgacttgtgaatagtcaatagaacaaaacttcagagttctctgttgactttttggagaagattttatattagcagatgaaatatagttggtgaaaataaaattggaagagagtctgtaggcctactttctctatgagaatcgtcatgttagtccatcta

SEQ ID NO: 453549 - DNA, 2678 bp, Homo sapiens
atgataaatttaatcccgtttcagaccttgaaggaagtaattttgaagttattggcaacatacatcaatattctaatttattagttgatgacaccgaccgtatcagtcctgatgacatcggcaatgatattcatgagtttttacacggaggagataagtgatggctgttgaatatgaaaatggtggtcatggttacgtggaacatgcatctataggaggcgttattgtacacgtgttttatgcagacgataaggaagaggaggataaataatgttagataactttgttgaattgaaaaataagtatgccgatgaacttggaaaccgtggtagaaagtgtgatgagatgaaattcaccagcgaaaaagttaatgaattgatcggtgttgatgaagcgtttaaagttccaaacaagttaatgtcaatcatgatgaatcgtgaacaacgtgagcaaacgtttaaagcatttttggaagttgagcgtgatacatcattcgattggttccatgaatattttccagagcacccaggcagctacggcttcctcccggaactcctgtgcagctgacgacaaagccactgagcctctgcccaaggactgccctgtctcttcttacaacgaatgggaccccttagaggaagtgatagtgggcagagcagaaaacgcctgtgttccaccgttcaccatcgaggtgaaggccaacacatatgaaaagtactggccattttaccagaagcaaggagggcattattttcccaaagatcatttgaaaaaggctgttgctgaaattgaagaaatgtgcaatattttaaaaacggaaggagtgacagtaaggaggcctgaccccattgactggtcattgaagtataaaactcctgattttgagtctacgggtttatacagtgcaatgcctcgagacatcctgatagttgtgggcaatgagattatcgaggctcccatggcatggcgttcacgcttctttgagtaccgagcgtacaggtcaattatcaaagactacttccaccgtggcgccaagtggacaacagctcctaagcccacaatggctgatgagctttataaccaggattatcccatccactctgtagaagacagacacaaattggctgctcagggaaaatttgtgacaactgagtttgagccatgctttgatgctgctgacttcattcgagctggaagagatatttttgcacagagaagccaggttacaaactacctaggcattgaatggatgcgtaggcatcttgctccagactacagagtgcatatcatctcctttaaagatcccaatcccatgcatattgatgctaccttcaacatcattggacctggtattgtgctttccaaccctgaccgaccatgtcaccagattgatcttttcaagaaagcaggatggactatcattactcctccaacaccaatcatcccagacgatcatccactctggatgtcatccaaatggctttccatgaatgtcttaatgctagatgaaaaacgtgttatggtggatgccaatgaagttccaattcaaaagatgtttgaaaagctgggtatcactaccattaaagttaacattcgtaatgccaattccctgggaggaggcttccattgctggacctgcgatgtccggcgccgaggcaccttacagtcctacttggactgaacaggcctgatggagcttgtggctggcctcagatacacctaagaagcttaggggcaaggttcattctcctgctttaaaaagtgcatgaactgtagtgctttaaacaatcatctccttaacaggggtcgtaagcctggtttgcttctattacttttctttgacataaagaaaataacttctgctaggtattactctctactcctaaagttatttactatttggcttcaagtataaaattttggtgaatgtgtaccaagaaaaaattagtcacctgagtaacttggccactaataattaaccatctacctctgtttttaattttctttccaaaaggcagcttgaaatgttggtcctaatcttaattttttttcctcttctatagacttgagaatgtttttctctaaatgagagaaagacttagaatgtacacagatccaaaatagaatcagattatctctttttttctaaaggagagaaagacttagaacatacacagatcctaagtagaaccaggtaattgtctctttttctaataaggaatttgggtaatttttaattttttgttttttaaaaaataacctagactatgcaaaacatcaaagtgaattttccatgaatgtttttaatattctcatctcaacattgtgatatatgctactaaaaaccttttcatatacatcttacctcatttcaagtgaattattttaatctttttctctctttccaaaaatttacaggaatgtttagtgtaattggatttcgctatcagttcccatccttaagttttgatattcaatatctgatagatacactgcatctttggtcatctaagatttgtttacaaatgtgcaaattatttagagcatagactttataagcattaaaaaaaactaatggaggtaaaacctaaatgcgatgtgaaataattttagtgttgatactgtatgtgtatttttattctaataaacttttgtgttccagattgaaaaaaaaaaaa

SEQ ID NO: 453550 - DNA, 2555 bp, Homo sapiens
aacgggccttcttgcgacgctcgggtctgggtccgggtccggacgtgcaacagaagccgtcagtggccccgctggctaaaaaagggcaagcatcggaggctcgagccagcggccgcggcgcttcccgacagttcctaattcggggcgctacgccggccccaccacctgttcccggcagccaatggggccgcggggggcggccggggcggagcgcggctacaaaaggcctcgggccccgcgcgcccgcccaccccgctccgggcgcgctctcgggaaggcttggaccgacgcggcccagaggccaggaacattccgcgcgtggaccagccgggccagggcgatgctgcgggtgcggtgtctgcgcggcgggagccgcggcgccgaggcggtgcactacatcggatctcggcttggacgaaccttgacaggatgggtgcagcgaactttccagagcacccaggcagctacggcttcctcccggaactcctgtgcagctgacgacaaagccactgagcctctgcccaaggactgccctgtctcttcttacaacgaatgggaccccttagaggaagtgatagtgggcagagcagaaaacgcctgtgttccaccgttcaccatcgaggtgaaggccaacacatatgaaaagtactggccattttaccagaagcaaggagggcattattttcccaaagatcatttgaaaaaggctgttgctgaaattgaagaaatgtgcaatattttaaaaacggaaggagtgacagtaaggaggcctgaccccattgactggtcattgaagtataaaactcctgattttgagtctacgggtttatacagtgcaatgcctcgagacatcctgatagttgtgggcaatgagattatcgaggctcccatggcatggcgttcacgcttctttgagtaccgagcgtacaggtcaattatcaaagactacttccaccgtggcgccaagtggacaacagctcctaagcccacaatggctgatgagctttataaccaggattatcccatccactctgtagaagacagacacaaattggctgctcagggaactggaagagatatttttgcacagagaagccaggttacaaactacctaggcattgaatggatgcgtaggcatcttgctccagactacagagtgcatatcatctcctttaaagatcccaatcccatgcatattgatgctaccttcaacatcattggacctggtattgtgctttccaaccctgaccgaccatgtcaccagattgatcttttcaagaaagcaggatggactatcattactcctccaacaccaatcatcccagacgatcatccactctggatgtcatccaaatggctttccatgaatgtcttaatgctagatgaaaaacgtgttatggtggatgccaatgaagttccaattcaaaagatgtttgaaaagctgggtatcactaccattaaagttaacattcgtaatgccaattccctgggaggaggcttccattgctggacctgcgatgtccggcgccgaggcaccttacagtcctacttggactgaacaggcctgatggagcttgtggctggcctcagatacacctaagaagcttaggggcaaggttcattctcctgctttaaaaagtgcatgaactgtagtgctttaaacaatcatctccttaacaggggtcgtaagcctggtttgcttctattacttttctttgacataaagaaaataacttctgctaggtattactctctactcctaaagttatttactatttggcttcaagtataaaattttggtgaatgtgtaccaagaaaaaattagtcacctgagtaacttggccactaataattaaccatctacctctgtttttaattttctttccaaaaggcagcttgaaatgttggtcctaatcttaattttttttcctcttctatagacttgagaatgtttttctctaaatgagagaaagacttagaatgtacacagatccaaaatagaatcagattatctctttttttctaaaggagagaaagacttagaacatacacagatcctaagtagaaccaggtaattgtctctttttctaataaggaatttgggtaatttttaattttttgttttttaaaaaataacctagactatgcaaaacatcaaagtgaattttccatgaatgtttttaatattctcatctcaacattgtgatatatgctactaaaaaccttttcatatacatcttacctcatttcaagtgaattattttaatctttttctctctttccaaaaatttacaggaatgtttagtgtaattggatttcgctatcagttcccatccttaagttttgatattcaatatctgatagatacactgcatctttggtcatctaagatttgtttacaaatgtgcaaattatttagagcatagactttataagcattaaaaaaaactaatggaggtaaaacctaaatgcgatgtgaaataattttagtgttgatactgtatgtgtatttttattctaataaacttttgtgttccagattgaaaaaaaaaaaa

SEQ ID NO: 453551 - DNA, 2554 bp, Homo sapiens
aacgggccttcttgcgacgctcgggtctgggtccgggtccggacgtgcaacagaagccgtcagtggccccgctggctaaaaaagggcaagcatcggaggctcgagccagcggccgcggcgcttcccgacagttcctaattcggggcgctacgccggccccaccacctgttcccggcagccaatggggccgcggggggcggccggggcggagcgcggctacaaaaggcctcgggccccgcgcgcccgcccaccccgctccgggcgcgctctcgggaaggcttggaccgacgcggcccagaggccaggaacattccgcgcgtggaccagccgggccagggcgatgctgcgggtgcggtgtctgcgcggcgggagccgcggcgccgaggcggtgcactacatcggatctcggcttggacgaaccttgacaggatgggtgcagcgaactttccagagcacccaggcagctacggcttcctcccggaactcctgtgcagctgacgacaaagccactgagcctctgcccaaggactgccctgtctcttcttacaacgaatgggaccccttagaggaagtgatagtgggcagagcagaaaacgcctgtgttccaccgttcaccatcgaggtgaaggccaacacatatgaaaagtactggccattttaccagaagcaaggagggcattattttcccaaagatcatttgaaaaaggctgttgctgaaattgaagaaatgtgcaatattttaaaaacggaaggagtgacagtaaggaggcctgaccccattgactggtcattgaaatcctgatagttgtgggcaatgagattatcgaggctcccatggcatggcgttcacgcttctttgagtaccgagcgtacaggtcaattatcaaagactacttccaccgtggcgccaagtggacaacagctcctaagcccacaatggctgatgagctttataaccaggattatcccatccactctgtagaagacagacacaaattggctgctcagggaaaatttgtgacaactgagtttgagccatgctttgatgctgctgacttcattcgagctggaagagatatttttgcacagagaagccaggttacaaactacctaggcattgaatggatgcgtaggcatcttgctccagactacagagtgcatatcatctcctttaaagatcccaatcccatgcatattgatgctaccttcaacatcattggacctggtattgtgctttccaaccctgaccgaccatgtcaccagattgatcttttcaagaaagcaggatggactatcattactcctccaacaccaatcatcccagacgatcatccactctggatgtcatccaaatggctttccatgaatgtcttaatgctagatgaaaaacgtgttatggtggatgccaatgaagttccaattcaaaagatgtttgaaaagctgggtatcactaccattaaagttaacattcgtaatgccaattccctgggaggaggcttccattgctggacctgcgatgtccggcgccgaggcaccttacagtcctacttggactgaacaggcctgatggagcttgtggctggcctcagatacacctaagaagcttaggggcaaggttcattctcctgctttaaaaagtgcatgaactgtagtgctttaaacaatcatctccttaacaggggtcgtaagcctggtttgcttctattacttttctttgacataaagaaaataacttctgctaggtattactctctactcctaaagttatttactatttggcttcaagtataaaattttggtgaatgtgtaccaagaaaaaattagtcacctgagtaacttggccactaataattaaccatctacctctgtttttaattttctttccaaaaggcagcttgaaatgttggtcctaatcttaattttttttcctcttctatagacttgagaatgtttttctctaaatgagagaaagacttagaatgtacacagatccaaaatagaatcagattatctctttttttctaaaggagagaaagacttagaacatacacagatcctaagtagaaccaggtaattgtctctttttctaataaggaatttgggtaatttttaattttttgttttttaaaaaataacctagactatgcaaaacatcaaagtgaattttccatgaatgtttttaatattctcatctcaacattgtgatatatgctactaaaaaccttttcatatacatcttacctcatttcaagtgaattattttaatctttttctctctttccaaaaatttacaggaatgtttagtgtaattggatttcgctatcagttcccatccttaagttttgatattcaatatctgatagatacactgcatctttggtcatctaagatttgtttacaaatgtgcaaattatttagagcatagactttataagcattaaaaaaaactaatggaggtaaaacctaaatgcgatgtgaaataattttagtgttgatactgtatgtgtatttttattctaataaacttttgtgttccagattgaaaaaaaaaaaa

SEQ ID NO: 453552 - DNA, 2555 bp, Homo sapiens
aacgggccttcttgcgacgctcgggtctgggtccgggtccggacgtgcaacagaagccgtcagtggccccgctggctaaaaaagggcaagcatcggaggctcgagccagcggccgcggcgcttcccgacagttcctaattcggggcgctacgccggccccaccacctgttcccggcagccaatggggccgcggggggcggccggggcggagcgcggctacaaaaggcctcgggccccgcgcgcccgcccaccccgctccgggcgcgctctcgggaaggcttggaccgacgcggcccagaggccaggaacattccgcgcgtggaccagccgggccagggcgatgctgcgggtgcggtgtctgcgcggcgggagccgcggcgccgaggcggtgcactacatcggatctcggcttggacgaaccttgacaggatgggtgcagcgaactttccagagcacccaggcagctacggcttcctcccggaactcctgtgcagctgacgacaaagccactgagcctctgcccaaggactgccctgtctcttcttacaacgaatgggaccccttagaggaagtgatagtgggcagagcagaaaacgcctgtgttccaccgttcaccatcgaggtgaaggccaacacatatgaaaagtactggccattttaccagaagcaaggagggcattattttcccaaagatcatttgaaaaaggctgttgctgaaattgaagaaatgtgcaatattttaaaaacggaaggagtgacagtaaggaggcctgaccccattgactggtcattgaagtataaaactcctgattttgagtctacgggtttatacagtgcaatgcctcgagacatcctgatagttgtgggcaatgagattatcgaggctcccatggcatggcgttcacgcttctttgagtaccgagcgtacaggtcaattatcaaagactacttccaccgtggcgccaagtggacaacagctcctaagcccacaatggctgatgagctttataaccaggattatcccatccactctgtagaagacagacacaaattggctgctcagggaaaatttgtgacaactgagtttgagccatgctttgatgctgctgacttcattcgagctggaagagatatttttgcacagagaagccaggttacaaactacctaggcattgaatggatgcgtaggcatcttgctccagactacagagtgcatatcatctcctttaaagatcccaatcccatgcatattgatgctaccttcaacatcattggacctggtattgtgctttccaaccctgaccgaccatgtcaccagattgatcttttcaagaaagcaggatggactatcattactcctccaacaccaatcatcccagacgatcatccactctggatgtcatccaaatggctttccatgaatgtcttaatgctagatgaaaaacgtgttatggtggatgccaatgaagttccaattcccaattccctgggaggaggcttccattgctggacctgcgatgtccggcgccgaggcaccttacagtcctacttggactgaacaggcctgatggagcttgtggctggcctcagatacacctaagaagcttaggggcaaggttcattctcctgctttaaaaagtgcatgaactgtagtgctttaaacaatcatctccttaacaggggtcgtaagcctggtttgcttctattacttttctttgacataaagaaaataacttctgctaggtattactctctactcctaaagttatttactatttggcttcaagtataaaattttggtgaatgtgtaccaagaaaaaattagtcacctgagtaacttggccactaataattaaccatctacctctgtttttaattttctttccaaaaggcagcttgaaatgttggtcctaatcttaattttttttcctcttctatagacttgagaatgtttttctctaaatgagagaaagacttagaatgtacacagatccaaaatagaatcagattatctctttttttctaaaggagagaaagacttagaacatacacagatcctaagtagaaccaggtaattgtctctttttctaataaggaatttgggtaatttttaattttttgttttttaaaaaataacctagactatgcaaaacatcaaagtgaattttccatgaatgtttttaatattctcatctcaacattgtgatatatgctactaaaaaccttttcatatacatcttacctcatttcaagtgaattattttaatctttttctctctttccaaaaatttacaggaatgtttagtgtaattggatttcgctatcagttcccatccttaagttttgatattcaatatctgatagatacactgcatctttggtcatctaagatttgtttacaaatgtgcaaattatttagagcatagactttataagcattaaaaaaaactaatggaggtaaaacctaaatgcgatgtgaaataattttagtgttgatactgtatgtgtatttttattctaataaacttttgtgttccagattgaaaaaaaaaaaa

SEQ ID NO: 453553 - DNA, 1622 bp, Homo sapiens
caaatgcaggccactatgcccagcaagttatttttttttatttgtagagatgatgtcttgctgtgttccccagtgaggcaccatctctgggcaatagtctcaaactcctaggctcaaggaatcctcctgcctcagcctcccaaagtgctaggattataccatgcccagccaagatatgacttttaaaagaaaacagggtgaaattcaaatgtataatgagtacagattgattcataccatttatagataaattgttttaagattaaaataaatgttcacatggaaagtgaactactgaaagaactgagctgtcactttaatattcttcacttgtaaatccttgctttaaacaaaaatgatagcggacatggtttaacagttgttgctgtttttagatcatccactctggatgtcatccaaatggctttccatgaatgtcttaatgctagatgaaaaacgtgttatggtggatgccaatgaagttccaattcaaaagatgtttgaaaagctgggtatcactaccattaaagttaacattcgtaatgccaattccctgggaggaggcttccattgctggacctgcgatgtccggcgccgaggcaccttacagtcctacttggactgaacaggcctgatggagcttgtggctggcctcagatacacctaagaagcttaggggcaaggttcattctcctgctttaaaaagtgcatgaactgtagtgctttaaacaatcatctccttaacaggggtcgtaagcctggtttgcttctattacttttctttgacataaagaaaataacttctgctaggtattactctctactcctaaagttatttactatttggcttcaagtataaaattttggtgaatgtgtaccaagaaaaaattagtcacctgagtaacttggccactaataattaaccatctacctctgtttttaattttctttccaaaaggcagcttgaaatgttggtcctaatcttaattttttttcctcttctatagacttgagaatgtttttctctaaatgagagaaagacttagaatgtacacagatccaaaatagaatcagattatctctttttttctaaaggagagaaagacttagaacatacacagatcctaagtagaaccaggtaattgtctctttttctaataaggaatttgggtaatttttaattttttgttttttaaaaaataacctagactatgcaaaacatcaaagtgaattttccatgaatgtttttaatattctcatctcaacattgtgatatatgctactaaaaaccttttcatatacatcttacctcatttcaagtgaattattttaatctttttctctctttccaaaaatttacaggaatgtttagtgtaattggatttcgctatcagttcccatccttaagttttgatattcaatatctgatagatacactgcatctttggtcatctaagatttgtttacaaatgtgcaaattatttagagcatagactttataagcattaaaaaaaactaatggaggtaaaacctaaatgcgatgtgaaataattttagtgttgatactgtatgtgtatttttattctaataaacttttgtgttccagattgaaaaaaaaaaaa

SEQ ID NO: 453554 - DNA, 1396 bp, Homo sapiens
aaaagttatcgaaaccattcgttgtggtgcgcgggccctggataggtaatttgaacatggatcgtatgcctgtctcctagagagagtccttggtcatgattagtgctctggatacctcatcattaaagaaagcagcccagggctggtcataggcctgtagccgttcttgaatgacatcccacgatagaatggtctgagtgtctattattgggatctatcgtactaggagtgccagccgcgagctcggatcatctaaaattacagcatcgctgttcgatgagcttgggtatcactaccattaaagttaacattcgtaatgccaattccctgggaggaggcttccattgctggacctgcgatgtccggcgccgaggcaccttacagtcctacttggactgaacaggcctgatggagcttgtggctggcctcagatacacctaagaagcttaggggcaaggttcattctcctgctttaaaaagtgcatgaactgtagtgctttaaacaatcatctccttaacaggggtcgtaagcctggtttgcttctattacttttctttgacataaagaaaataacttctgctaggtattactctctactcctaaagttatttactatttggcttcaagtataaaattttggtgaatgtgtaccaagaaaaaattagtcacctgagtaacttggccactaataattaaccatctacctctgtttttaattttctttccaaaaggcagcttgaaatgttggtcctaatcttaattttttttcctcttctatagacttgagaatgtttttctctaaatgagagaaagacttagaatgtacacagatccaaaatagaatcagattatctctttttttctaaaggagagaaagacttagaacatacacagatcctaagtagaaccaggtaattgtctctttttctaataaggaatttgggtaatttttaattttttgttttttaaaaaataacctagactatgcaaaacatcaaagtgaattttccatgaatgtttttaatattctcatctcaacattgtgatatatgctactaaaaaccttttcatatacatcttacctcatttcaagtgaattattttaatctttttctctctttccaaaaatttacaggaatgtttagtgtaattggatttcgctatcagttcccatccttaagttttgatattcaatatctgatagatacactgcatctttggtcatctaagatttgtttacaaatgtgcaaattatttagagcatagactttataagcattaaaaaaaactaatggaggtaaaacctaaatgcgatgtgaaataattttagtgttgatactgtatgtgtatttttattctaataaacttttgtgttccagattgaaaaaaaaaaaa

SEQ ID NO: 453555 - DNA, 1904 bp, Homo sapiens
aacgggccttcttgcgacgctcgggtctgggtccgggtccggacgtgcaacagaagccgtcagtggccccgctggctaaaaaagggcaagcatcggaggctcgagccagcggccgcggcgcttcccgacagttcctaattcggggcgctacgccggccccaccacctgttcccggcagccaatggggccgcggggggcggccggggcggagcgcggctacaaaaggcctcgggccccgcgcgcccgcccaccccgctccgggcgcgctctcgggaaggcttggaccgacgcggcccagaggccaggaacattccgcgcgtggaccagccgggccagggcgatgctgcgggtgcggtgtctgcgcggcgggagccgcggcgccgaggcggtgcactacatcggatctcggcttggacgaaccttgacaggatgggtgcagcgaactttccagagcacccaggcagctacggcttcctcccggaactcctgtgcagctgacgacaaagccactgagcctctgcccaaggactgccctgtctcttcttacaacgaatgggaccccttagaggaagtgatagtgggcagagcagaaaacgcctgtgttccaccgttcaccatcgaggtgaaggccaacacatatgaaaagtactggccattttaccagaagcaaggagggcattattttcccaaagatcatttgaaaaaggctgttgctgaaattgaagaaatgtgcaatattttaaaaacggaaggagtgacagtaaggaggcctgaccccattgactggtcattgaagtataaaactcctgattttgagtctacgggtttatacagtgcaatgcctcgagacatcctgatagttgtgggcaatgagattatcgaggctcccatggcatggcgttcacgcttctttgagtaccgagcgtacaggtcaattatcaaagactacttccaccgtggcgccaagtggacaacagctcctaagcccacaatggctgatgagctttataaccaggattatcccatccactctgtagaagacagacacaaattggctgctcagggaaaatttgtgacaactgagtttgagccatgctttgatgctgctgacttcattcgagctggaagagatatttttgcacagagaagccaggttacaaactacctaggcattgaatggatgcgtaggcatcttgctccagactacagagtgcatatcatctcctttaaagatcccaatcccatgcatattgatgctaccttcaacatcattggacctggtattgtgctttccaaccctgaccgaccatgtcaccagattgatcttttcaagaaagcaggatggactatcattactcctccaacaccaatcatcccagacgatcatccactctggatgtcatccaaatggctttccatgaatgtcttaatgctagatgaaaaacgtgttatggtggatgccaatgaagttccaattcaaaagatgtttgaaaagctgggtatgtacaacaaatgaaacatgttgtcatacatgaaaacgttaaatgagaagaactaaagaaatgacatgctaggtttgataaatggtttgtctaattcaattttgattccttttagaggcaccaagttattatttcacagaaagtcagtatttttattttcaacacacgtagccccaacaagttggagatgcatcctgagctcctgagacatccccttaacaataagtttataaatcttatatgacttagccaacgttttggtgcccatgtgcagaaaaccacccctttgcaggtgagcagatagcttgttcagcccttcttcaaataagaaatcattgtgggtcctttatgacttttatgtgtgataagcatagttaacaaagtagcgaaatgcaagaaagt

SEQ ID NO: 453556 - DNA, 1226 bp, Homo sapiens
aacgggccttcttgcgacgctcgggtctgggtccgggtccggacgtgcaacagaagccgtcagtggccccgctggctaaaaaagggcaagcatcggaggctcgagccagcggccgcggcgcttcccgacagttcctaattcggggcgctacgccggccccaccacctgttcccggcagccaatggggccgcggggggcggccggggcggagcgcggctacaaaaggcctcgggccccgcgcgcccgcccaccccgctccgggcgcgctctcgggaaggcttggaccgacgcggcccagaggccaggaacattccgcgcgtggaccagccgggccagggcgatgctgcgggtgcggtgtctgcgcggcgggagccgcggcgccgaggcggtgcactacatcggatctcggcttggacgaaccttgacaggatgggtgcagcgaactttccagagcacccaggcagctacggcttcctcccggaactcctgtgcagctgacgacaaagccactgagcctctgcccaaggactgccctgtctcttcttacaacgaatgggaccccttagaggaagtgatagtgggcagagcagaaaacgcctgtgttccaccgttcaccatcgaggtgaaggccaacacatatgaaaagtactggccattttaccagaagcaaggagggcattattttcccaaagatcatttgaaaaaggctgttgctgaaattgaagaaatgtgcaatattttaaaaacggaaggagtgacagtaaggaggcctgaccccattgactggtcattgaagtataaaactcctgattttgagtctacgggtttatacagtgcaatgcctcgagacatcctgatagttgtgggcaatgagattatcgaggctcccatggcatggcgttcacgcttctttgagtaccgagcgtacaggtcaattatcaaagactacttccaccgtggcgccaagtggacaacagctcctaagcccacaatggctgatgagctttataaccaggattatcccatccactctgtagaagacagacacaaattggctgctcagggaaaatttgtgacaactgagtttgagccatgctttgatgctgctgacttcattcgagctggaagagatatttttgcacagagaagccaggttacaactacctaggatagcgcctatatataggcgcctatcaagggatcctctagaacaactatcgccaaca

SEQ ID NO: 453557 - DNA, 632 bp, Homo sapiens
gtttttctctaaatgagagataatctgattctattttggatctgtgtacattctaagtctttctctcatttagagaaaacattctcaagtctatagaagaggaaaaaaaattaagattagaacatacacagatcctaagtagaaccaggtaattgtctctttttctaataaggaatttgggtaatttttaattttttgttttttaaaaaataacctagactatgcaaaacatcaaagtgaattttccatgaatgtttttaatattctcatctcaacattgtgatatatgctactaaaaaccttttcatatacatcttacctcatttcaagtgaattattttaatctttttctctctttccaaaaatttacaggaatgtttagtgtaattggatttcgctatcagttcccatccttaagttttgatattcaatatctgatagatacactgcatctttggtcatctaagatttgtttacaaatgtgcaaattatttagagcatagactttataagcattaaaaaaaactaatggaggtaaaacctaaatgcgatgtgaaataattttagtgttgatactgtatgtgtatttttattctaataaacttttgtgttccagattgaaaaaaaaaaaa

SEQ ID NO: 453558 - DNA, 917 bp, Homo sapiens
caaatgcaggccactatgcccagcaagttatttttttttatttgtagagatgatgtcttgctgtgttccccagtgaggcaccatctctgggcaatagtctcaaactcctaggctcaaggaatcctcctgcctcagcctcccaaagtgctaggattataccatgcccagccaagatatgacttttaaaagaaaacagggtgaaattcaaatgtataatgagtacagattgattcataccatttatagataaattgttttaagattaaaataaatgttcacatggaaagtgaactactgaaagaactgagctgtcactttaatattcttcacttgtaaatccttgctttaaacaaaaatgatagcggacatggtttaacagttgttgctgtttttagatcatccactctggatgtcatccaaatggctttccatgaatgtcttaatgctagatgaaaaacgtgttatggtggatgccaatgaagttccaattcaaaagatgtttgaaaagctgggtatgtacaacaaatgaaacatgttgtcatacatgaaaacgttaaatgagaagaactaaagaaatgacatgctaggtttgataaatggtttgtctaattcaattttgattccttttagaggcaccaagttattatttcacagaaagtcagtatttttattttcaacacacgtagccccaacaagttggagatgcatcctgagctcctgagacatccccttaacaataagtttataaatcttatatgacttagccaacgttttggtgcccatgtgcagaaaaccacccctttgcaggtgagcagatagcttgttcagcccttcttcaaataagaaatcattgtgggtcctttatgacttttatgtgtgataagcatagttaacaaagtagcgaaatgcaagaaagt

SEQ ID NO: 453559 - DNA, 863 bp, Homo sapiens
caaatgcaggccactatgcccagcaagttatttttttttatttgtagagatgatgtcttgctgtgttccccagtgaggcaccatctctgggcaatagtctcaaactcctaggctcaaggaatcctcctgcctcagcctcccaaagtgctaggattataccatgcccagccaagatatgacttttaaaagaaaacagggtgaaattcaaatgtataatgagtacagattgattcataccatttatagataaattgttttaagattaaaataaatgttcacatggaaagtgaactactgaaagaactgagctgtcactttaatattcttcacttgtaaatccttgctttaaacaaaaatgatagcggacatggtttaacagttgttgctgtttttagatcatccactctggatgtcatccaaatggctttccatgaatgtcttaatgctagatgaaaaacgtgttatggtggatgccaatgaagttccaattcaaaagatgtttgaaaagctgggtatgtacaacaaatgaaacatgttgtcatacatgttgtctaattcaattttgattccttttagaggcaccaagttattatttcacagaaagtcagtatttttattttcaacacacgtagccccaacaagttggagatgcatcctgagctcctgagacatccccttaacaataagtttataaatcttatatgacttagccaacgttttggtgcccatgtgcagaaaaccacccctttgcaggtgagcagatagcttgttcagcccttcttcaaataagaaatcattgtgggtcctttatgacttttatgtgtgataagcatagttaacaaagtagcgaaatgcaagaaagt

SEQ ID NO: 453560 - DNA, 792 bp, Homo sapiens
caagcatacaccaccatgcctggctaattttgtatttttagtagagaggggcttggccaggctggtctcgaactcctgacctcaagtgatccatccacctatgcctcccatagcattgggattatgggtgtgagctaccatgcgcgactaggaaagtctttctgaatggctcatgccaccttcctctccctggctataccaatggaccctttagtgactttgtagcctatcctcctctcaaaataattagctccttgaggaagaataatagattttctttttaaaaccccactatatctaacacaacagattcttcctaaataccattggttaaataggccatgcacatcatagccttgtcattacagatggtaccagattaaactgattgttggatttgctttggtacctgtataaccatacaaacccagatattgtatcagataaactctccttatatgtgaatatgtaaagtcagctttttaggtcagctaaattttgctttgcctactaaattaacatggtaaaattagaaacagtctgacaaagtagttaatgtataattctaaaaggccttgagattttagtacttgaccattttgaacatttggtaggtacatctgctcagtctattgacttgtgaatagtcaatagaacaaaacttcagagttctctgttgactttttggagaagattttatattagcagatgaaatatagttggtgaaaataaaattggaagagagtctgtaggcctactttctctatgagaatcgtcatgttagtccatcta

SEQ ID NO: 453561 - DNA, 747 bp, Homo sapiens
tggtgaaaataaaattggaagagaaaatactattctgggttgggtatccttaaggattagaaccacaggactcctccaagtctgtaggcctactttctctatgagaatcgtcatgttagtccatctaactgacctcatctctctttcaatgcaggtatcactaccattaaagttaacattcgtaatgccaattccctgggaggaggcttccattgctggacctgcgatgtccggcgccgaggcaccttacagtcctacttggactgaacaggcctgatggagcttgtggctggcctcagatacacctaagaagcttaggggcaaggttcattctcctgctttaaaaagtgcatgaactgtagtgctttaaacaatcatctccttaacaggggtcgtaagcctggtttgcttctattacttttctttgacataaagaaaataacttctgctaggtattactctctactcctaaagttatttactatttggcttcaagtataaaattttggtgaatgtgtaccaagaaaaaattagtcacctgagtaacttggccactaataattaaccatctacctctgtttttaattttctttccaaaaggcagcttgaaatgttggtcctaatcttaattttttttcctcttctatagacttgagaatgtttttctctaaatgagagaaagacttagaatgtacacagatccaaaatagaatcagattatctctttttttctaaaggagagaaaga

SEQ ID NO: 453562 - DNA, 996 bp, Homo sapiens
aacgggccttcttgcgacgctcgggtctgggtccgggtccggacgtgcaacagaagccgtcagtggccccgctggctaaaaaagggcaagcatcggaggctcgagccagcggccgcggcgcttcccgacagttcctaattcggggcgctacgccggccccaccacctgttcccggcagccaatggggccgcggggggcggccggggcggagcgcggctacaaaaggcctcgggccccgcgcgcccgcccaccccgctccgggcgcgctctcgggaaggcttggaccgacgcggcccagaggccaggaacattccgcgcgtggaccagccgggccagggcgatgctgcgggtgcggtgtctgcgcggcgggagccgcggcgccgaggcggtgcactacatcggatctcggcttggacgaaccttgacaggatgggtgcagcgaactttccagagcacccaggcagctacggcttcctcccggaactcctgtgcagctgacgacaaagccactgagcctctgcccaaggactgccctgtctcttcttacaacgaatgggaccccttagaggaagtgatagtgggcagagcagaaaacgcctgtgttccaccgttcaccatcgaggtgaaggccaacacatatgaaaagtactggccattttaccagaagcaaggagggcattattttcccaaagatcatttgaaaaaggctgttgctgaaattgaagaaatgtgcaatattttaaaaacggaaggagtgacagtaaggaggcctgaccccattgactggtcattgaagtataaaactcctgattttgagtctacgggtttatacagtgcaatgcctcgagacatcctgatagttgtgggcaatgagattatcgaggctcccatggcatggcgttcacgcttctttgagtaccgagcgtacaggtcaattattgcgtgatgaggcttattacccagatttttcccattccactttgttcaagacagact

SEQ ID NO: 453563 - DNA, 2539 bp, Homo sapiens
aacgggccttcttgcgacgctcgggtctgggtccgggtccggacgtgcaacagaagccgtcagtggccccgctggctaaaaaagggcaagcatcggaggctcgagccagcggccgcggcgcttcccgacagttcctaattcggggcgctacgccggccccaccacctgttcccggcagccaatggggccgcggggggcggccggggcggagcgcggctacaaaaggcctcgggccccgcgcgcccgcccaccccgctccgggcgcgctctcgggaaggcttggaccgacgcggcccagaggccaggaacattccgcgcgtggaccagccgggccagggcgatgctgcgggtgcggtgtctgcgcggcgggagccgcggcgccgaggcggtgcactacatcggatctcggcttggacgaaccttgacaggatgggtgcagcgaactttccagagcacccaggcagctacggcttcctcccggaactcctgtgcagctgacgacaaagccactgagcctctgcccaaggactgccctgtctcttcttacaacgaatgggaccccttagaggaagtgatagtgggcagagcagaaaacgcctgtgttccaccgttcaccatcgaggtgaaggccaacacatatgaaaagtactggccattttaccagaagcaaggagggcattattttcccaaagatcatttgaaaaaggctgttgctgaaattgaagaaatgtgcaatattttaaaaacggaaggagtttatacagtgcaatgcctcgagacatcctgatagttgtgggcaatgagattatcgaggctcccatggcatggcgttcacgcttctttgagtaccgagcgtacaggtcaattatcaaagactacttccaccgtggcgccaagtggacaacagctcctaagcccacaatggctgatgagctttataaccaggattatcccatccactctgtagaagacagacacaaattggctgctcagggaaaatttgtgacaactgagtttgagccatgctttgatgctgctgacttcattcgagctggaagagatatttttgcacagagaagccaggttacaaactacctaggcattgaatggatgcgtaggcatcttgctccagactacagagtgcatatcatctcctttaaagatcccaatcccatgcatattgatgctaccttcaacatcattggacctggtattgtgctttccaaccctgaccgaccatgtcaccagattgatcttttcaagaaagcaggatggactatcattactcctccaacaccaatcatcccagacgatcatccactctggatgtcatccaaatggctttccatgaatgtcttaatgctagatgaaaaacgtgttatggtggatgccaatgaagttccaattcaaaagatgtttgaaaagctgggtatcactaccattaaagttaacattcgtaatgccaattccctgggaggaggcttccattgctggacctgcgatgtccggcgccgaggcaccttacagtcctacttggactgaacaggcctgatggagcttgtggctggcctcagatacacctaagaagcttaggggcaaggttcattctcctgctttaaaaagtgcatgaactgtagtgctttaaacaatcatctccttaacaggggtcgtaagcctggtttgcttctattacttttctttgacataaagaaaataacttctgctaggtattactctctactcctaaagttatttactatttggcttcaagtataaaattttggtgaatgtgtaccaagaaaaaattagtcacctgagtaacttggccactaataattaaccatctacctctgtttttaattttctttccaaaaggcagcttgaaatgttggtcctaatcttaattttttttcctcttctatagacttgagaatgtttttctctaaatgagagaaagacttagaatgtacacagatccaaaatagaatcagattatctctttttttctaaaggagagaaagacttagaacatacacagatcctaagtagaaccaggtaattgtctctttttctaataaggaatttgggtaatttttaattttttgttttttaaaaaataacctagactatgcaaaacatcaaagtgaattttccatgaatgtttttaatattctcatctcaacattgtgatatatgctactaaaaaccttttcatatacatcttacctcatttcaagtgaattattttaatctttttctctctttccaaaaatttacaggaatgtttagtgtaattggatttcgctatcagttcccatccttaagttttgatattcaatatctgatagatacactgcatctttggtcatctaagatttgtttacaaatgtgcaaattatttagagcatagactttataagcattaaaaaaaactaatggaggtaaaacctaaatgcgatgtgaaataattttagtgttgatactgtatgtgtatttttattctaataaacttttgtgttccagattgaaaaaaaaaaaa

SEQ ID NO: 453564 - DNA, 2167 bp, Homo sapiens
attcaacagatactgagtgtctgcccagagggcttatgtgctcaatgctagggatcagcactgaacatggagtggttggagtctcaattccaataccttatacaaagagctgtttactgcctatgaacctatcatgagctgtatttttctcctgtaagtattgtgtttatttgcttctacttccaggccaacacatatgaaaagtactggccattttaccagaagcaaggagggcattattttcccaaagatcatttgaaaaaggctgttgctgaaattgaagaaatgtgcaatattttaaaaacggaaggagtgacagtaaggaggcctgaccccattgactggtcattgaagtataaaactcctgattttgagtctacgggtttatacagtgcaatgcctcgagacatcctgatagttgtgggcaatgagattatcgaggctcccatggcatggcgttcacgcttctttgagtaccgagcgtacaggtcaattatcaaagactacttccaccgtggcgccaagtggacaacagctcctaagcccacaatggctgatgagctttataaccaggattatcccatccactctgtagaagacagacacaaattggctgctcagggaaaatttgtgacaactgagtttgagccatgctttgatgctgctgacttcattcgagctggaagagatatttttgcacagagaagccaggttacaaactacctaggcattgaatggatgcgtaggcatcttgctccagactacagagtgcatatcatctcctttaaagatcccaatcccatgcatattgatgctaccttcaacatcattggacctggtattgtgctttccaaccctgaccgaccatgtcaccagattgatcttttcaagaaagcaggatggactatcattactcctccaacaccaatcatcccagacgatcatccactctggatgtcatccaaatggctttccatgaatgtcttaatgctagatgaaaaacgtgttatggtggatgccaatgaagttccaattcaaaagatgtttgaaaagctgggtatcactaccattaaagttaacattcgtaatgccaattccctgggaggaggcttccattgctggacctgcgatgtccggcgccgaggcaccttacagtcctacttggactgaacaggcctgatggagcttgtggctggcctcagatacacctaagaagcttaggggcaaggttcattctcctgctttaaaaagtgcatgaactgtagtgctttaaacaatcatctccttaacaggggtcgtaagcctggtttgcttctattacttttctttgacataaagaaaataacttctgctaggtattactctctactcctaaagttatttactatttggcttcaagtataaaattttggtgaatgtgtaccaagaaaaaattagtcacctgagtaacttggccactaataattaaccatctacctctgtttttaattttctttccaaaaggcagcttgaaatgttggtcctaatcttaattttttttcctcttctatagacttgagaatgtttttctctaaatgagagaaagacttagaatgtacacagatccaaaatagaatcagattatctctttttttctaaaggagagaaagacttagaacatacacagatcctaagtagaaccaggtaattgtctctttttctaataaggaatttgggtaatttttaattttttgttttttaaaaaataacctagactatgcaaaacatcaaagtgaattttccatgaatgtttttaatattctcatctcaacattgtgatatatgctactaaaaaccttttcatatacatcttacctcatttcaagtgaattattttaatctttttctctctttccaaaaatttacaggaatgtttagtgtaattggatttcgctatcagttcccatccttaagttttgatattcaatatctgatagatacactgcatctttggtcatctaagatttgtttacaaatgtgcaaattatttagagcatagactttataagcattaaaaaaaactaatggaggtaaaacctaaatgcgatgtgaaataattttagtgttgatactgtatgtgtatttttattctaataaacttttgtgttccagattgaaaaaaaaaaaa

SEQ ID NO: 453565 - DNA, 2372 bp, Homo sapiens
aacgggccttcttgcgacgctcgggtctgggtccgggtccggacgtgcaacagaagccgtcagtggccccgctggctaaaaaagggcaagcatcggaggctcgagccagcggccgcggcgcttcccgacagttcctaattcggggcgctacgccggccccaccacctgttcccggcagccaatggggccgcggggggcggccggggcggagcgcggctacaaaaggcctcgggccccgcgcgcccgcccaccccgctccgggcgcgctctcgggaaggcttggaccgacgcggcccagaggccaggaacattccgcgcgtggaccagccgggccagggcgatgctgcgggtgcggtgtctgcgcggcgggagccgcggcgccgaggcggtgcactacatcggatctcggcttggacgaaccttgacaggatgggtgcagcgaactttccagagcacccaggcagctacggcttcctcccggaactcctgtgcagctgacgacaaagccactgagcctctgcccaaggactgccctgtctcttcttacaacgaatgggaccccttagaggaagtgatagtgggcagagcagaaaacgcctgtgttccaccgttcaccatcgaggtgaaggccaacacatatgaaaagtactggccattttaccagaagcaaggagggcattattttcccaaagatcatttgaaaaaggctgttgctgaaattgaagaaatgtgcaatattttaaaaacggaaggagtgacagtaaggaggcctgaccccattgactggtcattgaagtataaaactcctgattttgagtctacgggtttatacagtgcaatgcctcgagacatcctgatagttgtgggcaatgagattatcgaggctcccatggcatggcgttcacgcttctttgagtaccgagcgtacaggtcaattatcaaagactacttccaccgtggcgccaagtggacaacagctcctaagcccacaatggctgatgagctttataaccaggattatcccatccactctgtagaagacagacacaaattggctgctcagggaaaatttgtgacaactgagtttgagccatgctttgatgctgctgacttcattcgagctggaagagatatttttgcacagagaagccaggttacaaactacctaggcattgaatggatgcgtaggcatcttgctccagactacagagtgcatatcatctcctttaaagatcccaatcccatgcatattgatgctaccttcaacatcattggacctggtattgtgctttccaaccctgaccgaccatgtcaccagattgatcttttcaagaaagcaggatggactatcattactcctccaacaccaatcatcccagacgatcatccactctggatgtcatccaaatggctttccatgaatgtcttaatgctagatgaaaaacgtgttatggtggatgccaatgaagttccaattcaaaagatgtttgaaaagctgggtatcactaccattaaagttaacattcgtaatgccaattccctgggaggaggcttccattgctggacctgcgatgtccggcgccgaggcaccttacagtcctacttggactgaacaggcctgatggagcttgtggctggcctcagatacacctaagaagcttaggggcaaggttcattctcctgctttaaaaagtgcatgaactgtagtgctttaaacaatcatctccttaacaggggtcgtaagcctggtttgcttctattacttttctttgacataaagaaaataacttctgctaggtattactctctactcctaaagttatttactatttggcttcaagtataaaattttggtgaatgtgtaccaagaaaaaattagtcacctgagtaacttggccactaataattaaccatctacctctgtttttaatttttttgttttttaaaaaataacctagactatgcaaaacatcaaagtgaattttccatgaatgtttttaatattctcatctcaacattgtgatatatgctactaaaaaccttttcatatacatcttacctcatttcaagtgaattattttaatctttttctctctttccaaaaatttacaggaatgtttagtgtaattggatttcgctatcagttcccatccttaagttttgatattcaatatctgatagatacactgcatctttggtcatctaagatttgtttacaaatgtgcaaattatttagagcatagactttataagcattaaaaaaaactaatggaggtaaaacctaaatgcgatgtgaaataattttagtgttgatactgtatgtgtatttttattctaataaacttttgtgttccagattgaaaaaaaaaaaa

SEQ ID NO: 453566 - DNA, 1850 bp, Homo sapiens
aacgggccttcttgcgacgctcgggtctgggtccgggtccggacgtgcaacagaagccgtcagtggccccgctggctaaaaaagggcaagcatcggaggctcgagccagcggccgcggcgcttcccgacagttcctaattcggggcgctacgccggccccaccacctgttcccggcagccaatggggccgcggggggcggccggggcggagcgcggctacaaaaggcctcgggccccgcgcgcccgcccaccccgctccgggcgcgctctcgggaaggcttggaccgacgcggcccagaggccaggaacattccgcgcgtggaccagccgggccagggcgatgctgcgggtgcggtgtctgcgcggcgggagccgcggcgccgaggcggtgcactacatcggatctcggcttggacgaaccttgacaggatgggtgcagcgaactttccagagcacccaggcagctacggcttcctcccggaactcctgtgcagctgacgacaaagccactgagcctctgcccaaggactgccctgtctcttcttacaacgaatgggaccccttagaggaagtgatagtgggcagagcagaaaacgcctgtgttccaccgttcaccatcgaggtgaaggccaacacatatgaaaagtactggccattttaccagaagcaaggagggcattattttcccaaagatcatttgaaaaaggctgttgctgaaattgaagaaatgtgcaatattttaaaaacggaaggagtgacagtaaggaggcctgaccccattgactggtcattgaagtataaaactcctgattttgagtctacgggtttatacagtgcaatgcctcgagacatcctgatagttgtgggcaatgagattatcgaggctcccatggcatggcgttcacgcttctttgagtaccgagcgtacaggtcaattatcaaagactacttccaccgtggcgccaagtggacaacagctcctaagcccacaatggctgatgagctttataaccaggattatcccatccactctgtagaagacagacacaaattggctgctcagggaaaatttgtgacaactgagtttgagccatgctttgatgctgctgacttcattcgagctggaagagatatttttgcacagagaagccaggttacaaactacctaggcattgaatggatgcgtaggcatcttgctccagactacagagtgcatatcatctcctttaaagatcccaatcccatgcatattgatgctaccttcaacatcattggacctggtattgtgctttccaaccctgaccgaccatgtcaccagattgatcttttcaagaaagcaggatggactatcattactcctccaacaccaatcatcccagacgatcatccactctggatgtcatccaaatggctttccatgaatgtcttaatgctagatgaaaaacgtgttatggtggatgccaatgaagttccaattcaaaagatgtttgaaaagctgggtatgtacaacaaatgaaacatgttgtcatacatgttgtctaattcaattttgattccttttagaggcaccaagttattatttcacagaaagtcagtatttttattttcaacacacgtagccccaacaagttggagatgcatcctgagctcctgagacatccccttaacaataagtttataaatcttatatgacttagccaacgttttggtgcccatgtgcagaaaaccacccctttgcaggtgagcagatagcttgttcagcccttcttcaaataagaaatcattgtgggtcctttatgacttttatgtgtgataagcatagttaacaaagtagcgaaatgcaagaaagt

SEQ ID NO: 453567 - DNA, 4868 bp, Homo sapiens
cgggggagaacaaattggcttggtctgagtcctgtttgctttctggcactgtgtgggctgtcgatgcggagcgagcgcagcgagccgggccgagccgggccgggccgggcccaggagcgcgcggatgatgcgggcggccaggcgggggtcgacgggtccctgaagcccgcgccccgggccagcaagggagccccgcgcaggccgcgcgcatccggaggcggccgggccccgccatggccggggtcagctacgcggcgccctggtgggtgagcctcctgcaccggctgccccacttcgacctgagctgggaggccactagcagccagttccggcccgaggacaccgactaccagcaggccctgctgctcctgggggccgccgccctggcctgcctcgccctggacctcctcttcctgctcttctactccttctggctgtgctgccggcggcgcaagagcgaggagcacctggacgccgactgctgctgcacggcctggtgtgtcatcatcgccacgctggtgtgcagcgccggcatcgcagtgggattctacggcaacggggagaccagtgatggcatccatagggccacctactcgctccgccacgccaaccgcacggtggccggggtccaggaccgcgtgtgggacacggcggtggggctgaaccacacggcggagcccagcctgcagaccctggagcggcagctggccgggcggcccgagcccctgcgagccgtacagaggctgcagggcctgctggagacgctgctgggctacacggccgccatccccttttggaggaacacggcggtgtcgctggaggtgctggcggagcaggtggatctctacgactggtacaggtggctgggctacctgggcctgctgctgctggacgtcatcatctgcctcctggtgctggttggcctcatccgcagctccaagggcatcctggtgggggtctgcctgctgggagtcctggccctggtcatcagctggggcgcgctgggcttggagctggctgtgtccgtgggctccagcgacttctgtgtggaccctgacgcctacgtgaccaaaatggtggaggagtactcggtgctgagtggggacatcctgcagtactacctggcctgctcgccccgcgccgccaaccccttccagcagaagctgtcgggcagccacaaggcactggtggagatgcaggatgtcgtggctgagcttctgaggaccgtcccctgggagcagccggccactaaggaccccctcctccgcgtccaggaggtgctgaatggcacggaggtgaacctgcagcacctcaccgccctggtggactgccgcagcctgcatctggactacgtgcaagcgctgaccggcttctgctatgacggcgtggagggcctcatctacctggccctcttctccttcgtcacagccctcatgttcagctccatcgtctgcagcgtcccgcacacctggcagcaaaagagaggccctgatgaggacggggaggaggaggccgctccagggccgcggcaggcgcacgacagcctctaccgcgtccacatgcccagcctgtacagctgtggcagcagctacggcagtgagaccagcatcccggccgcggcccacaccgtcagcaacgccccggtcactgagtacatgagccagaacgctaatttccagaacccccgctgtgagaacaccccactcattgggcgcgagtccccgccgccctcatacacctccagcatgagagccaaatacctcgccacgagccagcctcgccctgactccagcggcagccactagaccgcgcccggcagccacccaccccacgtgccaacttcccctccccgtgccagcactgccgcttccacctgggccacccaccggaccctcgcacgccgtgccaggcctgccccagacgcgtctgcaggccgcttgccctcctgtcccctccccgcaggggcacagtggagacgcaggggctctgggcccgtaccgccaactcgggtcacacctgaacgctgctgccagccgatgccccagccctgcacgccacccactatcccggcacgctccctctgcagatggtcgccgcacctacaagccctggccgcacccaacctgtgttgttgccgcccggcccttccctccacagctctccttcctcccgcccggcacttctgtggaccccttcttagttcacaggcacggctggggccgctctgtgctggcgcctgctggccactgagggacagggacacgtgccacctgctcatctctgccctgaggtcaccccgtggtccctccacgtgcccatctctctgcagtgccctcctcgcctgtgcagcccgcccacccacaggctcacccctcctgccggctgccagaggccccctccagcagggcctctctccgttgccccagcttcactctctccctcagcacctgccctgctggaggccccagccctccgtggacagcaggggccacgtggagcccgggccgctcacccgccacccagtgctggccgccttcttggtgccaaacccccttcccccacccagagactgggcagctgtgtctggttcgttctttgcactaaccacatttgtcatctctagggcaggctggggctgcgggctgagggggaccgctggcaccccccttccctcccttcttggttccatttccatccatgacaggtacagcatcccaggagcccggcctgaggggctggacccgagccggctgtgaacatccctcagcccctgctgtccccccttgggactaaccactaacctcacccccaaactccacgggtgcccctagctggcccagagccggcagtgtgagcccaagtccgggctggagccgaggccggagcagctgtctgggagtcaaggctgcagtagcgtttcttcatggggtgctccagggggtgccacagaccgacaggcagcccaagggcctggacacccctccccaggcaggtgctgccccaggaggactgtcctcgggaatgaacctcccgcgggctttggactgaggtccctgtggcctcggtctcctccccatgaagtgggagcgaggctccccaatggtgcttttggctttagtgtacgatgtttgctgtgcttcccgccgtggagggcagagccaccccacatcaggatcggacgtgctacccctcccggtcccggccctggcccagccagcccagccctcgaggctcgatgcctgtgccaaggccaggggcagccagagggcagctggatggccacgtgcaggggtcaaggctgggccctgcagtggggcgggccgccagccccagcagtttacagacgcatggctcttcctcccagagcagccggcagctacctggaccggaaatgtcctcatcccctccctggggccaggctctgccctggccttcctctgtgaacccctcctttctttgtgctggtgtctgggaccaaaaagggggaatatgggagggcagagtggggaggggagtccatgggcctggggccccaagccggggcgtctgagctccccaggcatgaccaaacctcagtggaggggcctctgcttcaggccccgcctggctgacattctgagcccccctcggaggccccgccacagccaacctgcccagtctttcctctgggcttgacccgccaggggagttctccaggcctagggccaggagagaggccctggcaccctggcgtgggtgcccgccaaacgccctgcgaccgctcagaagcacaaatgctgtccatggccgtgaggctgcctgccaggtgaatggacatagcgtgagaggcggtgaggccagggcttccagcctcgtgctgtctcgggactcctgaccgtggtgtgcgtgtgtgcccgtctgtgactttctactcaccaaggttgaagaaaggaaacggggaaaatcaaaaggggttcaaaccccacctcagtaggtggaggggagcgcctgccattggttgtatttttgttctgagttttcggtgccgtgttcctaactactccatcccatgacctcgccacacctactggggcatctggctggtgcctgctgccatggccagcccccactctcaccctgcacagggggtcttgcagcccccaggcccacagcctcgttgggaggacagggtggccctggggacaagagggaggagcccaggggcttacctcactgagagtgctccccagcaggcatccactaccccagggccccccacatgtcatggcaaggttggtagtgaatgggcctggttgggagcagcccctggcccattgcccacccacccatctcactatgcaattcgagttccaagcaacatttgctcctgccctggggccagctctgccccagccctgagaggggtggtgaggcagccccctggaccccagaaccccagacaagggggcaggcgggggaccagggcctctcctgtgggatctttgttttgtgtttaaccataatggttgtgtactgaaccacttcatatttgttatatataatatatatatatataatctccttaagactcagcctcctggtttacccccccggcctgggcatctgacctcccccaccccagtgtgatttaacatccaggaactgaggcctgaaccattttgcatttccccctcctccagcctctgtagggccatggctgtatgtactgtcgctgtgtttttttgtttttttagaactgggtttgggggctgatttttatttctttgggggctttttttcttggcaaatactaaaaatctcgtcaatgtaatttctgtggtttctattcagcttgggtttcatgttttaaaataaattttaaaaagcaa

SEQ ID NO: 453568 - DNA, 3801 bp, Homo sapiens
gtcttgctggtgtccccgcgttggagggtcctggggagggagaggcgggcggacccagcagcgcccatggacttggtctcctctctggagcagaagctgtcgggcagccacaaggcactggtggagatgcaggatgtcgtggctgagcttctgaggaccgtcccctgggagcagccggccactaaggaccccctcctccgcgtccaggaggtgctgaatggcacggaggtgaacctgcagcacctcaccgccctggtggactgccgcagcctgcatctggactacgtgcaagcgctgaccggcttctgctatgacggcgtggagggcctcatctacctggccctcttctccttcgtcacagccctcatgttcagctccatcgtctgcagcgtcccgcacacctggcagcaaaagagaggccctgatgaggacggggaggaggaggccgctccagggccgcggcaggcgcacgacagcctctaccgcgtccacatgcccagcctgtacagctgtggcagcagctacggcagtgagaccagcatcccggccgcggcccacaccgtcagcaacgccccggtcactgagtacatgagccagaacgctaatttccagaacccccgctgtgagaacaccccactcattgggcgcgagtccccgccgccctcatacacctccagcatgagagccaaatacctcgccacgagccagcctcgccctgactccagcggcagccactagaccgcgcccggcagccacccaccccacgtgccaacttcccctccccgtgccagcactgccgcttccacctgggccacccaccggaccctcgcacgccgtgccaggcctgccccagacgcgtctgcaggccgcttgccctcctgtcccctccccgcaggggcacagtggagacgcaggggctctgggcccgtaccgccaactcgggtcacacctgaacgctgctgccagccgatgccccagccctgcacgccacccactatcccggcacgctccctctgcagatggtcgccgcacctacaagccctggccgcacccaacctgtgttgttgccgcccggcccttccctccacagctctccttcctcccgcccggcacttctgtggaccccttcttagttcacaggcacggctggggccgctctgtgctggcgcctgctggccactgagggacagggacacgtgccacctgctcatctctgccctgaggtcaccccgtggtccctccacgtgcccatctctctgcagtgccctcctcgcctgtgcagcccgcccacccacaggctcacccctcctgccggctgccagaggccccctccagcagggcctctctccgttgccccagcttcactctctccctcagcacctgccctgctggaggccccagccctccgtggacagcaggggccacgtggagcccgggccgctcacccgccacccagtgctggccgccttcttggtgccaaacccccttcccccacccagagactgggcagctgtgtctggttcgttctttgcactaaccacatttgtcatctctagggcaggctggggctgcgggctgagggggaccgctggcaccccccttccctcccttcttggttccatttccatccatgacaggtacagcatcccaggagcccggcctgaggggctggacccgagccggctgtgaacatccctcagcccctgctgtccccccttgggactaaccactaacctcacccccaaactccacgggtgcccctagctggcccagagccggcagtgtgagcccaagtccgggctggagccgaggccggagcagctgtctgggagtcaaggctgcagtagcgtttcttcatggggtgctccagggggtgccacagaccgacaggcagcccaagggcctggacacccctccccaggcaggtgctgccccaggaggactgtcctcgggaatgaacctcccgcgggctttggactgaggtccctgtggcctcggtctcctccccatgaagtgggagcgaggctccccaatggtgcttttggctttagtgtacgatgtttgctgtgcttcccgccgtggagggcagagccaccccacatcaggatcggacgtgctacccctcccggtcccggccctggcccagccagcccagccctcgaggctcgatgcctgtgccaaggccaggggcagccagagggcagctggatggccacgtgcaggggtcaaggctgggccctgcagtggggcgggccgccagccccagcagtttacagacgcatggctcttcctcccagagcagccggcagctacctggaccggaaatgtcctcatcccctccctggggccaggctctgccctggccttcctctgtgaacccctcctttctttgtgctggtgtctgggaccaaaaagggggaatatgggagggcagagtggggaggggagtccatgggcctggggccccaagccggggcgtctgagctccccaggcatgaccaaacctcagtggaggggcctctgcttcaggccccgcctggctgacattctgagcccccctcggaggccccgccacagccaacctgcccagtctttcctctgggcttgacccgccaggggagttctccaggcctagggccaggagagaggccctggcaccctggcgtgggtgcccgccaaacgccctgcgaccgctcagaagcacaaatgctgtccatggccgtgaggctgcctgccaggtgaatggacatagcgtgagaggcggtgaggccagggcttccagcctcgtgctgtctcgggactcctgaccgtggtgtgcgtgtgtgcccgtctgtgactttctactcaccaaggttgaagaaaggaaacggggaaaatcaaaaggggttcaaaccccacctcagtaggtggaggggagcgcctgccattggttgtatttttgttctgagttttcggtgccgtgttcctaactactccatcccatgacctcgccacacctactggggcatctggctggtgcctgctgccatggccagcccccactctcaccctgcacagggggtcttgcagcccccaggcccacagcctcgttgggaggacagggtggccctggggacaagagggaggagcccaggggcttacctcactgagagtgctccccagcaggcatccactaccccagggccccccacatgtcatggcaaggttggtagtgaatgggcctggttgggagcagcccctggcccattgcccacccacccatctcactatgcaattcgagttccaagcaacatttgctcctgccctggggccagctctgccccagccctgagaggggtggtgaggcagccccctggaccccagaaccccagacaagggggcaggcgggggaccagggcctctcctgtgggatctttgttttgtgtttaaccataatggttgtgtactgaaccacttcatatttgttatatataatatatatatatataatctccttaagactcagcctcctggtttacccccccggcctgggcatctgacctcccccaccccagtgtgatttaacatccaggaactgaggcctgaaccattttgcatttccccctcctccagcctctgtagggccatggctgtatgtactgtcgctgtgtttttttgtttttttagaactgggtttgggggctgatttttatttctttgggggctttttttcttggcaaatactaaaaatctcgtcaatgtaatttctgtggtttctattcagcttgggtttcatgttttaaaataaattttaaaaagcaa

SEQ ID NO: 453569 - DNA, 3736 bp, Homo sapiens
ctgcggtgcgtgccccccaggaccccctcctccgcgtccaggaggtgctgaatggcacggaggtgaacctgcagcacctcaccgccctggtggactgccgcagcctgcatctggactacgtgcaagcgctgaccggcttctgctatgacggcgtggagggcctcatctacctggccctcttctccttcgtcacagccctcatgttcagctccatcgtctgcagcgtcccgcacacctggcagcaaaagagaggccctgatgaggacggggaggaggaggccgctccagggccgcggcaggcgcacgacagcctctaccgcgtccacatgcccagcctgtacagctgtggcagcagctacggcagtgagaccagcatcccggccgcggcccacaccgtcagcaacgccccggtcactgagtacatgagccagaacgctaatttccagaacccccgctgtgagaacaccccactcattgggcgcgagtccccgccgccctcacgctatctggctgccctggactctggcagccacgcgggctggcagtttaagcccatggacagtgcccgaacgctgtggtagctgttccctcagagcgacagtacacctccagcatgagagccaaatacctcgccacgagccagcctcgccctgactccagcggcagccactagaccgcgcccggcagccacccaccccacgtgccaacttcccctccccgtgccagcactgccgcttccacctgggccacccaccggaccctcgcacgccgtgccaggcctgccccagacgcgtctgcaggccgcttgccctcctgtcccctccccgcaggggcacagtggagacgcaggggctctgggcccgtaccgccaactcgggtcacacctgaacgctgctgccagccgatgccccagccctgcacgccacccactatcccggcacgctccctctgcagatggtcgccgcacctacaagccctggccgcacccaacctgtgttgttgccgcccggcccttccctccacagctctccttcctcccgcccggcacttctgtggaccccttcttagttcacaggcacggctggggccgctctgtgctggcgcctgctggccactgagggacagggacacgtgccacctgctcatctctgccctgaggtcaccccgtggtccctccacgtgcccatctctctgcagtgccctcctcgcctgtgcagcccgcccacccacaggctcacccctcctgccggctgccagaggccccctccagcagggcctctctccgttgccccagcttcactctctccctcagcacctgccctgctggaggccccagccctccgtggacagcaggggccacgtggagcccgggccgctcacccgccacccagtgctggccgccttcttggtgccaaacccccttcccccacccagagactgggcagctgtgtctggttcgttctttgcactaaccacatttgtcatctctagggcaggctggggctgcgggctgagggggaccgctggcaccccccttccctcccttcttggttccatttccatccatgacaggtacagcatcccaggagcccggcctgaggggctggacccgagccggctgtgaacatccctcagcccctgctgtccccccttgggactaaccactaacctcacccccaaactccacgggtgcccctagctggcccagagccggcagtgtgagcccaagtccgggctggagccgaggccggagcagctgtctgggagtcaaggctgcagtagcgtttcttcatggggtgctccagggggtgccacagaccgacaggcagcccaagggcctggacacccctccccaggcaggtgctgccccaggaggactgtcctcgggaatgaacctcccgcgggctttggactgaggtccctgtggcctcggtctcctccccatgaagtgggagcgaggctccccaatggtgcttttggctttagtgtacgatgtttgctgtgcttcccgccgtggagggcagagccaccccacatcaggatcggacgtgctacccctcccggtcccggccctggcccagccagcccagccctcgaggctcgatgcctgtgccaaggccaggggcagccagagggcagctggatggccacgtgcaggggtcaaggctgggccctgcagtggggcgggccgccagccccagcagtttacagacgcatggctcttcctcccagagcagccggcagctacctggaccggaaatgtcctcatcccctccctggggccaggctctgccctggccttcctctgtgaacccctcctttctttgtgctggtgtctgggaccaaaaagggggaatatgggagggcagagtggggaggggagtccatgggcctggggccccaagccggggcgtctgagctccccaggcatgaccaaacctcagtggaggggcctctgcttcaggccccgcctggctgacattctgagcccccctcggaggccccgccacagccaacctgcccagtctttcctctgggcttgacccgccaggggagttctccaggcctagggccaggagagaggccctggcaccctggcgtgggtgcccgccaaacgccctgcgaccgctcagaagcacaaatgctgtccatggccgtgaggctgcctgccaggtgaatggacatagcgtgagaggcggtgaggccagggcttccagcctcgtgctgtctcgggactcctgaccgtggtgtgcgtgtgtgcccgtctgtgactttctactcaccaaggttgaagaaaggaaacggggaaaatcaaaaggggttcaaaccccacctcagtaggtggaggggagcgcctgccattggttgtatttttgttctgagttttcggtgccgtgttcctaactactccatcccatgacctcgccacacctactggggcatctggctggtgcctgctgccatggccagcccccactctcaccctgcacagggggtcttgcagcccccaggcccacagcctcgttgggaggacagggtggccctggggacaagagggaggagcccaggggcttacctcactgagagtgctccccagcaggcatccactaccccagggccccccacatgtcatggcaaggttggtagtgaatgggcctggttgggagcagcccctggcccattgcccacccacccatctcactatgcaattcgagttccaagcaacatttgctcctgccctggggccagctctgccccagccctgagaggggtggtgaggcagccccctggaccccagaaccccagacaagggggcaggcgggggaccagggcctctcctgtgggatctttgttttgtgtttaaccataatggttgtgtactgaaccacttcatatttgttatatataatatatatatatataatctccttaagactcagcctcctggtttacccccccggcctgggcatctgacctcccccaccccagtgtgatttaacatccaggaactgaggcctgaaccattttgcatttccccctcctccagcctctgtagggccatggctgtatgtactgtcgctgtgtttttttgtttttttagaactgggtttgggggctgatttttatttctttgggggctttttttcttggcaaatactaaaaatctcgtcaatgtaatttctgtggtttctattcagcttgggtttcatgttttaaaataaattttaaaaagcaa

SEQ ID NO: 453570 - DNA, 3121 bp, Homo sapiens
cgggggagaacaaattggcttggtctgagtcctgtttgctttctggcactgtgtgggctgtcgatgcggagcgagcgcagcgagccgggccgagccgggccgggccgggcccaggagcgcgcggatgatgcgggcggccaggcgggggtcgacgggtccctgaagcccgcgccccgggccagcaagggagccccgcgcaggccgcgcgcatccggaggcggccgggccccgccatggccggggtcagctacgcggcgccctggtgggtgagcctcctgcaccggctgccccacttcgacctgagctgggaggccactagcagccagttccggcccgaggacaccgactaccagcaggccctgctgctcctgggggccgccgccctggcctgcctcgccctggacctcctcttcctgctcttctactccttctggctgtgctgccggcggcgcaagagcgaggagcacctggacgccgactgctgctgcacggcctggtgtgtcatcatcgccacgctggtgtgcagcgccggcatcgcagtgggattctacggcaacggggagaccagtgatggcatccatagggccacctactcgctccgccacgcccacccacaggctcacccctcctgccggctgccagaggccccctccagcagggcctctctccgttgccccagcttcactctctccctcagcacctgccctgctggaggccccagccctccgtggacagcaggggccacgtggagcccgggccgctcacccgccacccagtgctggccgccttcttggtgccaaacccccttcccccacccagagactgggcagctgtgtctggttcgttctttgcactaaccacatttgtcatctctagggcaggctggggctgcgggctgagggggaccgctggcaccccccttccctcccttcttggttccatttccatccatgacaggtacagcatcccaggagcccggcctgaggggctggacccgagccggctgtgaacatccctcagcccctgctgtccccccttgggactaaccactaacctcacccccaaactccacgggtgcccctagctggcccagagccggcagtgtgagcccaagtccgggctggagccgaggccggagcagctgtctgggagtcaaggctgcagtagcgtttcttcatggggtgctccagggggtgccacagaccgacaggcagcccaagggcctggacacccctccccaggcaggtgctgccccaggaggactgtcctcgggaatgaacctcccgcgggctttggactgaggtccctgtggcctcggtctcctccccatgaagtgggagcgaggctccccaatggtgcttttggctttagtgtacgatgtttgctgtgcttcccgccgtggagggcagagccaccccacatcaggatcggacgtgctacccctcccggtcccggccctggcccagccagcccagccctcgaggctcgatgcctgtgccaaggccaggggcagccagagggcagctggatggccacgtgcaggggtcaaggctgggccctgcagtggggcgggccgccagccccagcagtttacagacgcatggctcttcctcccagagcagccggcagctacctggaccggaaatgtcctcatcccctccctggggccaggctctgccctggccttcctctgtgaacccctcctttctttgtgctggtgtctgggaccaaaaagggggaatatgggagggcagagtggggaggggagtccatgggcctggggccccaagccggggcgtctgagctccccaggcatgaccaaacctcagtggaggggcctctgcttcaggccccgcctggctgacattctgagcccccctcggaggccccgccacagccaacctgcccagtctttcctctgggcttgacccgccaggggagttctccaggcctagggccaggagagaggccctggcaccctggcgtgggtgcccgccaaacgccctgcgaccgctcagaagcacaaatgctgtccatggccgtgaggctgcctgccaggtgaatggacatagcgtgagaggcggtgaggccagggcttccagcctcgtgctgtctcgggactcctgaccgtggtgtgcgtgtgtgcccgtctgtgactttctactcaccaaggttgaagaaaggaaacggggaaaatcaaaaggggttcaaaccccacctcagtaggtggaggggagcgcctgccattggttgtatttttgttctgagttttcggtgccgtgttcctaactactccatcccatgacctcgccacacctactggggcatctggctggtgcctgctgccatggccagcccccactctcaccctgcacagggggtcttgcagcccccaggcccacagcctcgttgggaggacagggtggccctggggacaagagggaggagcccaggggcttacctcactgagagtgctccccagcaggcatccactaccccagggccccccacatgtcatggcaaggttggtagtgaatgggcctggttgggagcagcccctggcccattgcccacccacccatctcactatgcaattcgagttccaagcaacatttgctcctgccctggggccagctctgccccagccctgagaggggtggtgaggcagccccctggaccccagaaccccagacaagggggcaggcgggggaccagggcctctcctgtgggatctttgttttgtgtttaaccataatggttgtgtactgaaccacttcatatttgttatatataatatatatatatataatctccttaagactcagcctcctggtttacccccccggcctgggcatctgacctcccccaccccagtgtgatttaacatccaggaactgaggcctgaaccattttgcatttccccctcctccagcctctgtagggccatggctgtatgtactgtcgctgtgtttttttgtttttttagaactgggtttgggggctgatttttatttctttgggggctttttttcttggcaaatactaaaaatctcgtcaatgtaatttctgtggtttctattcagcttgggtttcatgttttaaaataaattttaaaaagcaa

SEQ ID NO: 453571 - DNA, 4560 bp, Homo sapiens
cgggggagaacaaattggcttggtctgagtcctgtttgctttctggcactgtgtgggctgtcgatgcggagcgagcgcagcgagccgggccgagccgggccgggccgggcccaggagcgcgcggatgatgcgggcggccaggcgggggtcgacgggtccctgaagcccgcgccccgggccagcaagggagccccgcgcaggccgcgcgcatccggaggcggccgggccccgccatggccggggtcagctacgcggcgccctggtgggtgagcctcctgcaccggctgccccacttcgacctgagctgggaggccactagcagccagttccggcccgaggacaccgactaccagcaggccctgctgctcctgggggccgccgccctggcctgcctcgccctggacctcctcttcctgctcttctactccttctggctgtgctgccggcggcgcaagagcgaggagcacctggacgccgactgctgctgcacggcctggtgtgtcatcatcgccacgctggtgtgcagcgccggcatcgcagtgggattctacggcaacggggagaccagtgatggcatccatagggccacctactcgctccgccacgccaaccgcacggtggccggggtccaggaccgcgtgtgggacacggcggtggggctgaaccacacggcggagcccagcctgcagaccctggagcggcagctggccgggcggcccgagcccctgcgagccgtacagaggctgcagggcctgctggagacgctgctgggctacacggccgccatccccttttggaggaacacggcggtgtcgctggaggtgctggcggagcaggtggatctctacgactggtacaggtggctgggctacctgggcctgctgctgctggacgtcatcatctgcctcctggtgctggttggcctcatccgcagctccaagggcatcctggtgggggtctgcctgctgggagtcctggccctggtcatcagctggggcgcgctgggcttggagctggctgtgtccgtgggctccagcgacttctgtgtggaccctgacgcctacgtgaccaaaatggtggaggagtactcggtgctgagtggggacatcctgcagtactacctggcctgctcgccccgcgccgccaaccccttccagcagaagctgtcgggcagccacaaggcactggtggagatgcaggatgtcgtggctgagcttctgaggaccgtcccctgggagcagccggccactaaggaccccctcctccgcgtccaggaggtgctgaatggcacggaggtgaacctgcagcacctcaccgccctggtggactgccgcagcctgcatctggactacgtgcaagcgctgaccggcttctgctatgacggcgtggagggcctcatctacctggccctcttctccttcgtcacagccctcatgttcagctccatcgtctgcagcgtcccgcacacctggcagcaaaagagaggccctgatgaggacggggaggaggaggccgctccagggccgcggcaggcgcacgacagcctctaccgcgtccacatgcccagcctgtacagctgtggcagcagctacggcagtgagaccagcatcccggccgcggcccacaccgtcagcaacgccccggtcactgagtacatgagccagaacgctaatttccagaacccccgctgtgagaacaccccactcattgggcgcgagtccccgccgccctcatacacctccagcatgagagccaaatacctcgccacgagccagcctcgccctgactccagcggcagccactagaccgcgcccggcagccacccaccccacgtgccaacttcccctccccgtgccagcactgccgcttccacctgggccacccaccggaccctcgcacgccgtgccaggcctgccccagacgcgtctgcaggccgcttgccctcctgtcccctccccgcaggggcacagtggagacgcaggggctctgggcccgtaccgccaactcgggtcacacctgaacgctgctgccagccgatgccccagccctgcacgccacccactatcccggcacgctccctctgcagatggtcgccgcacctacaagccctggccgcacccaacctgtgttgttgccgcccggcccttccctccacagctctccttcctcccgcccggcacttctgtggaccccttcttagttcacaggcacggctggggccgctctgtgctggcgcctgctggccactgagggacagggacacgtgccacctgctcatctctgccctgaggtcaccccgtggtccctccacgtgcccatctctctgcagtgccctcctcgcctgtgcagcccgcccacccacaggctcacccctcctgccggctgccagaggccccctccagcagggcctctctccgttgccccagcttcactctctccctcagcacctgccctgctggaggccccagccctccgtggacagcaggggccacgtggagcccgggccgctcacccgccacccagtgctggccgccttcttggtgccaaacccccttcccccacccagagactgggcagctgtgtctggttcgttctttgcactaaccacatttgtcatctctagggcaggctggggctgcgggctgagggggaccgctggcaccccccttccctcccttcttggttccatttccatccatgacaggtacagcatcccaggagcccggcctgaggggctggacccgagccggctgtgaacatccctcagcccctgctgtccccccttgggactaaccactaacctcacccccaaactccacgggtgcccctagctggcccagagccggcagtgtgagcccaagtccgggctggagccgaggccggagcagctgtctgggagtcaaggctgcagtagcgtttcttcatggggtgctccagggggtgccacagaccgacaggcagcccaagggcctggacacccctccccaggcaggtgctgccccaggaggactgtcctcgggaatgaacctcccgcgggctttggactgaggtccctgtggcctcggtctcctccccatgaagtgggagcgaggctccccaatggtgcttttggctttagtgtacgatgtttgctgtgcttcccgccgtggagggcagagccaccccacatcaggatcggacgtgctacccctcccggtcccggccctggcccagccagcccagccctcgaggctcgatgcctgtgccaaggccaggggcagccagagggcagctggatggccacgtgcaggggtcaaggctgggccctgcagtggggcgggccgccagccccagcagtttacagacgcatggctcttcctcccagagcagccggcagctacctggaccggaaatgtcctcatcccctccctggggccaggctctgccctggccttcctctgtgaacccctcctttctttgtgctggtgtctgggaccaaaaagggggaatatgggagggcagagtggggaggggagtccatgggcctggggccccaagccggggcgtctgagctccccaggcatgaccaaacctcagtggaggggcctctgcttcaggccccgcctggctgacattctgagcccccctcggaggccccgccacagccaacctgcccagtctttcctctgggcttgacccgccaggggagttctccaggcctagggccaggagagaggccctggcaccctggcgtgggtgcccgccaaacgccctgcgaccgctcagaagcacaaatgctgtccatggccgtgaggctgcctgccaggtgaatggacatagcgtgagaggcggtgaggccagggcttccagcctcgtgctgtctcgggactcctgaccgtggtgtgcgtgtgtgcccgtctgtgactttctactcaccaaggttgaagaaaggaaacggggaaaatcaaaaggggttcaaaccccacctcagtaggtggaggggagcgcctgccattggttgtatttttgttctgagttttcggtgccgtgttcctaactactccatcccatgacctcgccacacctactggggcatctggctggtgcctgctgccatggccagcccccactctcaccctgcacagggggtcttgcagcccccaggcccacagcctcgttgggaggacagggtggccctggggacaagagggaggagcccaggggcttacctcactgagagtgctccccagcaggcatccactaccccagggccccccacatgtcatggcaaggttggtagtgaatgggcctggttgggagcagcccctggcccattgcccacccacccatctcactatgcaattcgagttccaagcaacatttgctcctgccctggggccagctctgccccagccctgagaggggtggtgaggcagccccctggaccccagaaccccagacaagggggcaggcgggggaccagggcctctcctgtgggatctttgttttgtgtttaaccataatggttgtgtactgaaccacttcatatttgttatatataatatatatatatataatctc

SEQ ID NO: 453572 - DNA, 1641 bp, Homo sapiens
agcaagctatgtcatcaggtcgaggccgggtttaaatcagccgagggcatggcactgtgcttgggtcaaggctgggccctgcagtggggcgggccgccagccccagcagtttacagacgcatggctcttcctcccagagcagccggcagctacctggaccggaaatgtcctcatcccctccctggggccaggctctgccctggccttcctctgtgaacccctcctttctttgtgctggtgtctgggaccaaaaagggggaatatgggagggcagagtggggaggggagtccatgggcctggggccccaagccggggcgtctgagctccccaggcatgaccaaacctcagtggaggggcctctgcttcaggccccgcctggctgacattctgagcccccctcggaggccccgccacagccaacctgcccagtctttcctctgggcttgacccgccaggggagttctccaggcctagggccaggagagaggccctggcaccctggcgtgggtgcccgccaaacgccctgcgaccgctcagaagcacaaatgctgtccatggccgtgaggctgcctgccaggtgaatggacatagcgtgagaggcggtgaggccagggcttccagcctcgtgctgtctcgggactcctgaccgtggtgtgcgtgtgtgcccgtctgtgactttctactcaccaaggttgaagaaaggaaacggggaaaatcaaaaggggttcaaaccccacctcagtaggtggaggggagcgcctgccattggttgtatttttgttctgagttttcggtgccgtgttcctaactactccatcccatgacctcgccacacctactggggcatctggctggtgcctgctgccatggccagcccccactctcaccctgcacagggggtcttgcagcccccaggcccacagcctcgttgggaggacagggtggccctggggacaagagggaggagcccaggggcttacctcactgagagtgctccccagcaggcatccactaccccagggccccccacatgtcatggcaaggttggtagtgaatgggcctggttgggagcagcccctggcccattgcccacccacccatctcactatgcaattcgagttccaagcaacatttgctcctgccctggggccagctctgccccagccctgagaggggtggtgaggcagccccctggaccccagaaccccagacaagggggcaggcgggggaccagggcctctcctgtgggatctttgttttgtgtttaaccataatggttgtgtactgaaccacttcatatttgttatatataatatatatatatataatctccttaagactcagcctcctggtttacccccccggcctgggcatctgacctcccccaccccagtgtgatttaacatccaggaactgaggcctgaaccattttgcatttccccctcctccagcctctgtagggccatggctgtatgtactgtcgctgtgtttttttgtttttttagaactgggtttgggggctgatttttatttctttgggggctttttttcttggcaaatactaaaaatctcgtcaatgtaatttctgtggtttctattcagcttgggtttcatgttttaaaataaattttaaaaagcaa

SEQ ID NO: 453573 - DNA, 5075 bp, Homo sapiens
cgggggagaacaaattggcttggtctgagtcctgtttgctttctggcactgtgtgggctgtcgatgcggagcgagcgcagcgagccgggccgagccgggccgggccgggcccaggagcgcgcggatgatgcgggcggccaggcgggggtcgacgggtccctgaagcccgcgccccgggccagcaagggagccccgcgcaggccgcgcgcatccggaggcggccgggccccgccatggccggggtcagctacgcggcgccctggtgggtgagcctcctgcaccggctgccccacttcgacctgagctgggaggccactagcagccagttccggcccgaggacaccgactaccagcaggccctgctgctcctgggggccgccgccctggcctgcctcgccctggacctcctcttcctgctcttctactccttctggctgtgctgccggcggcgcaagagcgaggagcacctggacgccgactgctgctgcacggcctggtgtgtcatcatcgccacgctggtgtgcagcgccggcatcgcagtgggattctacggcaacggggagaccagtgatggcatccatagggccacctactcgctccgccacgccaaccgcacggtggccggggtccaggaccgcgtgtgggacacggcggtggggctgaaccacacggcggagcccagcctgcagaccctggagcggcagctggccgggcggcccgagcccctgcgagccgtacagaggctgcagggcctgctggagacgctgctgggctacacggccgccatccccttttggaggaacacggcggtgtcgctggaggtgctggcggagcaggtggatctctacgactggtacaggtggctgggctacctgggcctgctgctgctggacgtcatcatctgcctcctggtgctggttggcctcatccgcagctccaagggcatcctggtgggggtctgcctgctgggagtcctggccctggtcatcagctggggcgcgctgggcttggagctggctgtgtccgtgggctccagcgacttctgtgtggaccctgacgcctacgtgaccaaaatggtggaggagtactcggtgctgagtggggacatcctgcagtactacctggcctgctcgccccgcgccgccaaccccttccagcagaagctgtcgggcagccacaaggcactggtggagatgcaggatgtcgtggctgagcttctgaggaccgtcccctgggagcagccggccactaaggaccccctcctccgcgtccaggaggtgctgaatggcacggaggtgaacctgcagcacctcaccgccctggtggactgccgcagcctgcatctggactacgtgcaagcgctgaccggcttctgctatgacggcgtggagggcctcatctacctggccctcttctccttcgtcacagccctcatgttcagctccatcgtctgcagcgtcccgcacacctggcagcaaaagagaggccctgatgaggacggggaggaggaggccgctccagggccgcggcaggcgcacgacagcctctaccgcgtccacatgcccagcctgtacagctgtggcagcagctacggcagtgagaccagcatcccggccgcggcccacaccgtcagcaacgccccggtcactgagtacatgagccagaacgctaatttccagaacccccgctgtgagaacaccccactcattgggcgcgagtccccgccgccctcatacacctccagcatgagagccaaatacctcgccacgagccagcctcgccctgactccagcggcagccactagaccgcgcccggcagccacccaccccacgtgccaacttcccctccccgtgccagcactgccgcttccacctgggccacccaccggaccctcgcacgccgtgccaggcctgccccagacgcgtctgcaggccgcttgccctcctgtcccctccccgcaggggcacagtggagacgcaggggctctgggcccgtaccgccaactcgggtcacacctgaacgctgctgccagccgatgccccagccctgcacgccacccactatcccggcacgctccctctgcagatggtcgccgcacctacaagccctggccgcacccaacctgtgttgttgccgcccggcccttccctccacagctctccttcctcccgcccggcacttctgtggaccccttcttagttcacaggcacggctggggccgctctgtgctggcgcctgctggccactgagggacagggacacgtgccacctgctcatctctgccctgaggtcaccccgtggtccctccacgtgcccatctctctgcagtgccctcctcgcctgtgcagcccgcccacccacaggctcacccctcctgccggctgccagaggccccctccagcagggcctctctccgttgccccagcttcactctctccctcagcacctgccctgctggaggccccagccctccgtggacagcaggggccacgtggagcccgggccgctcacccgccacccagtgctggccgccttcttggtgccaaacccccttcccccacccagagactgggcagctgtgtctggttcgttctttgcactaaccacatttgtcatctctagggcaggctggggctgcgggctgagggggaccgctggcaccccccttccctcccttcttggttccatttccatccatgacaggtacagcatcccaggagcccggcctgaggggctggacccgagccggctgtgaacatccctcagcccctgctgtccccccttgggactaaccactaacctcacccccaaactccacgggtgcccctagctggcccagagccggcagtgtgagcccaagtccgggctggagccgaggccggagcagctgtctgggagtcaaggctgcagtagcgtttcttcatggggtgctccagggggtgccacagaccgacaggcagcccaagggcctggacacccctccccaggcaggtgctgccccaggaggactgtcctcgggaatgaacctcccgcgggctttggactgaggtccctgtggcctcggtctcctccccatgaagtgggagcgaggctccccaatggtgcttttggctttagtgtacgatgtttgctgtgcttcccgccgtggagggcagagccaccccacatcaggatcggacgtgctacccctcccggtcccggccctggcccagccagcccagccctcgaggctcgatgcctgtgccaaggccaggggcagccagagggcagctggatggccacgtgcaggggtcaaggctgggccctgcagtggggcgggccgccagccccagcagtttacagacgcatggctcttcctcccagagcagccggcagctacctggaccggaaatgtcctcatcccctccctggggccaggctctgccctggccttcctctgtgaacccctcctttctttgtgctggtgtctgggaccaaaaagggggaatatgggagggcagagtggggaggggagtccatgggcctggggccccaagccggggcgtctgagctccccaggcatgaccaaacctcagtggaggggcctctgcttcaggccccgcctggctgacattctgagcccccctcggaggccccgccacagccaacctgcccagtctttcctctgggcttgacccgccaggggagttctccaggcctagggccaggagagaggccctggcaccctggcgtgggtgcccgccaaacgccctgcgaccgctcagaagcacaaatgctgtccatggccgtgaggctgcctgccaggtgaatggacatagcgtgagaggcggtgaggccagggcttccagcctcgtgctgtctcgggactcctgaccgtggtgtgcgtgtgtgcccgtctgtgactttctactcaccaaggttgaagaaaggaaacggggaaaatcaaaaggggttcaaaccccacctcagtaggtggaggggagcgcctgccattggttgtatttttgttctgagttttcggtgccgtgttcctaactactccatcccatgacctcgccacacctactggggcatctggctggtgcctgctgccatggccagcccccactctcaccctgcacagggggtcttgcagcccccaggcccacagcctcgttgggaggacagggtggccctggggacaagagggaggagcccaggggcttacctcactgagagtgctccccagcaggcatccactaccccagggccccccacatgtcatggcaaggttggtagtgaatgggcctggttgggagcagcccctggcccattgcccacccacccatctcactatgcaattcgagttccaagcaacatttgctcctgccctggggccagctctgccccagccctgagaggggtggtgaggcagccccctggaccccagaaccccagacaagggggcaggcgggggaccagggcctctcctgtgggatctttgttttgtgtttaaccataatggttgtgtactgaaccacttcatatttgttatatataatatatatatatataatctccttaagactcagcctcctggtttacccccccggcctgggcatctgacctcccccaccccagtgtgatttaacatccaggaactgaggcctgaaccattttgcatttccccccgcccaatcggactgccaaattctccggttgccccgggatattatagaaaattattgtatgaataatgaacacattaaaaacacaaccctgggtgccacaaatagaagaaaaaaaaacaaaagagggcacaaaaaaaaaaaacaacaataaaaaaaaaaaaacagtgtgtggcgggcgcgcgccgcagcaccgcacacaggtatctttttgctgaaacaacgatcagtggatgatgagggctgcagatgatccgcacgcgcgagttgctaaaaaaacaacaggcaggaccaactccaatccaggtggaagcccacgaccaacatattggtggggtcgacgaagacacagctgtcatcagattttgtctcaccaacccaatatagtcaagcgcagagcgcggctc

SEQ ID NO: 453574 - DNA, 2113 bp, Homo sapiens
cgggggagaacaaattggcttggtctgagtcctgtttgctttctggcactgtgtgggctgtcgatgcggagcgagcgcagcgagccgggccgagccgggccgggccgggcccaggagcgcgcggatgatgcgggcggccaggcgggggtcgacgggtccctgaagcccgcgccccgggccagcaagggagccccgcgcaggccgcgcgcatccggaggcggccgggccccgccatggccggggtcagctacgcggcgccctggtgggtgagcctcctgcaccggctgccccacttcgacctgagctgggaggccactagcagccagttccggcccgaggacaccgactaccagcaggccctgctgctcctgggggccgccgccctggcctgcctcgccctggacctcctcttcctgctcttctactccttctggctgtgctgccggcggcgcaagagcgaggagcacctggacgccgactgctgctgcacggcctggtgtgtcatcatcgccacgctggtgtgcagcgccggcatcgcagtgggattctacggcaacggggagaccagtgatggcatccatagggccacctactcgctccgccacgccaaccgcacggtggccggggtccaggaccgcgtgtgggacacggcggtggggctgaaccacacggcggagcccagcctgcagaccctggagcggcagctggccgggcggcccgagcccctgcgagccgtacagaggctgcagggcctgctggagacgctgctgggctacacggccgccatccccttttggaggaacacggcggtgtcgctggaggtgctggcggagcaggtggatctctacgactggtacaggtggctgggctacctgggcctgctgctgctggacgtcatcatctgcctcctggtgctggttggcctcatccgcagctccaagggcatcctggtgggggtctgcctgctgggagtcctggccctggtcatcagctggggcgcgctgggcttggagctggctgtgtccgtgggctccagcgacttctgtgtggaccctgacgcctacgtgaccaaaatggtggaggagtactcggtgctgagtggggacatcctgcagtactacctggcctgctcgccccgcgccgccaaccccttccagcagaagctgtcgggcagccacaaggcactggtggagatgcaggatgtcgtggctgagcttctgaggaccgtcccctgggagcagccggccactaaggaccccctcctccgcgtccaggaggtgctgaatggcacggaggtgaacctgcagcacctcaccgccctggtggactgccgcagcctgcatctggactacgtgcaagcgctgaccggcttctgctatgacggcgtggagggcctcatctacctggccctcttctccttcgtcacagccctcatgttcagctccatcgtctgcagcgtcccgcacacctggcagcaaaagagaggccctgatgaggacggggaggaggaggccgctccagggccgcggcaggcgcacgacagcctctaccgcgtccacatgcccagcctgtacagctgtggcagcagctacggcagtgagaccagcatcccggccgcggcccacaccgtcagcaacgccccggtcactgagtacatgagccagaacgctaatttccagaacccccgctgtgagaacaccccactcattgggcgcgagtccccgccgccctcacgctatctggctgccctggactctggcagccacgcgggctggcagtttaagcccatggacagtgcccgaacgctgtggtagctgttccctcagagcgacagtacacctccagcatgagagccaaatacctcgccacgagccagcctcgccctgactccagcggcagccactagaccgcgcccggcagccacccaccccacgtgccaacttcccctccccgtgccagcactgccgcttccacctgggccacccaccggacctcggagcggcagctgccaaagcgtgagcgtgctcctgcctcccgaggcagggaaagaggttgggcggtcggatcggtactgaatggacgatgcagctccgccaaacgggagcctaaaggg

SEQ ID NO: 453575 - DNA, 525 bp, Homo sapiens
tggacccggccctgagcccggaggaggccttggcccggccctggagggtggctggtttgtgtccttcaggtcctgggtgcgtaaggtgcaggtagggccttggagctgtggctcctgggggtggcagaactctgcctggcccaatgcccaaatgccgctggtgtgggcatgggaggctgtgtgtacgcccctcctcagaggagacatcccctgtcctgagcctggagagttcgggggctgcccctccctcagcctcagccagacctagagcgcaggggcccccagccagcggcccctccttagcccctccctataggctctgtcagggcaccctgtactgtcccattctgcccccagggctgttggctcagccaagtgaggaccacgcggaaggcgcccctggctgcgtgcgccatgcaggggccctgctgatgcctcccccttgtctccctccagtacacctccagcatgagagccaaatacctcgccacgagccagcctcgccctgactccagcggcagccac

SEQ ID NO: 453576 - DNA, 769 bp, Homo sapiens
gctccaggcccagggacagcatatgcctgggtgtagaggccacagagccctgccccgagccacaccccagccctgcccgctcctcaccagccagtgccccaggcatccctgccaggccagggaggtcttgctctggcccagggtatactgggatcctatcggtagcaacctgatctgggacagagtaaggcttcaggccccggctctctggctggctgggtgtttccagagttggtggggttttgggggctgcattttgggggctgcggggcagtcgggggagtctgggctcacggtgggagggggcatcccccatggatgccgtctgtggctgtggggctgcaggggcttggagaaggagggggtggcccagggccgagaccaggagccctagggtgggggcagggggactgaggctgcaggagggggtcgcccccagcccccttggcacatgtgtggcagttgagtcctctccgtgtgctccgcggaacccagcgtgcagttttcgcctcgcctgaccgagcccttacatcacttccaccacagacggaaaattccatttggtcagagcccagctgctgatcagacagttcccattctttctctgaatgggccagggaggggcggaggggccgccagcccggtggagagaggtggctgggccaccgtaggaatgccgctggcccggtgccccgcaggagaccgtctgctgggaatctggcttcgggaagtgggtgcagaggccaggctggccacggcacgctccccg

SEQ ID NO: 453577 - DNA, 3800 bp, Homo sapiens
acgctctctctgtgggggttctggaaattagcgttctggctcatgtactcagtgaccggggcgttgctgacggtgtgggccgcggccgggatgctggtctcactgccgtagctgctgccacagctgtacaggctgggcatgtggacgcggtagaggctgtcgtgcgcctgccgcggccctggagcgaccccctcctccgcgtccaggaggtgctgaatggcacggaggtgaacctgcagcacctcaccgccctggtggactgccgcagcctgcatctggactacgtgcaagcgctgaccggcttctgctatgacggcgtggagggcctcatctacctggccctcttctccttcgtcacagccctcatgttcagctccatcgtctgcagcgtcccgcacacctggcagcaaaagagaggccctgatgaggacggggaggaggaggccgctccagggccgcggcaggcgcacgacagcctctaccgcgtccacatgcccagcctgtacagctgtggcagcagctacggcagtgagaccagcatcccggccgcggcccacaccgtcagcaacgccccggtcactgagtacatgagccagaacgctaatttccagaacccccgctgtgagaacaccccactcattgggcgcgagtccccgccgccctcatacacctccagcatgagagccaaatacctcgccacgagccagcctcgccctgactccagcggcagccactagaccgcgcccggcagccacccaccccacgtgccaacttcccctccccgtgccagcactgccgcttccacctgggccacccaccggaccctcgcacgccgtgccaggcctgccccagacgcgtctgcaggccgcttgccctcctgtcccctccccgcaggggcacagtggagacgcaggggctctgggcccgtaccgccaactcgggtcacacctgaacgctgctgccagccgatgccccagccctgcacgccacccactatcccggcacgctccctctgcagatggtcgccgcacctacaagccctggccgcacccaacctgtgttgttgccgcccggcccttccctccacagctctccttcctcccgcccggcacttctgtggaccccttcttagttcacaggcacggctggggccgctctgtgctggcgcctgctggccactgagggacagggacacgtgccacctgctcatctctgccctgaggtcaccccgtggtccctccacgtgcccatctctctgcagtgccctcctcgcctgtgcagcccgcccacccacaggctcacccctcctgccggctgccagaggccccctccagcagggcctctctccgttgccccagcttcactctctccctcagcacctgccctgctggaggccccagccctccgtggacagcaggggccacgtggagcccgggccgctcacccgccacccagtgctggccgccttcttggtgccaaacccccttcccccacccagagactgggcagctgtgtctggttcgttctttgcactaaccacatttgtcatctctagggcaggctggggctgcgggctgagggggaccgctggcaccccccttccctcccttcttggttccatttccatccatgacaggtacagcatcccaggagcccggcctgaggggctggacccgagccggctgtgaacatccctcagcccctgctgtccccccttgggactaaccactaacctcacccccaaactccacgggtgcccctagctggcccagagccggcagtgtgagcccaagtccgggctggagccgaggccggagcagctgtctgggagtcaaggctgcagtagcgtttcttcatggggtgctccagggggtgccacagaccgacaggcagcccaagggcctggacacccctccccaggcaggtgctgccccaggaggactgtcctcgggaatgaacctcccgcgggctttggactgaggtccctgtggcctcggtctcctccccatgaagtgggagcgaggctccccaatggtgcttttggctttagtgtacgatgtttgctgtgcttcccgccgtggagggcagagccaccccacatcaggatcggacgtgctacccctcccggtcccggccctggcccagccagcccagccctcgaggctcgatgcctgtgccaaggccaggggcagccagagggcagctggatggccacgtgcaggggtcaaggctgggccctgcagtggggcgggccgccagccccagcagtttacagacgcatggctcttcctcccagagcagccggcagctacctggaccggaaatgtcctcatcccctccctggggccaggctctgccctggccttcctctgtgaacccctcctttctttgtgctggtgtctgggaccaaaaagggggaatatgggagggcagagtggggaggggagtccatgggcctggggccccaagccggggcgtctgagctccccaggcatgaccaaacctcagtggaggggcctctgcttcaggccccgcctggctgacattctgagcccccctcggaggccccgccacagccaacctgcccagtctttcctctgggcttgacccgccaggggagttctccaggcctagggccaggagagaggccctggcaccctggcgtgggtgcccgccaaacgccctgcgaccgctcagaagcacaaatgctgtccatggccgtgaggctgcctgccaggtgaatggacatagcgtgagaggcggtgaggccagggcttccagcctcgtgctgtctcgggactcctgaccgtggtgtgcgtgtgtgcccgtctgtgactttctactcaccaaggttgaagaaaggaaacggggaaaatcaaaaggggttcaaaccccacctcagtaggtggaggggagcgcctgccattggttgtatttttgttctgagttttcggtgccgtgttcctaactactccatcccatgacctcgccacacctactggggcatctggctggtgcctgctgccatggccagcccccactctcaccctgcacagggggtcttgcagcccccaggcccacagcctcgttgggaggacagggtggccctggggacaagagggaggagcccaggggcttacctcactgagagtgctccccagcaggcatccactaccccagggccccccacatgtcatggcaaggttggtagtgaatgggcctggttgggagcagcccctggcccattgcccacccacccatctcactatgcaattcgagttccaagcaacatttgctcctgccctggggccagctctgccccagccctgagaggggtggtgaggcagccccctggaccccagaaccccagacaagggggcaggcgggggaccagggcctctcctgtgggatctttgttttgtgtttaaccataatggttgtgtactgaaccacttcatatttgttatatataatatatatatatataatctccttaagactcagcctcctggtttacccccccggcctgggcatctgacctcccccaccccagtgtgatttaacatccaggaactgaggcctgaaccattttgcatttccccctcctccagcctctgtagggccatggctgtatgtactgtcgctgtgtttttttgtttttttagaactgggtttgggggctgatttttatttctttgggggctttttttcttggcaaatactaaaaatctcgtcaatgtaatttctgtggtttctattcagcttgggtttcatgttttaaaataaattttaaaaagcaa

SEQ ID NO: 453578 - DNA, 3294 bp, Homo sapiens
cgggggagaacaaattggcttggtctgagtcctgtttgctttctggcactgtgtgggctgtcgatgcggagcgagcgcagcgagccgggccgagccgggccgggccgggcccaggagcgcgcggatgatgcgggcggccaggcgggggtcgacgggtccctgaagcccgcgccccgggccagcaagggagccccgcgcaggccgcgcgcatccggaggcggccgggccccgccatggccggggtcagctacgcggcgccctggtgggtgagcctcctgcaccggctgccccacttcgacctgggccacccaccggaccctcgcacgccgtgccaggcctgccccagacgcgtctgcaggccgcttgccctcctgtcccctccccgcaggggcacagtggagacgcaggggctctgggcccgtaccgccaactcgggtcacacctgaacgctgctgccagccgatgccccagccctgcacgccacccactatcccggcacgctccctctgcagatggtcgccgcacctacaagccctggccgcacccaacctgtgttgttgccgcccggcccttccctccacagctctccttcctcccgcccggcacttctgtggaccccttcttagttcacaggcacggctggggccgctctgtgctggcgcctgctggccactgagggacagggacacgtgccacctgctcatctctgccctgaggtcaccccgtggtccctccacgtgcccatctctctgcagtgccctcctcgcctgtgcagcccgcccacccacaggctcacccctcctgccggctgccagaggccccctccagcagggcctctctccgttgccccagcttcactctctccctcagcacctgccctgctggaggccccagccctccgtggacagcaggggccacgtggagcccgggccgctcacccgccacccagtgctggccgccttcttggtgccaaacccccttcccccacccagagactgggcagctgtgtctggttcgttctttgcactaaccacatttgtcatctctagggcaggctggggctgcgggctgagggggaccgctggcaccccccttccctcccttcttggttccatttccatccatgacaggtacagcatcccaggagcccggcctgaggggctggacccgagccggctgtgaacatccctcagcccctgctgtccccccttgggactaaccactaacctcacccccaaactccacgggtgcccctagctggcccagagccggcagtgtgagcccaagtccgggctggagccgaggccggagcagctgtctgggagtcaaggctgcagtagcgtttcttcatggggtgctccagggggtgccacagaccgacaggcagcccaagggcctggacacccctccccaggcaggtgctgccccaggaggactgtcctcgggaatgaacctcccgcgggctttggactgaggtccctgtggcctcggtctcctccccatgaagtgggagcgaggctccccaatggtgcttttggctttagtgtacgatgtttgctgtgcttcccgccgtggagggcagagccaccccacatcaggatcggacgtgctacccctcccggtcccggccctggcccagccagcccagccctcgaggctcgatgcctgtgccaaggccaggggcagccagagggcagctggatggccacgtgcaggggtcaaggctgggccctgcagtggggcgggccgccagccccagcagtttacagacgcatggctcttcctcccagagcagccggcagctacctggaccggaaatgtcctcatcccctccctggggccaggctctgccctggccttcctctgtgaacccctcctttctttgtgctggtgtctgggaccaaaaagggggaatatgggagggcagagtggggaggggagtccatgggcctggggccccaagccggggcgtctgagctccccaggcatgaccaaacctcagtggaggggcctctgcttcaggccccgcctggctgacattctgagcccccctcggaggccccgccacagccaacctgcccagtctttcctctgggcttgacccgccaggggagttctccaggcctagggccaggagagaggccctggcaccctggcgtgggtgcccgccaaacgccctgcgaccgctcagaagcacaaatgctgtccatggccgtgaggctgcctgccaggtgaatggacatagcgtgagaggcggtgaggccagggcttccagcctcgtgctgtctcgggactcctgaccgtggtgtgcgtgtgtgcccgtctgtgactttctactcaccaaggttgaagaaaggaaacggggaaaatcaaaaggggttcaaaccccacctcagtaggtggaggggagcgcctgccattggttgtatttttgttctgagttttcggtgccgtgttcctaactactccatcccatgacctcgccacacctactggggcatctggctggtgcctgctgccatggccagcccccactctcaccctgcacagggggtcttgcagcccccaggcccacagcctcgttgggaggacagggtggccctggggacaagagggaggagcccaggggcttacctcactgagagtgctccccagcaggcatccactaccccagggccccccacatgtcatggcaaggttggtagtgaatgggcctggttgggagcagcccctggcccattgcccacccacccatctcactatgcaattcgagttccaagcaacatttgctcctgccctggggccagctctgccccagccctgagaggggtggtgaggcagccccctggaccccagaaccccagacaagggggcaggcgggggaccagggcctctcctgtgggatctttgttttgtgtttaaccataatggttgtgtactgaaccacttcatatttgttatatataatatatatatatataatctccttaagactcagcctcctggtttacccccccggcctgggcatctgacctcccccaccccagtgtgatttaacatccaggaactgaggcctgaaccattttgcatttccccctcctccagcctctgtagggccatggctgtatgtactgtcgctgtgtttttttgtttttttagaactgggtttgggggctgatttttatttctttgggggctttttttcttggcaaatactaaaaatctcgtcaatgtaatttctgtggtttctattcagcttgggtttcatgttttaaaataaattttaaaaagcaa

SEQ ID NO: 453579 - DNA, 4981 bp, Homo sapiens
cgggggagaacaaattggcttggtctgagtcctgtttgctttctggcactgtgtgggctgtcgatgcggagcgagcgcagcgagccgggccgagccgggccgggccgggcccaggagcgcgcggatgatgcgggcggccaggcgggggtcgacgggtccctgaagcccgcgccccgggccagcaagggagccccgcgcaggccgcgcgcatccggaggcggccgggccccgccatggccggggtcagctacgcggcgccctggtgggtgagcctcctgcaccggctgccccacttcgacctgagctgggaggccactagcagccagttccggcccgaggacaccgactaccagcaggccctgctgctcctgggggccgccgccctggcctgcctcgccctggacctcctcttcctgctcttctactccttctggctgtgctgccggcggcgcaagagcgaggagcacctggacgccgactgctgctgcacggcctggtgtgtcatcatcgccacgctggtgtgcagcgccggcatcgcagtgggattctacggcaacggggagaccagtgatggcatccatagggccacctactcgctccgccacgccaaccgcacggtggccggggtccaggaccgcgtgtgggacacggcggtggggctgaaccacacggcggagcccagcctgcagaccctggagcggcagctggccgggcggcccgagcccctgcgagccgtacagaggctgcagggcctgctggagacgctgctgggctacacggccgccatccccttttggaggaacacggcggtgtcgctggaggtgctggcggagcaggtggatctctacgactggtacaggtggctgggctacctgggcctgctgctgctggacgtcatcatctgcctcctggtgctggttggcctcatccgcagctccaagggcatcctggtgggggtctgcctgctgggagtcctggccctggtcatcagctggggcgcgctgggcttggagctggctgtgtccgtgggctccagcgacttctgtgtggaccctgacgcctacgtgaccaaaatggtggaggagtactcggtgctgagtggggacatcctgcagtactacctggcctgctcgccccgcgccgccaaccccttccagcagaagctgtcgggcagccacaaggcactggtggagatgcaggatgtcgtggctgagcttctgaggaccgtcccctgggagcagccggccactaaggaccccctcctccgcgtccaggaggtgctgaatggcacggaggtgaacctgcagcacctcaccgccctggtggactgccgcagcctgcatctggactacgtgcaagcgctgaccggcttctgctatgacggcgtggagggcctcatctacctggccctcttctccttcgtcacagccctcatgttcagctccatcgtctgcagcgtcccgcacacctggcagcaaaagagaggccctgatgaggacggggaggaggaggccgctccagggccgcggcaggcgcacgacagcctctaccgcgtccacatgcccagcctgtacagctgtggcagcagctacggcagtgagaccagcatcccggccgcggcccacaccgtcagcaacgccccggtcactgagtacatgagccagaacgctaatttccagaacccccgctgtgagaacaccccactcattgggcgcgagtccccgccgccctcatacacctccagcatgagagccaaatacctcgccacgagccagcctcgccctgactccagcggcagccactagaccgcgcccggcagccacccaccccacgtgccaacttcccctccccgtgccagcactgccgcttccacctgggccacccaccggaccctcgcacgccgtgccaggcctgccccagacgcgtctgcaggccgcttgccctcctgtcccctccccgcaggggcacagtggagacgcaggggctctgggcccgtaccgccaactcgggtcacacctgaacgctgctgccagccgatgccccagccctgcacgccacccactatcccggcacgctccctctgcagatggtcgccgcacctacaagccctggccgcacccaacctgtgttgttgccgcccggcccttccctccacagctctccttcctcccgcccggcacttctgtggaccccttcttagttcacaggcacggctggggccgctctgtgctggcgcctgctggccactgagggacagggacacgtgccacctgctcatctctgccctgaggtcaccccgtggtccctccacgtgcccatctctctgcagtgccctcctcgcctgtgcagcccgcccacccacaggctcacccctcctgccggctgccagaggccccctccagcagggcctctctccgttgccccagcttcactctctccctcagcacctgccctgctggaggccccagccctccgtggacagcaggggccacgtggagcccgggccgctcacccgccacccagtgctggccgccttcttggtgccaaacccccttcccccacccagagactgggcagctgtgtctggttcgttctttgcactaaccacatttgtcatctctagggcaggctggggctgcgggctgagggggaccgctggcaccccccttccctcccttcttggttccatttccatccatgacaggtacagcatcccaggagcccggcctgaggggctggacccgagccggctgtgaacatccctcagcccctgctgtccccccttgggactaaccactaacctcacccccaaactccacgggtgcccctagctggcccagagccggcagtgtgagcccaagtccgggctggagccgaggccggagcagctgtctgggagtcaaggctgcagtagcgtttcttcatggggtgctccagggggtgccacagaccgacaggcagcccaagggcctggacacccctccccaggcaggtgctgccccaggaggactgtcctcgggaatgaacctcccgcgggctttggactgaggtccctgtggcctcggtctcctccccatgaagtgggagcgaggctccccaatggtgcttttggctttagtgtacgatgtttgctgtgcttcccgccgtggagggcagagccaccccacatcaggatcggacgtgctacccctcccggtcccggccctggcccagccagcccagccctcgaggctcgatgcctgtgccaaggccaggggcagccagagggcagctggatggccacgtgcaggggtcaaggctgggccctgcagtggggcgggccgccagccccagcagtttacagacgcatggctcttcctcccagagcagccggcagctacctggaccggaaatgtcctcatcccctccctggggccaggctctgccctggccttcctctgtgaacccctcctttctttgtgctggtgtctgggaccaaaaagggggaatatgggagggcagagtggggaggggagtccatgggcctggggccccaagccggggcgtctgagctccccaggcatgaccaaacctcagtggaggggcctctgcttcaggccccgcctggctgacattctgagcccccctcggaggccccgccacagccaacctgcccagtctttcctctgggcttgacccgccaggggagttctccaggcctagggccaggagagaggccctggcaccctggcgtgggtgcccgccaaacgccctgcgaccgctcagaagcacaaatgctgtccatggccgtgaggctgcctgccaggtgaatggacatagcgtgagaggcggtgaggccagggcttccagcctcgtgctgtctcgggactcctgaccgtggtgtgcgtgtgtgcccgtctgtgactttctactcaccaaggttgaagaaaggaaacggggaaaatcaaaaggggttcaaaccccacctcagtaggtggaggggagcgcctgccattggttgtatttttgttctgagttttcggtgccgtgttcctaactactccatcccatgacctcgccacacctactggggcatctggctggtgcctgctgccatggccagcccccactctcaccctgcacagggggtcttgcagcccccaggcccacagcctcgttgggaggacagggtggccctggggacaagagggaggagcccaggggcttacctcactgagagtgctccccagcaggcatccactaccccagggccccccacatgtcatggcaaggttggtagtgaatgggcctggttgggagcagcccctggcccattgcccacccacccatctcactatgcaattcgagttccaagcaacatttgctcctgccctggggccagctctgccccagccctgagaggggtggtgaggcagccccctggaccccagaaccccagacaagggggcaggcgggggaccagggcctctcctgtgggatctttgttttgtgtttaaccataatggttgtgtactgaaccacttcatatttgttatatataatatatatatatataatctccttaagactcagcctcctggtttacccccccggcctgggcatctgacctcccccaccccagtgtgatttaacatccaggaactgaggcctgaaccattttgcatttccccctcctccagcctctgtagggccatggctgtatgtactgtcgctgtgtttttttgtttttttagaactgggtttgggggctgatttttatttctttgggggctttttttcttggcaaatactaaaaatctcgtcaatgtaatttctgtggtttctattcagcttgggtttcatgttttaaaataaattttaaaaagcaaaagaaatgaagaaaaagagagagagacagagaaatagaaagaaaaaaggggagggacatagaacaaccccggggggcccacatagagagagaacagatttaggcaaagggaaa

SEQ ID NO: 453580 - DNA, 5024 bp, Homo sapiens
cgggggagaacaaattggcttggtctgagtcctgtttgctttctggcactgtgtgggctgtcgatgcggagcgagcgcagcgagccgggccgagccgggccgggccgggcccaggagcgcgcggatgatgcgggcggccaggcgggggtcgacgggtccctgaagcccgcgccccgggccagcaagggagccccgcgcaggccgcgcgcatccggaggcggccgggccccgccatggccggggtcagctacgcggcgccctggtgggtgagcctcctgcaccggctgccccacttcgacctgagctgggaggccactagcagccagttccggcccgaggacaccgactaccagcaggccctgctgctcctgggggccgccgccctggcctgcctcgccctggacctcctcttcctgctcttctactccttctggctgtgctgccggcggcgcaagagcgaggagcacctggacgccgactgctgctgcacggcctggtgtgtcatcatcgccacgctggtgtgcagcgccggcatcgcagtgggattctacggcaacggggagaccagtgatggcatccatagggccacctactcgctccgccacgccaaccgcacggtggccggggtccaggaccgcgtgtgggacacggcggtggggctgaaccacacggcggagcccagcctgcagaccctggagcggcagctggccgggcggcccgagcccctgcgagccgtacagaggctgcagggcctgctggagacgctgctgggctacacggccgccatccccttttggaggaacacggcggtgtcgctggaggtgctggcggagcaggtggatctctacgactggtacaggtggctgggctacctgggcctgctgctgctggacgtcatcatctgcctcctggtgctggttggcctcatccgcagctccaagggcatcctggtgggggtctgcctgctgggagtcctggccctggtcatcagctggggcgcgctgggcttggagctggctgtgtccgtgggctccagcgacttctgtgtggaccctgacgcctacgtgaccaaaatggtggaggagtactcggtgctgagtggggacatcctgcagtactacctggcctgctcgccccgcgccgccaaccccttccagcagaagctgtcgggcagccacaaggcactggtggagatgcaggatgtcgtggctgagcttctgaggaccgtcccctgggagcagccggccactaaggaccccctcctccgcgtccaggaggtgctgaatggcacggaggtgaacctgcagcacctcaccgccctggtggactgccgcagcctgcatctggactacgtgcaagcgctgaccggcttctgctatgacggcgtggagggcctcatctacctggccctcttctccttcgtcacagccctcatgttcagctccatcgtctgcagcgtcccgcacacctggcagcaaaagagaggccctgatgaggacggggaggaggaggccgctccagggccgcggcaggcgcacgacagcctctaccgcgtccacatgcccagcctgtacagctgtggcagcagctacggcagtgagaccagcatcccggccgcggcccacaccgtcagcaacgccccggtcactgagtacatgagccagaacgctaatttccagaacccccgctgtgagaacaccccactcattgggcgcgagtccccgccgccctcatacacctccagcatgagagccaaatacctcgccacgagccagcctcgccctgactccagcggcagccactagaccgcgcccggcagccacccaccccacgtgccaacttcccctccccgtgccagcactgccgcttccacctgggccacccaccggaccctcgcacgccgtgccaggcctgccccagacgcgtctgcaggccgcttgccctcctgtcccctccccgcaggggcacagtggagacgcaggggctctgggcccgtaccgccaactcgggtcacacctgaacgctgctgccagccgatgccccagccctgcacgccacccactatcccggcacgctccctctgcagatggtcgccgcacctacaagccctggccgcacccaacctgtgttgttgccgcccggcccttccctccacagctctccttcctcccgcccggcacttctgtggaccccttcttagttcacaggcacggctggggccgctctgtgctggcgcctgctggccactgagggacagggacacgtgccacctgctcatctctgccctgaggtcaccccgtggtccctccacgtgcccatctctctgcagtgccctcctcgcctgtgcagcccgcccacccacaggctcacccctcctgccggctgccagaggccccctccagcagggcctctctccgttgccccagcttcactctctccctcagcacctgccctgctggaggccccagccctccgtggacagcaggggccacgtggagcccgggccgctcacccgccacccagtgctggccgccttcttggtgccaaacccccttcccccacccagagactgggcagctgtgtctggttcgttctttgcactaaccacatttgtcatctctagggcaggctggggctgcgggctgagggggaccgctggcaccccccttccctcccttcttggttccatttccatccatgacaggtacagcatcccaggagcccggcctgaggggctggacccgagccggctgtgaacatccctcagcccctgctgtccccccttgggactaaccactaacctcacccccaaactccacgggtgcccctagctggcccagagccggcagtgtgagcccaagtccgggctggagccgaggccggagcagctgtctgggagtcaaggctgcagtagcgtttcttcatggggtgctccagggggtgccacagaccgacaggcagcccaagggcctggacacccctccccaggcaggtgctgccccaggaggactgtcctcgggaatgaacctcccgcgggctttggactgaggtccctgtggcctcggtctcctccccatgaagtgggagcgaggctccccaatggtgcttttggctttagtgtacgatgtttgctgtgcttcccgccgtggagggcagagccaccccacatcaggatcggacgtgctacccctcccggtcccggccctggcccagccagcccagccctcgaggctcgatgcctgtgccaaggccaggggcagccagagggcagctggatggccacgtgcaggggtcaaggctgggccctgcagtggggcgggccgccagccccagcagtttacagacgcatggctcttcctcccagagcagccggcagctacctggaccggaaatgtcctcatcccctccctggggccaggctctgccctggccttcctctgtgaacccctcctttctttgtgctggtgtctgggaccaaaaagggggaatatgggagggcagagtggggaggggagtccatgggcctggggccccaagccggggcgtctgagctccccaggcatgaccaaacctcagtggaggggcctctgcttcaggccccgcctggctgacattctgagcccccctcggaggccccgccacagccaacctgcccagtctttcctctgggcttgacccgccaggggagttctccaggcctagggccaggagagaggccctggcaccctggcgtgggtgcccgccaaacgccctgcgaccgctcagaagcacaaatgctgtccatggccgtgaggctgcctgccaggtgaatggacatagcgtgagaggcggtgaggccagggcttccagcctcgtgctgtctcgggactcctgaccgtggtgtgcgtgtgtgcccgtctgtgactttctactcaccaaggttgaagaaaggaaacggggaaaatcaaaaggggttcaaaccccacctcagtaggtggaggggagcgcctgccattggttgtatttttgttctgagttttcggtgccgtgttcctaactactccatcccatgacctcgccacacctactggggcatctggctggtgcctgctgccatggccagcccccactctcaccctgcacagggggtcttgcagcccccaggcccacagcctcgttgggaggacagggtggccctggggacaagagggaggagcccaggggcttacctcactgagagtgctccccagcaggcatccactaccccagggccccccacatgtcatggcaaggttggtagtgaatgggcctggttgggagcagcccctggcccattgcccacccacccatctcactatgcaattcgagttccaagcaacatttgctcctgccctggggccagctctgccccagccctgagaggggtggtgaggcagccccctggaccccagaaccccagacaagggggcaggcgggggaccagggcctctcctgtgggatctttgttttgtgtttaaccataatggttgtgtactgaaccacttcatatttgttatatataatatatatatatataatctccttaagactcagcctcctggtttacccccccggcctgggcatctgacctgaggctgcaggagggggtcgcccccagcccccttggcacatgtgtggcagtcgggggagtctgggctcacggtgggagggggcatccccatggatgccgtctgtggctgtggggctgcaggggcttggagaaggagggggtggcccagggcgaggacccccaccccagtgtgatttaacatccaggaactgaggcctgaaccattttgcatttccccctcctccagcctctgtagggccatggctgtatgtactgtcgctgtgtttttttgtttttttagaactgggtttgggggctgatttttatttctttgggggctttttttcttggcaaatactaaaaatctcgtcaatgtaatttctgtggtttctattcagcttgggtttcatgttttaaaataaattttaaaaagcaa

SEQ ID NO: 453581 - DNA, 4739 bp, Homo sapiens
cgggggagaacaaattggcttggtctgagtcctgtttgctttctggcactgtgtgggctgtcgatgcggagcgagcgcagcgagccgggccgagccgggccgggccgggcccaggagcgcgcggatgatgcgggcggccaggcgggggtcgacgggtccctgaagcccgcgccccgggccagcaagggagccccgcgcaggccgcgcgcatccggaggcggccgggccccgccatggccggggtcagctacgcggcgccctggtgggtgagcctcctgcaccggctgccccacttcgacctgagctgggaggccactagcagccagttccggcccgaggacaccgactaccagcaggccctgctgctcctgggggccgccgccctggcctgcctcgccctggacctcctcttcctgctcttctactccttctggctgtgctgccggcggcgcaagagcgaggagcacctggacgccgactgctgctgcacggcctggtgtgtcatcatcgccacgctggtgtgcagcgccggcatcgcagtgggattctacggcaacggggagaccagtgatggcatccatagggccacctactcgctccgccacgccaaccgcacggtggccggggtccaggaccgcgtgtgggacacggcggtggggctgaaccacacggcggagcccagcctgcagaccctggagcggcagctggccgggcggcccgagcccctgcgagccgtacagaggctgcagggcctgctggagacgctgctgggctacacggccgccatccccttttggaggaacacggcggtgtcgctggaggtgctggcggagcaggtggatctctacgactggtacaggtggctgggctacctgggcctgctgctgctggacgtcatcatctgcctcctggtgctggttggcctcatccgcagctccaagggcatcctggtgggggtctgcctgctgggagtcctggccctggtcatcagctggggcgcgctgggcttggagctggctgtgtccgtgggctccagcgacttctgtgtggaccctgacgcctacgtgaccaaaatggtggaggagtactcggtgctgagtggggacatcctgcagtactacctggcctgctcgccccgcgccgccaaccccttccagcagaagctgtcgggcagccacaaggcactggtggagatgcaggatgtcgtggctgagcttctgaggaccgtcccctgggagcagccggccactaaggaccccctcctccgcgtccaggaggtgctgaatggcacggaggtgaacctgcagcacctcaccgccctggtggactgccgcagcctgcatctggactacgtgcaagcgctgaccggcttctgctatgacggcgtggagggcctcatctacctggccctcttctccttcgtcacagccctcatgttcagctccatcgtctgcagcgtcccgcacacctggcagcaaaagagaggccctgatgaggacggggaggaggaggccgctccagggccgcggcaggcgcacgacagcctctaccgcgtccacatgcccagcctgtacagctgtggcagcagctacggcagtgagaccagcatcccggccgcggcccacaccgtcagcaacgccccggtcactgagtacatgagccagaacgctaatttccagaacccccgctgtgagaacaccccactcattgggcgcgagtccccgccgccctcatacacctccagcatgagagccaaatacctcgccacgagccagcctcgccctgactccagcggcagccactagaccgcgcccggcagccacccaccccacgtgccaacttcccctccccgtgccagcactgccgcttccacctgggccacccaccggaccctcgcacgccgtgccaggcctgccccagacgcgtctgcaggccgcttgccctcctgtcccctccccgcaggggcacagtggagacgcaggggctctgggcccgtaccgccaactcgggtcacacctgaacgctgctgccagccgatgccccagccctgcacgccacccactatcccggcacgctccctctgcagatggtcgccgcacctacaagccctggccgcacccaacctgtgttgttgccgcccggcccttccctccacagctctccttcctcccgcccggcacttctgtggaccccttcttagttcacaggcacggctggggccgctctgtgctggcgcctgctggccactgagggacagggacacgtgccacctgctcatctctgccctgaggtcaccccgtggtccctccacgtgcccatctctctgcagtgccctcctcgcctgtgcagcccgcccacccacaggctcacccctcctgccggctgccagaggccccctccagcagggcctctctccgttgccccagcttcactctctccctcagcacctgccctgctggaggccccagccctccgtggacagcaggggccacgtggagcccgggccgctcacccgccacccagtgctggccgccttcttggtgccaaacccccttcccccacccagagactgggcagctgtgtctggttcgttctttgcactaaccacatttgtcatctctagggcaggctggggctgcgggctgagggggaccgctggcaccccccttccctcccttcttggttccatttccatccatgacaggtacagcatcccaggagcccggcctgaggggctggacccgagccggctgtgaacatccctcagcccctgctgtccccccttgggactaaccactaacctcacccccaaactccacgggtgcccctagctggcccagagccggcagtgtgagcccaagtccgggctggagccgaggccggagcagctgtctgggagtcaaggctgcagtagcgtttcttcatggggtgctccagggggtgccacagaccgacaggcagcccaagggcctggacacccctccccaggcaggtgctgccccaggaggactgtcctcgggaatgaacctcccgcgggctttggactgaggtccctgtggcctcggtctcctccccatgaagtgggagcgaggctccccaatggtgcttttggctttagtgtacgatgtttgctgtgcttcccgccgtggagggcagagccaccccacatcaggatcggacgtgctacccctcccggtcccggccctggcccagccagcccagccctcgaggctcgatgcctgtgccaaggccaggggcagccagagggcagctggatggccacgtgcaggggtcaaggctgggccctgcagtggggcgggccgccagccccagcagtttacagacgcatggctcttcctcccagagcagccggcagctacctggaccggaaatgtcctcatcccctccctggggccaggctctgccctggccttcctctgtgaacccctcctttctttgtgctggtgtctgggaccaaaaagggggaatatgggagggcagagtggggaggggagtccatgggcctggggccccaagccggggcgtctgagctccccaggcatgaccaaacctcagtggaggggcctctgcttcaggccccgcctggctgacattctgagcccccctcggaggccccgccacagccaacctgcccagtctttcctctgggcttgacccgccaggggagttctccaggcctagggccaggagagaggccctggcaccctggcgtgggtgcccgccaaacgccctgcgaccgctcagaagcacaaatgctgtccatggccgtgaggctgcctgccaggtgaatggacatagcgtgagaggcggtgaggccagggcttccagcctcgtgctgtctcgggactcctgaccgtggtgtgcgtgtgtgcccgtctgtgactttctactcaccaaggttgaagaaaggaaacggggaaaatcaaaaggggttcaaaccccacctcagtaggtggaggggagcgcctgccattggttgtatttttgttctgagttttcggtgccgtgttcctaactactccatcccatgacctcgccacacctactggggcatctggctggtgcctgctgccatggccagcccccactctcaccctgcacagggggtcttgcagcccccaggcccacagcctcgttgggaggacagggtggccctggggacaagagggaggagcccaggggcttacctcactgagagtgctccccagcaggcatccactaccccagggccccccacatgtcatggcaaggttggtagtgaatgggcctggttgggagcagcccctggcccattgcccacccacccatctcactatgcaattcgagttccaagcaacatttgctcctgccctggggccagctctgccccagccctgagaggggtggtgaggcagccccctggaccccagaaccccagacaagggggcaggcgggggaccagggcctctcctgtgggatctttgttttgtgtttaaccataatggttgtgaactgaggcctgaaccattttgcatttccccctcctccagcctctgtagggccatggctgtatgtactgtcgctgtgtttttttgtttttttagaactgggtttgggggctgatttttatttctttgggggctttttttcttggcaaatactaaaaatctcgtcaatgtaatttctgtggtttctattcagcttgggtttcatgttttaaaataaattttaaaaagcaa

SEQ ID NO: 453582 - DNA, 1155 bp, Homo sapiens
cgggggagaacaaattggcttggtctgagtcctgtttgctttctggcactgtgtgggctgtcgatgcggagcgagcgcagcgagccgggccgagccgggccgggccgggcccaggagcgcgcggatgatgcgggcggccaggcgggggtcgacgggtccctgaagcccgcgccccgggccagcaagggagccccgcgcaggccgcgcgcatccggaggcggccgggccccgccatggccggggtcagctacgcggcgccctggtgggtgagcctcctgcaccggctgccccacttcgacctgagctgggaggccactagcagccagttccggcccgaggacaccgactaccagcaggccctgctgctcctgggggccgccgccctggcctgcctcgccctggacctcctcttcctgctcttctactccttctggctgtgctgccggcggcgcaagagcgaggagcacctggacgccgactgctgctgcacggcctggtgtgtcatcatcgccacgctggtgtgcagcgccggcatcgcagtgggattctacggcaacggggagaccagtgatggcatccatagggccacctactcgctccgccacgccaaccgcacggtggccggggtccaggaccgcgtgtgggacacggcggtggggctgaaccacacggcggagcccagcctgcagaccctggagcggcagctggccgggcggcccgagcccctgcgagccgtacagaggctgcagggcctgctggagacgctgctgggctacacggccgccatccccttttggaggaacacggcggtgtcgctggaggtgctggcggagcaggtggatctctacgactggtacaggtggctgggctacctgggcctgctgctgctggacgtcatcatctgcctcctggtgctggttggcctcatccgcagctccaagggcatcctggtgggggtctgcctgctgggagtcctggccctggtcatcagctggggcgcgctgggcttggagctggctgtgtccgtgggctccagcgacttctgtgtggaccctgacgcctacgtgaccaaaatggtggaggagtactcggtgctgagtggggcatcctgcagtactaccatgcctacaaccccatgccgcacagatcctcaga

SEQ ID NO: 453583 - DNA, 989 bp, Homo sapiens
  misc_feature (902)..(902): n is a, c, g, or t
actagttctagatcgctcgcgatctagaactagtcgacccacgcgtcgggcaggagaagatggcgaccgtgtgggatgaggccgcaagatggaattggggaggaggtgctcaagatgtccacggaggagatcatccagcgcacacggctgctggacagtgagatcaagatcatgaagagtgaagtgttgagagtcacccatgagctccaagccatgaaggacaagataaaagagaacagtgagaaaatcaaagtgaacaagaccctgccgtaccttgtctccaacgtcatcgagctcctggatgttgatcctaatgaccaagaggaggatggtgccaatattgacctggactcccagaggaagggcaagtgtgctgtgatcaaaacctctacacgacagacgtacttccttcctgtgattgggttggtggatgctgaaaagctaaagccaggagacctggtgggtgtgaacaaagactcctatctgatcctggagacgctgcccacagagtatgactcgcgggtgaaggccatggaggtagacgagaggcccacggagcaatacagtgacattgggggtttggacaagcagatccaggagctggtggaggccattgtcttgccaatgaaccacaaggagaagtttgagaacttggggatccaacctccaaaaggggtgctgatgtatgggcccccagggacggggaagaccctcctggcccgggcctgtgccgcacagactaaggccaccttcctaaagctggctggcccccagctggtgcagatgttcattggagatggtgccaagctagtccgggatgcctttgccctggccaaggagaaagcgccctctatcatcttcattgatgagttggatgccatcggcaccaagcgcaagcttgnagtgaaaggtggccgagtgtaggaattggctttacactgaggccccaccacattggttgcaagggtggggcccctcggggaagaaag

SEQ ID NO: 453584 - DNA, 1577 bp, Homo sapiens
cctgtggccaggggttggtctttggaatcggagaggcagattcgctgctccgcagcacggccggagctggtcgggtcaagagtcgggatttgtggggagaggttttccactggtcaagagaaggctttaagaaagacggtattaatctcccgttgcggctcccgcctggtcccatcttctgcccgctcctccaggaaatgaatctgctgccgaatattgagagtccagtgactcggcaggagaagatggcgaccgtgtgggatgaggccgagcaagatggaattggggaggaggtgctcaagatgtccacggaggagatcatccagcgcacacggctgctggacagtgagatcaagatcatgaagagtgaagtgttgagagtcacccatgagctccaagccatgaaggacaagataaaagagaacagtgagaaaatcaaagtgaacaagaccctgccgtaccttgtctccaacgtcatcgagctcctggatgttgatcctaatgaccaagaggaggatggtgccaatattgacctggactcccagaggaagggcaagtgtgctgtgatcaaaacctctacacgacagacgtacttccttcctgtgattgggttggtggatgctgaaaagctaaagccaggagacctggtgggtgtgaacaaagactcctatctgatcctggagacgctgcccacagagtatgactcgcgggtgaaggccatggaggtagacgagaggcccacggagcaatacagtgacattgggggtttggacaagcagatccaggagctggtggaggccattgtcttgccaatgaaccacaaggagaagtttgagaacttggggatccaacctccaaaaggggtgctgatgtatgggcccccagggacggggaagaccctcctggcccgggcctgtgccgcacagactaaggccaccttcctaaagctggctggcccccagctggtgcagatgttcattggagatggtgccaagctagtccgggatgcctttgccctggccaaggagaaagcgccctctatcatcttcattgatgagttggatgccatcggcaccaagcgctttgacagtgagaaggctggggaccgggaggtgcagaggacaatgctggagcttctgaaccagctggatggcttccagcccaacacccaagttaaggtaattgcagccacaaacagggtggacatcctggaccccgccctcctccgctcgggccgccttgaccgcaagatagagttcccgatgcccaatgaggaggcccgggccagaatcatgcagatccactcccgaaagatgaatgtcagtcctgacgtgaactacgaggagctggcccgctgcacagatgacttcaatggggcccagtgcaaggctgtgtgtgtggaggcgggcatgatcgcactgcgcaggggtgccacggagctcacccacgaggactacatggaaggcatcctggaggtgcaggccaagaagaaagccaacctacaatactacgcctagggcacacaggccagccccagtctcacggctgaagtgcgcaataaaagatggtttagggtc

SEQ ID NO: 453585 - DNA, 1430 bp, Homo sapiens
gtaactcggcgaggggcattattaatccacatggtttgttctaatgcaatttattaacccagcatggtttgtagagtccagtgactcggcaggagaagatggcgaccgtgtgggatgaggccgagcaagatggaattggggaggaggtgctcaagatgtccacggaggagatcatccagcgcacacggctgctggacagtgagatcaagatcatgaagagtgaagtgttgagagtcacccatgagctccaagccatgaaggacaagataaaagagaacagtgagaaaatcaaagtgaacaagaccctgccgtaccttgtctccaacgtcatcgagctcctggatgttgatcctaatgaccaagaggaggatggtgccaatattgacctggactcccagaggaagggcaagtgtgctgtgatcaaaacctctacacgacagacgtacttccttcctgtgattgggttggtggatgctgaaaagctaaagccaggagacctggtgggtgtgaacaaagactcctatctgatcctggagacgctgcccacagagtatgactcgcgggtgaaggccatggaggtagacgagaggcccacggagcaatacagtgacattgggggtttggacaagcagatccaggagctggtggaggccattgtcttgccaatgaaccacaaggagaagtttgagaacttggggatccaacctccaaaaggggtgctgatgtatgggcccccagggacggggaagaccctcctggcccgggcctgtgccgcacagactaaggccaccttcctaaagctggctggcccccagctggtgcagatgttcattggagatggtgccaagctagtccgggatgcctttgccctggccaaggagaaagcgccctctatcatcttcattgatgagttggatgccatcggcaccaagcgctttgacagtgagaaggctggggaccgggaggtgcagaggacaatgctggagcttctgaaccagctggatggcttccagcccaacacccaagttaaggtaattgcagccacaaacagggtggacatcctggaccccgccctcctccgctcgggccgccttgaccgcaagatagagttcccgatgcccaatgaggaggcccgggccagaatcatgcagatccactcccgaaagatgaatgtcagtcctgacgtgaactacgaggagctggcccgctgcacagatgacttcaatggggcccagtgcaaggctgtgtgtgtggaggcgggcatgatcgcactgcgcaggggtgccacggagctcacccacgaggactacatggaaggcatcctggaggtgcaggccaagaagaaagccaacctacaatactacgcctagggcacacaggccagccccagtctcacggctgaagtgcgcaataaaagatggtttagggtc

SEQ ID NO: 453586 - DNA, 1490 bp, Homo sapiens
cctgtggccaggggttggtctttggaatcggagaggcagattcgctgctccgcagcacggccggagctggtcgggtcaagagtcgggatttgtggggagaggttttccactggtcaagagaaggctttaagaaagacggtattaatctcccgttgcggctcccgcctggtcccatcttctgcccgctcctccaggaaatgaatctgctgccgaatattgagagtccagtgactcggcaggagaagatggcgaccgtgtgggatgaggccgagcaagatggaattggggaggaggtgctcaagatgtccacggaggagatcatccagcgcacacggctgctggacagtgagatcaagatcatgaagagtgaagtgttgagagtcacccatgagctccaagccatgaaggacaagataaaagagaacagtgagaaaatcaaagtgaacaagaccctgccgtaccttgtctccaacgtcatcgagctcctggatgttgatcctaatgaccaagaggaggatggtgccaatattgacctggactcccagaggaagggcaagtgtgctgtgatcaaaacctctacacgacagacgtacttccttcctgtgattgggttggtggatgctgaaaagctaaagccaggagacctggtgggtgtgaacaaagactcctatctgatcctggagacgctgcccacagagtatgactcgcgggtgaaggccatggaggtagacgagaggcccacggagcaatacagtgacattgggggtttggacaagcagatccaggagctggtggaggccattgtcttgccaatgaaccacaaggagaagtttgagaacttggggatccaacctccaaaaggggtgctgatgtatgggcccccagggacggggaagaccctcctggcccgggcctgtgccgcacagactaaggccaccttcctaaagctggctggcccccagctggtgcagatgttcattggagatggtgccaagctagtccgggatgcctttgccctggccaaggagaaagcgccctctatcatcttcattgatgagttggatgccatcggcaccaagcgctttgacagtgagaaggctggggaccgggaggtgcagaggacaatgctggagcttctgaaccagctggatggcttccagcccaacacccaagttaaggtaattgcagccacaaacagggtggacatcctggaccccgccctcctccgctcgggccgccttgaccgcaagatagagttcccgatgcccaatgaggaggcccgggccagaatcatgcagatccactcccgaaagatgaatgtcagtcctgacgtgaactacgaggagctggcccgctgcacagatgacttcaatggggcccagtgcaaggctgtgtgtgtggaggcgggcatgatcgcactgcgcaggggtgccacggagctcacccacgagtcgagcggccgctaatttagtagtagtagtagtagtagc

SEQ ID NO: 453587 - DNA, 1227 bp, Homo sapiens
cctgtggccaggggttggtctttggaatcggagaggcagattcgctgctccgcagcacggccggagctggtcgggtcaagagtcgggatttgtggggagaggttttccactggtcaagagaaggctttaagaaagacggtattaatctcccgttgcggctcccgcctggtcccatcttctgcccgctcctccaggaaatgaatctgctgccgaatattgagagtccagtgactcggcaggagaagatggcgaccgtgtgggatgaggccgagcaagatggaattggggaggaggtgctcaagatgtccacggaggagatcatccagcgcacacggctgctggacagtgagatcaagatcatgaagagtgaagtgttgagagtcacccatgagctccaagccatgaaggacaagataaaagagaacagtgagaaaatcaaagtgaacaagaccctgccgtaccttgtctccaacgtcatcgagctcctggatgttgatcctaatgaccaagaggaggatggtgccaatattgacctggactcccagaggaagggcaagtgtgctgtgatcaaaacctctacacgacagacgtacttccttcctgtgattgggttggtggatgctgaaaagctaaagccaggagacctggtgggtgtgaacaaagactcctatctgatcctggagacgctgcccacagagtatgactcgcgggtgaaggccatggaggtagacgagaggcccacggagcaatacagtgacattgggggtttggacaagcagatccaggagctggtggaggccattgtcttgccaatgaaccacaaggagaagtttgagaacttggggatccaacctccaaaaggggtgctgatgtatgggcccccagggacggggaagaccctcctggcccgggcctgtgccgcacagactaaggccaccttcctaaagctggctggcccccagctggtgcagatgttcattggagatggtgccaagctagtccgggatgcctttgccctggccaaggagaaagcgccctctatcatcttcattgatgagttggatgccatcggcaccaagcgctttgacagtgagaaggctggggaccgggaggtgcagaggacaatgctggagcttctgaaccagctggatggcttccagcccaacacccaagttaaggtaattgcagcctcatcagtggtggacagctcgccaggcgtcagccgac

SEQ ID NO: 453588 - DNA, 1447 bp, Homo sapiens
cctgtggccaggggttggtctttggaatcggagaggcagattcgctgctccgcagcacggccggagctggtcgggtcaagagtcgggatttgtggggagaggttttccactggtcaagagaaggctttaagaaagacggtattaatctcccgttgcggctcccgcctggtcccatcttctgcccgctcctccaggaaatgaatctgctgccgaatattgagagtccagtgactcggcaggagaagatggcgaccgtgtgggatgaggccgagcaagatggaattggggaggaggtgctcaagatgtccacggaggagatcatccagcgcacacggctgctggacagtgagatcaagatcatgaagagtgaagtgttgagagtcacccatgagctccaagccatgaaggacaagataaaagagaacagtgagaaaatcaaagtgaacaagaccctgccgtaccttgtctccaacgtcatcgagctcctggatgttgatcctaatgaccaagaggaggatggtgccaatattgacctggactcccagaggaagggcaagtgtgctgtgatcaaaacctctacacgacagacgtacttccttcctgtgattgggttggtggatgctgaaaagctaaagccaggagacctggtgggtgtgaacaaagactcctatctgatcctggagacgctgcccacagagtatgactcgcgggtgaaggccatggaggtagacgagaggcccacggagcaatacagtgacattgggggtttggacaagcagatccaggagctggtggaggccattgtcttgccaatgaaccacaaggagaagtttgagaacttggggatccaacctccaaaaggggtgctgatgtatgggcccccagggacggggaagaccctcctggcccgggcctgtgccgcacagactaaggccaccttcctaaagctggctggcccccagctggtgcagatgttcattggagatggtgccaagctagtccgggatgcctttgccctggccaaggagaaagcgccctctatcatcttcattgatgagttggatgccatcggcaccaagcggaccccgccctcctccgctcgggccgccttgaccgcaagatagagttcccgatgcccaatgaggaggcccgggccagaatcatgcagatccactcccgaaagatgaatgtcagtcctgacgtgaactacgaggagctggcccgctgcacagatgacttcaatggggcccagtgcaaggctgtgtgtgtggaggcgggcatgatcgcactgcgcaggggtgccacggagctcacccacgaggactacatggaaggcatcctggaggtgcaggccaagaagaaagccaacctacaatactacgcctagggcacacaggccagccccagtctcacggctgaagtgcgcaataaaagatggtttagggtc

SEQ ID NO: 453589 - DNA, 1177 bp, Homo sapiens
  misc_feature (1090)..(1090): n is a, c, g, or t
cctgtggccaggggttggtctttggaatcggagaggcagattcgctgctccgcagcacggccggagctggtcgggtcaagagtcgggatttgtggggagaggttttccactggtcaagagaaggctttaagaaagacggtattaatctcccgttgcggctcccgcctggtcccatcttctgcccgctcctccaggaaatgaatctgctgccgaatattgagagtccagtgactcggcaggagaagatggcgaccgtgtgggatgaggccgagcaagatggaattggggaggaggtgctcaagatgtccacggaggagatcatccagcgcacacggctgctggacagtgagatcaagatcatgaagagtgaagtgttgagagtcacccatgagctccaagccatgaaggacaagataaaagagaacagtgagaaaatcaaagtgaacaagaccctgccgtaccttgtctccaacgtcatcgagctcctggatgttgatcctaatgaccaagaggaggatggtgccaatattgacctggactcccagaggaagggcaagtgtgctgtgatcaaaacctctacacgacagacgtacttccttcctgtgattgggttggtggatgctgaaaagctaaagccaggagacctggtgggtgtgaacaaagactcctatctgatcctggagacgctgcccacagagtatgactcgcgggtgaaggccatggaggtagacgagaggcccacggagcaatacagtgacattgggggtttggacaagcagatccaggagctggtggaggccattgtcttgccaatgaaccacaaggagaagtttgagaacttggggatccaacctccaaaaggggtgctgatgtatgggcccccagggacggggaagaccctcctggcccgggcctgtgccgcacagactaaggccaccttcctaaagctggctggcccccagctggtgcagatgttcattggagatggtgccaagctagtccgggatgcctttgccctggccaaggagaaagcgccctctatcatcttcattgatgagttggatgccatcggcaccaagcgcaagcttgnagtgaaaggtggccgagtgtaggaattggctttacactgaggccccaccacattggttgcaagggtggggcccctcggggaagaaag

SEQ ID NO: 453590 - DNA, 1342 bp, Homo sapiens
gcctgtagtcctagctatttcgggcaggatgaggccgcaagatggaattggggaggaggtgctcaagatgtccacggaggagatcatccagcgcacacggctgctggacagtgagatcaagatcatgaagagtgaagtgttgagagtcacccatgagctccaagccatgaaggacaagataaaagagaacagtgagaaaatcaaagtgaacaagaccctgccgtaccttgtctccaacgtcatcgagctcctggatgttgatcctaatgaccaagaggaggatggtgccaatattgacctggactcccagaggaagggcaagtgtgctgtgatcaaaacctctacacgacagacgtacttccttcctgtgattgggttggtggatgctgaaaagctaaagccaggagacctggtgggtgtgaacaaagactcctatctgatcctggagacgctgcccacagagtatgactcgcgggtgaaggccatggaggtagacgagaggcccacggagcaatacagtgacattgggggtttggacaagcagatccaggagctggtggaggccattgtcttgccaatgaaccacaaggagaagtttgagaacttggggatccaacctccaaaaggggtgctgatgtatgggcccccagggacggggaagaccctcctggcccgggcctgtgccgcacagactaaggccaccttcctaaagctggctggcccccagctggtgcagatgttcattggagatggtgccaagctagtccgggatgcctttgccctggccaaggagaaagcgccctctatcatcttcattgatgagttggatgccatcggcaccaagcgctttgacagtgagaaggctggggaccgggaggtgcagaggacaatgctggagcttctgaaccagctggatggcttccagcccaacacccaagttaaggtaattgcagccacaaacagggtggacatcctggaccccgccctcctccgctcgggccgccttgaccgcaagatagagttcccgatgcccaatgaggaggcccgggccagaatcatgcagatccactcccgaaagatgaatgtcagtcctgacgtgaactacgaggagctggcccgctgcacagatgacttcaatggggcccagtgcaaggctgtgtgtgtggaggcgggcatgatcgcactgcgcaggggtgccacggagctcacccacgaggactacatggaaggcatcctggaggtgcaggccaagaagaaagccaacctacaatactacgcctagggcacacaggccagccccagtctcacggctgaagtgcgcaataaaagatggtttagggtc

SEQ ID NO: 453591 - DNA, 1389 bp, Homo sapiens
actagttctagatcgctcgcgatctagaactagtcgacccacgcgtcgggcaggagaagatggcgaccgtgtgggatgaggccgcaagatggaattggggaggaggtgctcaagatgtccacggaggagatcatccagcgcacacggctgctggacagtgagatcaagatcatgaagagtgaagtgttgagagtcacccatgagctccaagccatgaaggacaagataaaagagaacagtgagaaaatcaaagtgaacaagaccctgccgtaccttgtctccaacgtcatcgagctcctggatgttgatcctaatgaccaagaggaggatggtgccaatattgacctggactcccagaggaagggcaagtgtgctgtgatcaaaacctctacacgacagacgtacttccttcctgtgattgggttggtggatgctgaaaagctaaagccaggagacctggtgggtgtgaacaaagactcctatctgatcctggagacgctgcccacagagtatgactcgcgggtgaaggccatggaggtagacgagaggcccacggagcaatacagtgacattgggggtttggacaagcagatccaggagctggtggaggccattgtcttgccaatgaaccacaaggagaagtttgagaacttggggatccaacctccaaaaggggtgctgatgtatgggcccccagggacggggaagaccctcctggcccgggcctgtgccgcacagactaaggccaccttcctaaagctggctggcccccagctggtgcagatgttcattggagatggtgccaagctagtccgggatgcctttgccctggccaaggagaaagcgccctctatcatcttcattgatgagttggatgccatcggcaccaagcgctttgacagtgagaaggctggggaccgggaggtgcagaggacaatgctggagcttctgaaccagctggatggcttccagcccaacacccaagttaaggtaattgcagccacaaacagggtggacatcctggaccccgccctcctccgctcgggccgccttgaccgcaagatagagttcccgatgcccaatgaggaggcccgggccagaatcatgcagatccactcccgaaagatgaatgtcagtcctgacgtgaactacgaggagctggcccgctgcacagatgacttcaatggggcccagtgcaaggctgtgtgtgtggaggcgggcatgatcgcactgcgcaggggtgccacggagctcacccacgaggactacatggaaggcatcctggaggtgcaggccaagaagaaagccaacctacaatactacgcctagggcacacaggccagccccagtctcacggctgaagtgcgcaataaaagatggtttagggtc

SEQ ID NO: 453592 - DNA, 1343 bp, Homo sapiens
cccacgcgtacgcccacgcggtcggtgggatgaggccgcaagatggaattggggaggaggtgctcaagatgtccacggaggagatcatccagcgcacacggctgctggacagtgagatcaagatcatgaagagtgaagtgttgagagtcacccatgagctccaagccatgaaggacaagataaaagagaacagtgagaaaatcaaagtgaacaagaccctgccgtaccttgtctccaacgtcatcgagctcctggatgttgatcctaatgaccaagaggaggatggtgccaatattgacctggactcccagaggaagggcaagtgtgctgtgatcaaaacctctacacgacagacgtacttccttcctgtgattgggttggtggatgctgaaaagctaaagccaggagacctggtgggtgtgaacaaagactcctatctgatcctggagacgctgcccacagagtatgactcgcgggtgaaggccatggaggtagacgagaggcccacggagcaatacagtgacattgggggtttggacaagcagatccaggagctggtggaggccattgtcttgccaatgaaccacaaggagaagtttgagaacttggggatccaacctccaaaaggggtgctgatgtatgggcccccagggacggggaagaccctcctggcccgggcctgtgccgcacagactaaggccaccttcctaaagctggctggcccccagctggtgcagatgttcattggagatggtgccaagctagtccgggatgcctttgccctggccaaggagaaagcgccctctatcatcttcattgatgagttggatgccatcggcaccaagcgctttgacagtgagaaggctggggaccgggaggtgcagaggacaatgctggagcttctgaaccagctggatggcttccagcccaacacccaagttaaggtaattgcagccacaaacagggtggacatcctggaccccgccctcctccgctcgggccgccttgaccgcaagatagagttcccgatgcccaatgaggaggcccgggccagaatcatgcagatccactcccgaaagatgaatgtcagtcctgacgtgaactacgaggagctggcccgctgcacagatgacttcaatggggcccagtgcaaggctgtgtgtgtggaggcgggcatgatcgcactgcgcaggggtgccacggagctcacccacgaggactacatggaaggcatcctggaggtgcaggccaagaagaaagccaacctacaatactacgcctagggcacacaggccagccccagtctcacggctgaagtgcgcaataaaagatggtttagggtc

SEQ ID NO: 453593 - DNA, 1280 bp, Homo sapiens
cccacgcgtacgcccacgcggtcggtgggatgaggccgcaagatggaattggggaggaggtgctcaagatgtccacggaggagatcatccagcgcacacggctgctggacagtgagatcaagatcatgaagagtgaagtgttgagagtcacccatgagctccaagccatgaaggacaagataaaagagaacagtgagaaaatcaaagtgaacaagaccctgccgtaccttgtctccaacgtcatcgagctcctggatgttgatcctaatgaccaagaggaggatggtgccaatattgacctggactcccagaggaagggcaagtgtgctgtgatcaaaacctctacacgacagacgtacttccttcctgtgattgggttggtggatgctgaaaagctaaagccaggagacctggtgggtgtgaacaaagactcctatctgatcctggagacgctgcccacagagtatgactcgcgggtgaaggccatggaggtagacgagaggcccacggagcaatacagtgacattgggggtttggacaagcagatccaggagctggtggaggccattgtcttgccaatgaaccacaaggagaagtttgagaacttggggatccaacctccaaaaggggtgctgatgtatgggcccccagggacggggaagaccctcctggcccgggcctgtgccgcacagactaagctagtccgggatgcctttgccctggccaaggagaaagcgccctctatcatcttcattgatgagttggatgccatcggcaccaagcgctttgacagtgagaaggctggggaccgggaggtgcagaggacaatgctggagcttctgaaccagctggatggcttccagcccaacacccaagttaaggtaattgcagccacaaacagggtggacatcctggaccccgccctcctccgctcgggccgccttgaccgcaagatagagttcccgatgcccaatgaggaggcccgggccagaatcatgcagatccactcccgaaagatgaatgtcagtcctgacgtgaactacgaggagctggcccgctgcacagatgacttcaatggggcccagtgcaaggctgtgtgtgtggaggcgggcatgatcgcactgcgcaggggtgccacggagctcacccacgaggactacatggaaggcatcctggaggtgcaggccaagaagaaagccaacctacaatactacgcctagggcacacaggccagccccagtctcacggctgaagtgcgcaataaaagatggtttagggtc

SEQ ID NO: 453594 - DNA, 512 bp, Homo sapiens
aggacatcaagaagccagctgaagatgagtggggtaaaaccccagacgccatgaaagctgccatggccctggagaaaaagctgaaccaggcccttttggatcttcatgccctgggttctgcccgcacggacccccatctctgtgacgaccccgccctcctccgctcgggccgccttgaccgcaagatagagttcccgatgcccaatgaggaggcccgggccagaatcatgcagatccactcccgaaagatgaatgtcagtcctgacgtgaactacgaggagctggcccgctgcacagatgacttcaatggggcccagtgcaaggctgtgtgtgtggaggcgggcatgatcgcactgcgcaggggtgccacggagctcacccacgaggactacatggaaggcatcctggaggtgcaggccaagaagaaagccaacctacaatactacgcctagggcacacaggccagccccagtctcacggctgaagtgcgcaataaaagatggtttagggtc

SEQ ID NO: 453595 - DNA, 367 bp, Homo sapiens
agtgcaaggctgtgtgtgtggaggcggtgagtggtcagctggggtgggtgcgttgctttgtgccttcttgccccctccctggacaggatgggggcatttggctggtggagacggctgagggaagaggcctgagcctcagggagccagggaaggcattcaggcgttcagacctagactctgtttgtcccggctgtagggcatgatcgcactgcgcaggggtgccacggagctcacccacgaggactacatggaaggcatcctggaggtgcaggccaagaagaaagccaacctacaatactacgcctagggcacacaggccagccccagtctcacggctgaagtgcgcaataaaagatggtttagggtc

SEQ ID NO: 453596 - DNA, 1177 bp, Homo sapiens
gcctgtagtcctagctatttcgggcaggatgaggccgcaagatggaattggggaggaggtgctcaagatgtccacggaggagatcatccagcgcacacggctgctggacagtgagatcaagatcatgaagagtgaagtgttgagagtcacccatgagctccaagccatgaaggacaagataaaagagaacagtgagaaaatcaaagtgaacaagaccctgccgtaccttgtctccaacgtcatcgagctcctggatgttgatcctaatgaccaagaggaggatggtgccaatattgacctggactcccagaggaagggcaagtgtgctgtgatcaaaacctctacacgacagacgtacttccttcctgtgattgggttggtggatgctgaaaagctaaagccaggagacctggtgggtgtgaacaaagactcctatctgatcctggagacgctgcccacagagtatgactcgcgggtgaaggccatggaggtagacgagaggcccacggagcaatacagtgacattgggggtttggacaagcagatccaggagctggtggaggccattgtcttgccaatgaaccacaaggagaagtttgagaacttggggatccaacctccaaaaggggtgctgatgtatgggcccccagggacggggaagaccctcctggcccgggcctgtgccgcacagactaaggccaccttcctaaagctggctggcccccagctggtgcagatgttcattggagatggtgccaagctagtccgggatgcctttgccctggccaaggagaaagcgccctctatcatcttcattgatgagttggatgccatcggcaccaagcgctttgacagtgagaaggctggggaccgggaggtgcagaggacaatgctggagcttctgaaccagctggatggcttccagcccaacacccaagttaaggtattgcagcacaaacagggtggacatctggacccgcctcctcgctcgggcgctttacgcagatgagtccgagccatgaggagccggcaaataggacatccgagatagtagctgagtgaaaagaggcgcggaattaggggccgcagtttgtggggcaacccgggcggacccgataagtgggtgaaatcgagcccctgggattggaaaggtgccctttagggtaaatttatttgg

SEQ ID NO: 453597 - DNA, 1625 bp, Homo sapiens
cctgtggccaggggttggtctttggaatcggagaggcagattcgctgctccgcagcacggccggagctggtcgggtcaagagtcgggatttgtggggagaggttttccactggtcaagagaaggctttaagaaagacggtattaatctcccgttgcggctcccgcctggtcccatcttctgcccgctcctccaggaaatgaatctgctgccgaatattgagagtccagtgactcggcaggagaagatggcgaccgtgtgggatgaggccgagcaagatggaattggggaggaggtgctcaagatgtccacggaggagatcatccagcgcacacggctgctggacagtgagatcaagatcatgaagagtgaagtgttgagagtcacccatgagctccaagccatgaaggacaagataaaagagaacagtgagaaaatcaaagtgaacaagaccctgccgtaccttgtctccaacgtcatcgagctcctggatgttgatcctaatgaccaagaggaggatggtgccaatattgacctggactcccagaggaagggcaagtgtgctgtgatcaaaacctctacacgacagacgtacttccttcctgtgattgggttggtggatgctgaaaagctaaagccaggagacctggtgggtgtgaacaaagactcctatctgatcctggagacgctgcccacagagtatgactcgcgggtgaaggccatggaggtagacgagaggcccacggagcaatacagtgacattgggggtttggacaagcagatccaggagctggtggaggccattgtcttgccaatgaaccacaaggagaagtttgagaacttggggatccaacctccaaaaggggtgctgatgtatgggcccccagggacggggaagaccctcctggcccgggcctgtgccgcacagactaaggccaccttcctaaagctggctggcccccagctggtgcagatgttcattggagatggtgccaagctagtccgggatgcctttgccctggccaaggagaaagcgccctctatcatcttcattgatgagttggatgccatcggcaccaagcgctttgacagtgagaaggctggggaccgggaggtgcagaggacaatgctggagcttctgaaccagctggatggcttccagcccaacacccaagttaaggtaattgcagccacaaacagggtggacatcctggaccccgccctcctccgctcgggccgccttgaccgcaagatagagttcccgatgcccaatgaggaggcccgggccagaatcatgcagatccactcccgaaagatgaatgtcagtcctgacgtgaactacgaggagctggcccgctgcacagatgacttcaatggggcccagtgcaaggctgtgtgtgtggaggcgggcatgatcgcactgcgcaggggtgccacggagctcacccacgaggactacatggaaggcatcctggaggtgcaggccaagaagaaagccaacctacaatactacgcctagggcacacaggccagccccagtctcacggctgaagtgcgcaataaaagatggtttagggtcaaaaaaaaagtcgacgcggccgcgaatttagtagtagtaggcggccgc

SEQ ID NO: 453598 - DNA, 1898 bp, Homo sapiens
cctgtggccaggggttggtctttggaatcggagaggcagattcgctgctccgcagcacggccggagctggtcgggtcaagagtcgggatttgtggggagaggttttccactggtcaagagaaggctttaagaaagacggtattaatctcccgttgcggctcccgcctggtcccatcttctgcccgctcctccaggaaatgaatctgctgccgaatattgagagtccagtgactcggcaggagaagatggcgaccgtgtgggatgaggccgagcaagatggaattggggaggaggtgctcaagatgtccacggaggagatcatccagcgcacacggctgctggacagtgagatcaagatcatgaagagtgaagtgttgagagtcacccatgagctccaagccatgaaggacaagataaaagagaacagtgagaaaatcaaagtgaacaagaccctgccgtaccttgtctccaacgtcatcgagctcctggatgttgatcctaatgaccaagaggaggatggtgccaatattgacctggactcccagaggaagggcaagtgtgctgtgatcaaaacctctacacgacagacgtacttccttcctgtgattgggttggtggatgctgaaaagctaaagccaggagacctggtgggtgtgaacaaagactcctatctgatcctggagacgctgcccacagagtatgactcgcgggtgaaggccatggaggtagacgagaggcccacggagcaatacagtgacattgggggtttggacaagcagatccaggagctggtggaggccattgtcttgccaatgaaccacaaggagaagtttgagaacttggggatccaacctccaaaaggggtgctgatgtatgggcccccagggacggggaagaccctcctggcccgggcctgtgccgcacagactaaggccaccttcctaaagctggctggcccccagctggtgcagatgttcattggagatggtgccaagctagtccgggatgcctttgccctggccaaggagaaagcgccctctatcatcttcattgatgagttggatgccatcggcaccaagcgctttgacagtgagaaggctggggaccgggaggtgcagaggacaatgctggagcttctgaaccagctggatggcttccagcccaacacccaagttaaggtaattgcagccacaaacagggtggacatcctggaccccgccctcctccgctcgggccgccttgaccgcaagatagagttcccgatgcccaatgaggaggcccgggccagaatcatgcagatccactcccgaaagatgaatgtcagtcctgacgtgaactacgaggagctggcccgctgcacagatgacttcaatggggcccagtgcaaggctgtgtgtgtggaggcgggcatgatcgcactgcgcaggggtgccacggagctcacccacgaggactacatggaaggcatcctggaggtgcaggccaagaagaaagccaacctacaatactacgcctagggcacacaggccagccccagtctcacggctgaagtgcgcaataaaagatggtttagggtcaaaaaaaatttttttttttttttttgcacataaaaaacgtttattgaacaaacgaatcctgtatgttcctccccccaggcaggaaacgctccctgggagggagggtagtctattggtgagctaggacgtttggactcagggttccgaggaaccaggagcgatccttagtgggccgagacttccgaatttgatcaaaggtaaagagggactggagagcggtccatctgacttctgtgggggatgggcaggagtcaggggcggacgcctgaatcttgtttctcagaagagccgagaggcctaggctcaagcttggctcgtgcc

SEQ ID NO: 453599 - DNA, 1412 bp, Homo sapiens
cctgtggccaggggttggtctttggaatcggagaggcagattcgctgctccgcagcacggccggagctggtcgggtcaagagtcgggatttgtggggagaggttttccactggtcaagagaaggctttaagaaagacggtattaatctcccgttgcggctcccgcctggtcccatcttctgcccgctcctccaggaaatgaatctgctgccgaatattgagagtccagtgactcggcaggagaagatggcgaccgtgtgggatgaggccgagcaagatggaattggggaggaggtgctcaagatgtccacggaggagatcatccagcgcacacggctgctggacagtgagatcaagatcatgaagagtgaagtgttgagagtcacccatgagctccaagccatgaaggacaagataaaagagaacagtgagaaaatcaaagtgaacaagaccctgccgtaccttgtctccaacgtcatcgagctcctggatgttgatcctaatgaccaagaggaggatggtgccaatattgacctggactcccagaggaagggcaagtgtgctgtgatcaaaacctctacacgacagacgtacttccttcctgtgattgggttggtggatgctgaaaagctaaagccaggagacctggtgggtgtgaacaaagactcctatctgatcctggagacgctgcccacagagtatgactcgcgggtgaaggccatggaggtagacgagaggcccacggagcaatacagtgacattgggggtttggacaagcagatccaggagctggtggaggccattgtcttgccaatgaaccacaaggagaagtttgagaacttggggatccaacctccaaaaggggtgctgatgtatgggcccccagggacggggaagaccctcctggcccgggcctgtgccgcacagactaaggccaccttcctaaagctggctggcccccagctggtgcagatgttcattggagatggtgccaagctagtccgggatgcctttgccctggccaaggagaaagcgccctctatcatcttcattgatgagttggatgccatcggcaccaagcgctttgacagtgagaaggctggggaccgggaggtgcagaggacaatgctggagcttctgaaccagctggatggcttccagcccaacacccaagttaaggtattgcagcacaaacagggtggacatctggacccgcctcctcgctcgggcgctttacgcagatgagtccgagccatgaggagccggcaaataggacatccgagatagtagctgagtgaaaagaggcgcggaattaggggccgcagtttgtggggcaacccgggcggacccgataagtgggtgaaatcgagcccctgggattggaaaggtgccctttagggtaaatttatttgg

SEQ ID NO: 453600 - DNA, 1272 bp, Homo sapiens
cctgtggccaggggttggtctttggaatcggagaggcagattcgctgctccgcagcacggccggagctggtcgggtcaagagtcgggatttgtggggagaggttttccactggtcaagagaaggctttaagaaagacggtattaatctcccgttgcggctcccgcctggtcccatcttctgcccgctcctccaggaaatgaatctgctgccgaatattgagagtccagtgactcggcaggagaagatggcgaccgtgtgggatgaggccgagcaagatggaattggggaggaggtgctcaagatgtccacggaggagatcatccagcgcacacggctgctggacagtgagatcaagatcatgaagagtgaagtgttgagagtcacccatgagctccaagccatgaaggacaagataaaagagaacagtgagaaaatcaaagtgaacaagaccctgccgtaccttgtctccaacgtcatcgagctcctggatgttgatcctaatgaccaagaggaggatggtgccaatattgacctggactcccagaggaagggcaagtgtgctgtgatcaaaacctctacacgacagacgtacttccttcctgtgattgggttggtggatgctgaaaagctaaagccaggagacctggtgggtgtgaacaaagactcctatctgatcctggagacgctgcccacagagtatgactcgcgggtgaaggccatggaggtagacgagaggcccacggagcaatacagtgacattgggggtttggacaagcagatccaggagctggtggaggccattgtcttgccaatgaaccacaaggagaagtttgagaacttggggatccaacctccaaaaggggtgctgatgtatgggcccccagggacggggaagaccctcctggcccgggcctgtgccgcacagactaaggccaccttcctaaagctggctggcccccagctggtgcagatgttcattggagatggtgccaagctagtccgggatgcctttgccctggccaaggagaaagcgccctctatcatcttcattgatgagttggatgccatcggcaccaagcgtctgtttgtcccggctgtagggcatgatcgcactgcgcaggggtgccacggagctcacccacgaggactacatggaaggcatcctggaggtgcaggccaagaagaaagccaacctacaatactacgcctagggcacacaggccagccccagtctcacggctgaagtgcgcaataaaagatggtttagggtc

SEQ ID NO: 453601 - DNA, 1514 bp, Homo sapiens
cctgtggccaggggttggtctttggaatcggagaggcagattcgctgctccgcagcacggccggagctggtcgggtcaagagtcgggatttgtggggagaggttttccactggtcaagagaaggctttaagaaagacggtattaatctcccgttgcggctcccgcctggtcccatcttctgcccgctcctccaggaaatgaatctgctgccgaatattgagagtccagtgactcggcaggagaagatggcgaccgtgtgggatgaggccgagcaagatggaattggggaggaggtgctcaagatgtccacggaggagatcatccagcgcacacggctgctggacagtgagatcaagatcatgaagagtgaagtgttgagagtcacccatgagctccaagccatgaaggacaagataaaagagaacagtgagaaaatcaaagtgaacaagaccctgccgtaccttgtctccaacgtcatcgagctcctggatgttgatcctaatgaccaagaggaggatggtgccaatattgacctggactcccagaggaagggcaagtgtgctgtgatcaaaacctctacacgacagacgtacttccttcctgtgattgggttggtggatgctgaaaagctaaagccaggagacctggtgggtgtgaacaaagactcctatctgatcctggagacgctgcccacagagtatgactcgcgggtgaaggccatggaggtagacgagaggcccacggagcaatacagtgacattgggggtttggacaagcagatccaggagctggtggaggccattgtcttgccaatgaaccacaaggagaagtttgagaacttggggatccaacctccaaaaggggtgctgatgtatgggcccccagggacggggaagaccctcctggcccgggcctgtgccgcacagactaagctagtccgggatgcctttgccctggccaaggagaaagcgccctctatcatcttcattgatgagttggatgccatcggcaccaagcgctttgacagtgagaaggctggggaccgggaggtgcagaggacaatgctggagcttctgaaccagctggatggcttccagcccaacacccaagttaaggtaattgcagccacaaacagggtggacatcctggaccccgccctcctccgctcgggccgccttgaccgcaagatagagttcccgatgcccaatgaggaggcccgggccagaatcatgcagatccactcccgaaagatgaatgtcagtcctgacgtgaactacgaggagctggcccgctgcacagatgacttcaatggggcccagtgcaaggctgtgtgtgtggaggcgggcatgatcgcactgcgcaggggtgccacggagctcacccacgaggactacatggaaggcatcctggaggtgcaggccaagaagaaagccaacctacaatactacgcctagggcacacaggccagccccagtctcacggctgaagtgcgcaataaaagatggtttagggtc

SEQ ID NO: 453602 - DNA, 1518 bp, Homo sapiens
gtaactcggcgaggggcattattaatccacatggtttgttctaatgcaatttattaacccagcatggtttgtagagtccagtgactcggcaggagaagatggcgaccgtgtgggatgaggccgaggtgggcaccgggcgagctggcggtccgggaaccggggcccgcagggagacgccattgacaagagggaaggaggtggctgggggtcaagcaagatggaattggggaggaggtgctcaagatgtccacggaggagatcatccagcgcacacggctgctggacagtgagatcaagatcatgaagagtgaagtgttgagagtcacccatgagctccaagccatgaaggacaagataaaagagaacagtgagaaaatcaaagtgaacaagaccctgccgtaccttgtctccaacgtcatcgagctcctggatgttgatcctaatgaccaagaggaggatggtgccaatattgacctggactcccagaggaagggcaagtgtgctgtgatcaaaacctctacacgacagacgtacttccttcctgtgattgggttggtggatgctgaaaagctaaagccaggagacctggtgggtgtgaacaaagactcctatctgatcctggagacgctgcccacagagtatgactcgcgggtgaaggccatggaggtagacgagaggcccacggagcaatacagtgacattgggggtttggacaagcagatccaggagctggtggaggccattgtcttgccaatgaaccacaaggagaagtttgagaacttggggatccaacctccaaaaggggtgctgatgtatgggcccccagggacggggaagaccctcctggcccgggcctgtgccgcacagactaaggccaccttcctaaagctggctggcccccagctggtgcagatgttcattggagatggtgccaagctagtccgggatgcctttgccctggccaaggagaaagcgccctctatcatcttcattgatgagttggatgccatcggcaccaagcgctttgacagtgagaaggctggggaccgggaggtgcagaggacaatgctggagcttctgaaccagctggatggcttccagcccaacacccaagttaaggtaattgcagccacaaacagggtggacatcctggaccccgccctcctccgctcgggccgccttgaccgcaagatagagttcccgatgcccaatgaggaggcccgggccagaatcatgcagatccactcccgaaagatgaatgtcagtcctgacgtgaactacgaggagctggcccgctgcacagatgacttcaatggggcccagtgcaaggctgtgtgtgtggaggcgggcatgatcgcactgcgcaggggtgccacggagctcacccacgaggactacatggaaggcatcctggaggtgcaggccaagaagaaagccaacctacaatactacgcctagggcacacaggccagccccagtctcacggctgaagtgcgcaataaaagatggtttagggtc

SEQ ID NO: 453603 - DNA, 1514 bp, Homo sapiens
cctgtggccaggggttggtctttggaatcggagaggcagattcgctgctccgcagcacggccggagctggtcgggtcaagagtcgggatttgtggggagaggttttccactggtcaagagaaggctttaagaaagacggtattaatctcccgttgcggctcccgcctggtcccatcttctgcccgctcctccaggaaatgaatctgctgccgaatattgagagtccagtgactcggcaggagaagatggcgaccgtgtgggatgaggccgagcaagatggaattggggaggaggtgctcaagatgtccacggaggagatcatccagcgcacacggctgctggacagtgagatcaagatcatgaagagtgaagtgttgagagtcacccatgagctccaagccatgaaggacaagataaaagagaacagtgagaaaatcaaagtgaacaagaccctgccgtaccttgtctccaacgtcatcgagctcctggatgttgatcctaatgaccaagaggaggatggtgccaatattgacctggactcccagaggaagggcaagtgtgctgtgatcaaaacctctacacgacagggtgtgaacaaagactcctatctgatcctggagacgctgcccacagagtatgactcgcgggtgaaggccatggaggtagacgagaggcccacggagcaatacagtgacattgggggtttggacaagcagatccaggagctggtggaggccattgtcttgccaatgaaccacaaggagaagtttgagaacttggggatccaacctccaaaaggggtgctgatgtatgggcccccagggacggggaagaccctcctggcccgggcctgtgccgcacagactaaggccaccttcctaaagctggctggcccccagctggtgcagatgttcattggagatggtgccaagctagtccgggatgcctttgccctggccaaggagaaagcgccctctatcatcttcattgatgagttggatgccatcggcaccaagcgctttgacagtgagaaggctggggaccgggaggtgcagaggacaatgctggagcttctgaaccagctggatggcttccagcccaacacccaagttaaggtaattgcagccacaaacagggtggacatcctggaccccgccctcctccgctcgggccgccttgaccgcaagatagagttcccgatgcccaatgaggaggcccgggccagaatcatgcagatccactcccgaaagatgaatgtcagtcctgacgtgaactacgaggagctggcccgctgcacagatgacttcaatggggcccagtgcaaggctgtgtgtgtggaggcgggcatgatcgcactgcgcaggggtgccacggagctcacccacgaggactacatggaaggcatcctggaggtgcaggccaagaagaaagccaacctacaatactacgcctagggcacacaggccagccccagtctcacggctgaagtgcgcaataaaagatggtttagggtc

SEQ ID NO: 453604 - DNA, 799 bp, Homo sapiens
cctgtggccaggggttggtctttggaatcggagaggcagattcgctgctccgcagcacggccggagctggtcgggtcaagagtcgggatttgtggggagaggttttccactggtcaagagaaggctttaagaaagacggtattaatctcccgttgcggctcccgcctggtcccatcttctgcccgctcctccaggaaatgaatctgctgccgaatattgagagtccagtgactcggcaggagaagatggcgaccgtgtgggatgaggccgagcaagatggaattggggaggaggtgctcaagatgtccacggaggagatcatccagcgcacacggctgctggacagtgagatcaagatcatgaagagtgaagtgttgagagtcacccatgagctccaagccatgaaggacaagataaaagagaacagtgagaaaatcaaagtgaacaagaccctgccgtaccttgtctccaacgtcatcgagctcctggatgttgatcctaatgaccaagaggaggatggtgccaatattgacctggactcccagaggaagggcaagtgtgctgtgatcaaaacctctacacgacagacgtacttccttcctgtgattgggttggtggatgctgaaaagctaaagccaggagacctggtgggtgtgaacaaagactcctatctgatcctggagacgctgcccacagagtatgactcgcgggtgaagcctgagtaacaaggccaggacatacaggactggggtggcaaccaccgaccgcgcgcctgccgcagacccggactcatgggccc

SEQ ID NO: 453605 - DNA, 3595 bp, Homo sapiens
agcgggctcccagccgggccccccagcggtcggcgggacggctcccggctgcagtctgcccgcccgccccgcgcgggggccgagtcgcgaagcgcgcctgcgacccggcgtccgggcgcgctggagaggacgcgaggagccatgaggcgccagcctgcgaaggtggcggcgctgctgctcgggctgctcttggagtgcacagaagccaaaaagcattgctggtatttcgaaggactctatccaacctattatatatgccgctcctacgaggactgctgtggctccaggtgctgtgtgcgggccctctccatacagaggctgtggtacttctggttccttctgatgatgggcgtgcttttctgctgcggagccggcttcttcatccggaggcgcatgtaccccccgccgctgatcgaggagccagccttcaatgtgtcctacaccaggcagcccccaaatcccggcccaggagcccagcagccggggccgccctattacaccgacccaggaggaccggggatgaaccctgtcgggaattccatggcaatggctttccaggtcccacccaactcaccccaggggagtgtggcctgcccgccccctccagcctactgcaacacgcctccgcccccgtacgaacaggtagtgaaggccaagtagtggggtgcccacgtgcaagaggagagacaggagagggcctttccctggcctttctgtcttcgttgatgttcacttccaggaacggtctcgtgggctgctaagggcagttcctctgatatcctcacagcaagcacagctctctttcaggctttccatggagtacaatatatgaactcacactttgtctcctctgttgcttctgtttctgacgcagtctgtgctctcacatggtagtgtggtgacagtccccgagggctgacgtccttacggtggcgtgaccagatctacaggagagagactgagaggaagaaggcagtgctggaggtgcaggtggcatgtagaggggccaggccgagcatcccaggcaagcatccttctgcccgggtattaataggaagccccatgccgggcggctcagccgatgaagcagcagccgactgagctgagcccagcaggtcatctgctccagcctgtcctctcgtcagccttcctcttccagaagctgttggagagacattcaggagagagcaagccccttgtcatgtttctgtctctgttcatatcctaaagatagacttctcctgcaccgccagggaagggtagcacgtgcagctctcaccgcaggatggggcctagaatcaggcttgccttggaggcctgacagtgatctgacatccactaagcaaatttatttaaattcatgggaaatcacttcctgccccaaactgagacattgcattttgtgagctcttggtctgatttggagaaaggactgttacccatttttttggtgtgtttatggaagtgcatgtagagcgtcctgccctttgaaatcagactgggtgtgtgtcttccctggacatcactgcctctccagggcattctcaggcccgggggtctccttccctcaggcagctccagtggtgggttctgaagggtgctttcaaaacggggcacatctggctgggaagtcacatggactcttccagggagagagaccagctgaggcgtctctctctgaggttgtgttgggtctaagcgggtgtgtgctgggctccaaggaggaggagcttgctgggaaaagacaggagaagtactgactcaactgcactgaccatgttgtcataattagaataaagaagaagtggtcggaaatgcacattcctggataggaatcacagctcaccccaggatctcacaggtagtctcctgagtagttgacggctagcggggagctagttccgccgcatagttatagtgttgatgtgtgaacgctgacctgtcctgtgtgctaagagctatgcagcttagctgaggcgcctagattactagatgtgctgtatcacggggaatgaggtgggggtgcttattttttaatgaactaatcagagcctcttgagaaattgttactcattgaactggagcatcaagacatctcatggaagtggatacggagtgatttggtgtccatgcttttcactctgaggacatttaatcggagaacctcctggggaattttgtgggagacacttgggaacaaaacagacaccctgggaatgcagttgcaagcacagatgctgccaccagtgtctctgaccaccctggtgtgactgctgactgccagcgtggtacctcccatgctgcaggcctccatctaaatgagacaacaaagcacaatgttcactgtttacaaccaagacaactgcgtgggtccaaacactcctcttcctccaggtcatttgttttgcatttttaatgtctttattttttgtaatgaaaaagcacactaagctgcccctggaatcgggtgcagctgaataggcacccaaaagtccgtgactaaatttcgtttgtctttttgatagcaaattatgttaagagacagtgatggctagggctcaacaattttgtattcccatgtttgtgtgagacagagtttgttttcccttgaacttggttagaattgtgctactgtgaacgctgatcctgcatatggaagtcccacttcggtgacatttcctggccattcttgtttccattgtgtggatggtgggttgtgcccacttcctggagtgagacagctcctggtgtgtagaattcccggagcgtccgtggttcagagtaaacttgaagcagatctgtgcatgcttttcctctgcaacaattggctcgtttctcttttttgttctcttttgataggatcctgtttcctatgtgtgcaaaataaaaataaatttgggcaaaaaaacaaacaaaaaaaaaaaaaaaaaaaaaaaaaacaccccgggggcactcttttggcgggggggcgcggcacaacagggggcaacgggaaggggccaaggggcaaaagggtgtcccgggccccagtttcctgtggtaccaagggggaaaactcgggggggacccccaatatagggggggcgtaataaatcgaaaaacccgggtacccgcggctatagggcacgcggcggacaaacacgcaccgagagcacagcaccacgacgacgacccacgcaaccagacacacacgccacgcagacacacgcggcgcgacacaccagcaacggggcgacacagcagcagacccggcaacacagactcacgcggggggtggtagcagagcggatgtgcatgcatgtgacgagtagtggggagtgcgaggccgcggccgcgcgccgctggacgaccagactgagagctatcggaatgaggggtacgaacggacaggggagaggagggcacagggtacggggacggagagggagggcaggggccgcccgggcgacggcaggaaggggcgagacagagggcaaggcgtgcgcagggagagaaggacggagggaggcggaggaggcgccgggagggagaaggagagggaagagggcgcagacggaggcggccggagcgaggcgaggaaggggaagggggagcg

SEQ ID NO: 453606 - DNA, 3210 bp, Homo sapiens
agcgggctcccagccgggccccccagcggtcggcgggacggctcccggctgcagtctgcccgcccgccccgcgcgggggccgagtcgcgaagcgcgcctgcgacccggcgtccgggcgcgctggagaggacgcgaggagccatgaggcgccagcctgcgaaggtggcggcgctgctgctcgggctgctcttggagtgcacagaagccaaaaagcattgctggtatttcgaaggactctatccaacctattatatatgccgctcctacgaggactgctgtggctccaggtgctgtgtgcgggccctctccatacagaggctgtggtacttctggttccttctgatgatgggcgtgcttttctgctgcggagccggcttcttcatccggaggcgcatgtaccccccgccgctgatcgaggagccagccttcaatgtgtcctacaccaggcagcccccaaatcccggcccaggagcccagcagccggggccgccctattacaccgacccaggaggaccggggatgaaccctgtcgggaattccatggcaatggctttccaggtcccacccaactcaccccaggggagtgtggcctgcccgccccctccagcctactgcaacacgcctccgcccccgtacgaacaggtagtgaaggccaagtagtggggtgcccacgtgcaagaggagagacaggagagggcctttccctggcctttctgtcttcgttgatgttcacttccaggaacggtctcgtgggctgctaagggcagttcctctgatatcctcacagcaagcacagctctctttcaggctttccatggagtacaatatatgaactcacactttgtctcctctgttgcttctgtttctgacgcagtctgtgctctcacatggtagtgtggtgacagtccccgagggctgacgtccttacggtggcgtgaccagatctacaggagagagactgagaggaagaaggcagtgctggaggtgcaggtggcatgtagaggggccaggccgagcatcccaggcaagcatccttctgcccgggtattaataggaagccccatgccgggcggctcagccgatgaagcagcagccgactgagctgagcccagcaggtcatctgctccagcctgtcctctcgtcagccttcctcttccagaagctgttggagagacattcaggagagagcaagccccttgtcatgtttctgtctctgttcatatcctaaagatagacttctcctgcaccgccagggaagggtagcacgtgcagctctcaccgcaggatggggcctagaatcaggcttgccttggaggcctgacagtgatctgacatccactaagcaaatttatttaaattcatgggaaatcacttcctgccccaaactgagacattgcattttgtgagctcttggtctgatttggagaaaggactgttacccatttttttggtgtgtttatggaagtgcatgtagagcgtcctgccctttgaaatcagactgggtgtgtgtcttccctggacatcactgcctctccagggcattctcaggcccgggggtctccttccctcaggcagctccagtggtgggttctgaagggtgctttcaaaacggggcacatctggctgggaagtcacatggactcttccagggagagagaccagctgaggcgtctctctctgaggttgtgttgggtctaagcgggtgtgtgctgggctccaaggaggaggagcttgctgggaaaagacaggagaagtactgactcaactgcactgaccatgttgtcataattagaataaagaagaagtggtcggaaatgcacattcctggataggaatcacagctcaccccaggatctcacaggtagtctcctgagtagttgacggctagcggggagctagttccgccgcatagttatagtgttgatgtgtgaacgctgacctgtcctgtgtgctaagagctatgcagcttagctgaggcgcctagattactagatgtgctgtatcacggggaatgaggtgggggtgcttattttttaatgaactaatcagagcctcttgagaaattgttactcattgaactggagcatcaagacatctcatggaagtggatacggagtgatttggtgtccatgcttttcactctgaggacatttaatcggagaacctcctggggaattttgtgggagacacttgggaacaaaacagacaccctgggaatgcagttgcaagcacagatgctgccaccagtgtctctgaccaccctggtgtgactgctgactgccagcgtggtacctcccatgctgcaggcctccatctaaatgagacaacaaagcacaatgttcactgtttacaaccaagacaactgcgtgggtccaaacactcctcttcctccaggtcatttgttttgcatttttaatgtctttattttttgtaatgaaaaagcacactaagctgcccctggaatcgggtgcagctgaataggcacccaaaagtccgtgactaaatttcgtttgtctttttgatagcaaattatgttaagagacagtgatggctagggctcaacaattttgtattcccatgtttgtgtgagacagagtttgttttcccttgaacttggttagaattgtgctactgtgaacgctgatcctgcatatggaagtcccacttcggtgacatttcctggccattcttgtttccattgtgtggatggtgggttgtgcccacttcctggagtgagacagctcctggtgtgtagaattcccggagcgtccgtggttcagagtaaacttgaagcagatctgtgcatgcttttcctctgcaacaattggctcgtttctcttttttgttctcttttgataggatcctgtttcctatgtgtgcaaaataaaaataaatttgggcaaaaaaacaaacaaaaaaaaaaaaaaaaaaaaaaaaaaagggggggggggtaaaaaattcccgggggggccaaaattaggcggttacccggtttttgtgagcaaggggggccctaaagggagcggatataaaaagcaggagcaggggggtgtaaacaaggtgggcgggcgaaatggctgtggcatttctgggaagggactcattgtggggtgcgccttctggcgcatactcaggaataagtcggggcaattaaactttagggtttgggtcacactgttgtctgtggtgaaattggcagggtggtgaata

SEQ ID NO: 453607 - DNA, 3379 bp, Homo sapiens
agcgggctcccagccgggccccccagcggtcggcgggacggctcccggctgcagtctgcccgcccgccccgcgcgggggccgagtcgcgaagcgcgcctgcgacccggcgtccgggcgcgctggagaggacgcgaggagccatgaggcgccagcctgcgaaggtggcggcgctgctgctcgggctgctcttggagtgcacagaagccaaaaagcattgctggtatttcgaaggactctatccaacctattatatatgccgctcctacgaggactgctgtggctccaggtgctgtgtgcgggccctctccatacagaggctgtggtacttctggttccttctgatgatgggcgtgcttttctgctgcggagccggcttcttcatccggaggcgcatgtaccccccgccgctgatcgaggagccagccttcaatgtgtcctacaccaggcagcccccaaatcccggcccaggagcccagcagccggggccgccctattacaccgacccaggaggaccggggatgaaccctgtcgggaattccatggcaatggctttccaggtcccacccaactcaccccaggggagtgtggcctgcccgccccctccagcctactgcaacacgcctccgcccccgtacgaacaggtagtgaaggccaagtagtggggtgcccacgtgcaagaggagagacaggagagggcctttccctggcctttctgtcttcgttgatgttcacttccaggaacggtctcgtgggctgctaagggcagttcctctgatatcctcacagcaagcacagctctctttcaggctttccatggagtacaatatatgaactcacactttgtctcctctgttgcttctgtttctgacgcagtctgtgctctcacatggtagtgtggtgacagtccccgagggctgacgtccttacggtggcgtgaccagatctacaggagagagactgagaggaagaaggcagtgctggaggtgcaggtggcatgtagaggggccaggccgagcatcccaggcaagcatccttctgcccgggtattaataggaagccccatgccgggcggctcagccgatgaagcagcagccgactgagctgagcccagcaggtcatctgctccagcctgtcctctcgtcagccttcctcttccagaagctgttggagagacattcaggagagagcaagccccttgtcatgtttctgtctctgttcatatcctaaagatagacttctcctgcaccgccagggaagggtagcacgtgcagctctcaccgcaggatggggcctagaatcaggcttgccttggaggcctgacagtgatctgacatccactaagcaaatttatttaaattcatgggaaatcacttcctgccccaaactgagacattgcattttgtgagctcttggtctgatttggagaaaggactgttacccatttttttggtgtgtttatggaagtgcatgtagagcgtcctgccctttgaaatcagactgggtgtgtgtcttccctggacatcactgcctctccagggcattctcaggcccgggggtctccttccctcaggcagctccagtggtgggttctgaagggtgctttcaaaacggggcacatctggctgggaagtcacatggactcttccagggagagagaccagctgaggcgtctctctctgaggttgtgttgggtctaagcgggtgtgtgctgggctccaaggaggaggagcttgctgggaaaagacaggagaagtactgactcaactgcactgaccatgttgtcataattagaataaagaagaagtggtcggaaatgcacattcctggataggaatcacagctcaccccaggatctcacaggtagtctcctgagtagttgacggctagcggggagctagttccgccgcatagttatagtgttgatgtgtgaacgctgacctgtcctgtgtgctaagagctatgcagcttagctgaggcgcctagattactagatgtgctgtatcacggggaatgaggtgggggtgcttattttttaatgaactaatcagagcctcttgagaaattgttactcattgaactggagcatcaagacatctcatggaagtggatacggagtgatttggtgtccatgcttttcactctgaggacatttaatcggagaacctcctggggaattttgtgggagacacttgggaacaaaacagacaccctgggaatgcagttgcaagcacagatgctgccaccagtgtctctgaccaccctggtgtgactgctgactgccagcgtggtacctcccatgctgcaggcctccatctaaatgagacaacaaagcacaatgttcactgtttacaaccaagacaactgcgtgggtccaaacactcctcttcctccaggtcatttgttttgcatttttaatgtctttattttttgtaatgaaaaagcacactaagctgcccctggaatcgggtgcagctgaataggcacccaaaagtccgtgactaaatttcgtttgtctttttgatagcaaattatgttaagagacagtgatggctagggctcaacaattttgtattcccatgtttgtgtgagacagagtttgttttcccttgaacttggttagaattgtgctactgtgaacgctgatcctgcatatggaagtcccacttcggtgacatttcctggccattcttgtttccattgtgtggatggtgggttgtgcccacttcctggagtgagacagctcctggtgtgtagaattcccggagcgtccgtggttcagagtaaacttgaagcagatctgtgcatgcttttcctctgcaacaattggctcgtttctcttttttgttctcttttgataggatcctgtttcctatgtgtgcaaaataaaaataaatttgggcaaaaaaacaaacaaaaaaaaaaaaaaaaaaaaaaaaaaaaaaaaaaaaaaaaaaaaaaaaccaaaaaacaaaaacaaaacaaacaaaaagaaaaaaaaaaaagaaagggggggacgacgcaaaagaaacaacaccccaggggggggcacaccagcaggcgccagccaccactctacactttggagccaacggcagcgccccccaaacctggccgggcagcgatagacaaaacgcagcgcccaagcaccgtgaaaaaacaaaacaccggagtgaagacgaagaccagcaccgccgcgcgggccaacccagagcagaacaccacacacctcggccgcgggaacccgcagcgcgcacacccacacaacagagcagaagcacgcacgcgcgcacacaacaaccacgcacgagtgagactggcgcccaacacaaccaccgagccggacatccaagcacaccacacacaatacgcgaaacaacc

SEQ ID NO: 453608 - DNA, 2744 bp, Homo sapiens
agcgggctcccagccgggccccccagcggtcggcgggacggctcccggctgcagtctgcccgcccgccccgcgcgggggccgagtcgcgaagcgcgcctgcgacccggcgtccgggcgcgctggagaggacgcgaggagccatgaggcgccagcctgcgaaggtggcggcgctgctgctcgggctgctcttggagtgcacagaagccaaaaagcattgctggtatttcgaaggactctatccaacctattatatatgccgctcctacgaggactgctgtggctccaggtgctgtgtgcgggccctctccatacagaggctgtggtacttctggttccttctgatgatgggcgtgcttttctgctgcggagccggcttcttcatccggaggcgcatgtaccccccgccgctgatcgaggagccagccttcaatgtgtcctacaccaggcagcccccaaatcccggcccaggagcccagcagccggggccgccctattacaccgacccaggaggaccggggatgaaccctgtcgggaattccatggcaatggctttccaggtcccacccaactcaccccaggggagtgtggcctgcccgccccctccagcctactgcaacacgcctccgcccccgtacgaacaggtagtgaaggccaagtagtggggtgcccacgtgcaagaggagagacaggagagggcctttccctggcctttctgtcttcgttgatgttcacttccaggaacggtctcgtgggctgctaagggcagttcctctgatatcctcacagcaagcacagctctctttcaggctttccatggagtacaatatatgaactcacactttgtctcctctgttgcttctgtttctgacgcagtctgtgctctcacatggtagtgtggtgacagtccccgagggctgacgtccttacggtggcgtgaccagatctacaggagagagactgagaggaagaaggcagtgctggaggtgcaggtggcatgtagaggggccaggccgagcatcccaggcaagcatccttctgcccgggtattaataggaagccccatgccgggcggctcagccgatgaagcagcagccgactgagctgagcccagcaggtcatctgctccagcctgtcctctcgtcagccttcctcttccagaagctgttggagagacattcaggagagagcaagccccttgtcatgtttctgtctctgttcatatcctaaagatagacttctcctgcaccgccagggaagggtagcacgtgcagctctcaccgcaggatggggcctagaatcaggcttgccttggaggcctgacagtgatctgacatccactaagcaaatttatttaaattcatgggaaatcacttcctgccccaaactgagacattgcattttgtgagctcttggtctgatttggagaaaggactgttacccatttttttggtgtgtttatggaagtgcatgtagagcgtcctgccctttgaaatcagactgggtgtgtgtcttccctggacatcactgcctctccagggcattctcaggcccgggggtctccttccctcaggcagctccagtggtgggttctgaagggtgctttcaaaacggggcacatctggctgggaagtcacatggactcttccagggagagagaccagctgaggcgtctctctctgaggttgtgttgggtctaagcgggtgtgtgctgggctccaaggaggaggagcttgctgggaaaagacaggagaagtactgactcaactgcactgaccatgttgtcataattagaataaagaagaagtggtcggaaatgcacattcctggataggaatcacagctcaccccaggatctcacaggtagtctcctgagtagttgacggctagcggggagctagttccgccgcatagttatagtgttgatgtgtgaacgctgacctgtcctgtgtgctaagagctatgcagcttagctgaggcgcctagattactagatgtgctgtatcacggggaatgaggtgggggtgcttattttttaatgaactaatcagagcctcttgagaaattgttactcattgaactggagcatcaagacatctcatggaagtggatacggagtgatttggtgtccatgcttttcactctgaggacatttaatcggagaacctcctggggaattttgtgggagacacttgggaacaaaacagacaccctgggaatgcagttgcaagcacagatgctgccaccagtgtctctgaccaccctggtgtgactgctgactgccagcgtggtacctcccatgctgcaggcctccatctaaatgagacaacaaagcacaatgttcactgtttacaaccaagacaactgcgtgggtccaaacactcctcttcctccaggtcatttgttttgcatttttaatgtctttattttttgtaatgaaaaagcacactaagctgcccctggaatcgggtgcagctgaataggcacccaaaagtccgtgactaaatttcgtttgtctttttgatagcaaattatgttaagagacagtgatggctagggctcaacaattttgtattcccatagtgtcccccgggtcaaagtcctaggaaagaaaaccctgattgcattattggcccatgccaaaatgctgggactgactgtaagtttaattcaagatcgctggacgtactcagattgcaccaggctctcaaactgtcctagggtttgggccaggaccagcaaccta

SEQ ID NO: 453609 - DNA, 1554 bp, Homo sapiens
agcgggctcccagccgggccccccagcggtcggcgggacggctcccggctgcagtctgcccgcccgccccgcgcgggggccgagtcgcgaagcgcgcctgcgacccggcgtccgggcgcgctggagaggacgcgaggagccatgaggcgccagcctgcgaaggtggcggcgctgctgctcgggctgctcttggagtgcacagaagccaaaaagcattgctggtatttcgaaggactctatccaacctattatatatgccgctcctacgaggactgctgtggctccaggtgctgtgtgcgggccctctccatacagaggctgtggtacttctggttccttctgatgatgggcgtgcttttctgctgcggagccggcttcttcatccggaggcgcatgtaccccccgccgctgatcgaggagccagccttcaatgtgtcctacaccaggcagcccccaaatcccggcccaggagcccagcagccggggccgccctattacaccgacccaggaggaccggggatgaaccctgtcgggaattccatggcaatggctttccaggtcccacccaactcaccccaggggagtgtggcctgcccgccccctccagcctactgcaacacgcctccgcccccgtacgaacaggtagtgaaggccaagtagtggggtgcccacgtgcaagaggagagacaggagagggcctttccctggcctttctgtcttcgttgatgttcacttccaggaacggtctcgtgggctgctaagggcagttcctctgatatcctcacagcaagcacagctctctttcaggctttccatggagtacaatatatgaactcacactttgtctcctctgttgcttctgtttctgacgcagtctgtgctctcacatggtagtgtggtgacagtccccgagggctgacgtccttacggtggcgtgaccagatctacaggagagagactgagaggaagaaggcagtgctggaggtgcaggtggcatgtagaggggccaggccgagcatcccaggcaagcatccttctgcccgggtattaataggaagccccatgccgggcggctcagccgatgaagcagcagccgactgagctgagcccagcaggtcatctgctccagcctgtcctctcgtcagccttcctcttccagaagctgttggagagacattcaggagagagcaagccccttgtcatgtttctgtctctgttcatatcctaaagatagacttctcctgcaccgccagggaagggtagcacgtgcagctctcaccgcaggatggggcctagaatcaggcttgccttggaggcctgacagtgatctgacatccactaagcaaatttatttaaattcatgggaaatcacttcctgccccaaatgagacagctcctggtgtgtagaattcccggagcgtccgtggttcagagtaaacttgaagcagatctgtgcatgcttttcctctgcaacaattggctcgtttctcttttttgttctcttttgataggatcctgtttcctatgtgtgcaaaataaaaataaatttgggca

SEQ ID NO: 453610 - DNA, 929 bp, Homo sapiens
agcgggctcccagccgggccccccagcggtcggcgggacggctcccggctgcagtctgcccgcccgccccgcgcgggggccgagtcgcgaagcgcgcctgcgacccggcgtccgggcgcgctggagaggacgcgaggagccatgaggcgccagcctgcgaaggtggcggcgctgctgctcgggctgctcttggagtgcacagaagccaaaaagcattgctggtatttcgaaggactctatccaacctattatatatgccgctcctacgaggactgctgtggctccaggtgctgtgtgcgggccctctccatacagaggctgtggtacttctggttccttctgatgatgggcgtgcttttctgctgcggagccggcttcttcatccggaggcgcatgtaccccccgccgctgatcgaggagccagccttcaatgtgtcctacaccaggcagcccccaaatcccggcccaggagcccagcagccggggccgccctattacaccgacccaggaggaccggggatgaaccctgtcgggaattccatggcaatggctttccaggtcccacccaactcaccccaggggagtgtggcctgcccgccccctccagcctactgcaacacgcctccgcccccgtacgaacttggttagaattgtgctactgtgaacgctgatcctgcatatggaagtcccacttcggtgacatttcctggccattcttgtttccattgtgtggatggtgggttgtgcccacttcctggagtgagacagctcctggtgtgtagaattcccggagcgtccgtggttcagagtaaacttgaagcagatctgtgcatgcttttcctctgcaacaattggctcgtttctcttttttgttctcttttgataggatcctgtttcctatgtgtgcaaaataaaaataaatttgggca

SEQ ID NO: 453611 - DNA, 2902 bp, Homo sapiens
agcgggctcccagccgggccccccagcggtcggcgggacggctcccggctgcagtctgcccgcccgccccgcgcgggggccgagtcgcgaagcgcgcctgcgacccggcgtccgggcgcgctggagaggacgcgaggagccatgaggcgccagcctgcgaaggtggcggcgctgctgctcgggctgctcttggagtgcacagaagccaaaaagcattgctggtatttcgaaggactctatccaacctattatatatgccgctcctacgaggactgctgtggctccaggtgctgtgtgcgggccctctccatacagaggctgtggtacttctggttccttctgatgatgggcgtgcttttctgctgcggagccggcttcttcatccggaggcgcatgtaccccccgccgctgatcgaggagccagccttcaatgtgtcctacaccaggcagcccccaaatcccggcccaggagcccagcagccggggccgccctattacaccgacccaggaggaccggggatgaaccctgtcgggaattccatggcaatggctttccaggtcccacccaactcaccccaggggagtgtggcctgcccgccccctccagcctactgcaacacgcctccgcccccgtacgaacaggtagtgaaggccaagtagtggggtgcccacgtgcaagaggagagacaggagagggcctttccctggcctttctgtcttcgttgatgttcacttccaggaacggtctcgtgggctgctaagggcagttcctctgatatcctcacagcaagcacagctctctttcaggctttccatggagtacaatatatgaactcacactttgtctcctctgttgcttctgtttctgacgcagtctgtgctctcacatggtagtgtggtgacagtccccgagggctgacgtccttacggtggcgtgaccagatctacaggagagagactgagaggaagaaggcagtgctggaggtgcaggtggcatgtagaggggccaggccgagcatcccaggcaagcatccttctgcccgggtattaataggaagccccatgccgggcggctcagccgatgaagcagcagccgactgagctgagcccagcaggtcatctgctccagcctgtcctctcgtcagccttcctcttccagaagctgttggagagacattcaggagagagcaagccccttgtcatgtttctgtctctgttcatatcctaaagatagacttctcctgcaccgccagggaagggtagcacgtgcagctctcaccgcaggatggggcctagaatcaggcttgccttggaggcctgacagtgatctgacatccactaagcaaatttatttaaattcatgggaaatcacttcctgccccaaactgagacattgcattttgtgagctcttggtctgatttggagaaaggactgttacccatttttttggtgtgtttatggaagtgcatgtagagcgtcctgccctttgaaatcagactgggtgtgtgtcttccctggacatcactgcctctccagggcattctcaggcccgggggtctccttccctcaggcagctccagtggtgggttctgaagggtgctttcaaaacggggcacatctggctgggaagtcacatggactcttccagggagagagaccagctgaggcgtctctctctgaggttgtgttgggtctaagcgggtgtgtgctgggctccaaggaggaggagcttgctgggaaaagacaggagaagtactgactcaactgcactgaccatgttgtcataattagaataaagaagaagtggtcggaaatgcacattcctggataggaatcacagctcaccccaggatctcacaggtagtctcctgagtagttgacggctagcggggagctagttccgccgcatagttatagtgttgatgtgtgaacgctgacctgtcctgtgtgctaagagctatgcagcttagctgaggcgcctagattactagatgtgctgtatcacggggaatgaggtgggggtgcttattttttaatgaactaatcagagcctcttgagaaattgttactcattgaactggagcatcaagacatctcatggaagtggatacggagtgatttggtgtccatgcttttcactctgaggacatttaatcggagaacctcctggggaattttgtgggagacacttgggaacaaaacagacaccctgggaatgcagttgcaagcacagatgctgccaccagtgtctctgaccaccctggtgtgactgctgactgccagcgtggtacctcccatgctgcaggcctccatctaaatgagacaacaaagcacaatgttcactgtttacaaccaagacaactgcgtgggtccaaacactcctcttcctccaggtcatttgttttgcatttttaatgtctttattttttgtaatgaaaaagcacactaagctgcccctggaatcgggtgcagctgaataggcacccaaaagtccgtgactaaatttcgtttgtctttttgatagcaaattatgttaagagacagtgatggctagggctcaacaattttgtattcccatgtttgtgtgagacagagtttgttttcccttgaacttggttagaattgtgctactgtgaacgctgatcctgcatatggaagtcccacttcggtgacatttcctggccattcttgtttccattgtgtggatggtgggttgtgcccacttcctggagtgagacagctcctggtgtgtagaattcccggagcgtccgtggttcagagtaaacttgaagcagatctgtgcatgcttttcctctgcaacaattggctcgtttctcttttttgttctcttttgataggatcctgtttcctatgtgtgcaaaataaaaataaatttgggca

SEQ ID NO: 453612 - DNA, 3440 bp, Homo sapiens
  misc_feature (3122)..(3122): n is a, c, g, or t
agcgggctcccagccgggccccccagcggtcggcgggacggctcccggctgcagtctgcccgcccgccccgcgcgggggccgagtcgcgaagcgcgcctgcgacccggcgtccgggcgcgctggagaggacgcgaggagccatgaggcgccagcctgcgaaggtggcggcgctgctgctcgggctgctcttggagtgcacagaagccaaaaagcattgctggtatttcgaaggactctatccaacctattatatatgccgctcctacgaggactgctgtggctccaggtgctgtgtgcgggccctctccatacagaggctgtggtacttctggttccttctgatgatgggcgtgcttttctgctgcggagccggcttcttcatccggaggcgcatgtaccccccgccgctgatcgaggagccagccttcaatgtgtcctacaccaggcagcccccaaatcccggcccaggagcccagcagccggggccgccctattacaccgacccaggaggaccggggatgaaccctgtcgggaattccatggcaatggctttccaggtcccacccaactcaccccaggggagtgtggcctgcccgccccctccagcctactgcaacacgcctccgcccccgtacgaacaggtagtgaaggccaagtagtggggtgcccacgtgcaagaggagagacaggagagggcctttccctggcctttctgtcttcgttgatgttcacttccaggaacggtctcgtgggctgctaagggcagttcctctgatatcctcacagcaagcacagctctctttcaggctttccatggagtacaatatatgaactcacactttgtctcctctgttgcttctgtttctgacgcagtctgtgctctcacatggtagtgtggtgacagtccccgagggctgacgtccttacggtggcgtgaccagatctacaggagagagactgagaggaagaaggcagtgctggaggtgcaggtggcatgtagaggggccaggccgagcatcccaggcaagcatccttctgcccgggtattaataggaagccccatgccgggcggctcagccgatgaagcagcagccgactgagctgagcccagcaggtcatctgctccagcctgtcctctcgtcagccttcctcttccagaagctgttggagagacattcaggagagagcaagccccttgtcatgtttctgtctctgttcatatcctaaagatagacttctcctgcaccgccagggaagggtagcacgtgcagctctcaccgcaggatggggcctagaatcaggcttgccttggaggcctgacagtgatctgacatccactaagcaaatttatttaaattcatgggaaatcacttcctgccccaaactgagacattgcattttgtgagctcttggtctgatttggagaaaggactgttacccatttttttggtgtgtttatggaagtgcatgtagagcgtcctgccctttgaaatcagactgggtgtgtgtcttccctggacatcactgcctctccagggcattctcaggcccgggggtctccttccctcaggcagctccagtggtgggttctgaagggtgctttcaaaacggggcacatctggctgggaagtcacatggactcttccagggagagagaccagctgaggcgtctctctctgaggttgtgttgggtctaagcgggtgtgtgctgggctccaaggaggaggagcttgctgggaaaagacaggagaagtactgactcaactgcactgaccatgttgtcataattagaataaagaagaagtggtcggaaatgcacattcctggataggaatcacagctcaccccaggatctcacaggtagtctcctgagtagttgacggctagcggggagctagttccgccgcatagttatagtgttgatgtgtgaacgctgacctgtcctgtgtgctaagagctatgcagcttagctgaggcgcctagattactagatgtgctgtatcacggggaatgaggtgggggtgcttattttttaatgaactaatcagagcctcttgagaaattgttactcattgaactggagcatcaagacatctcatggaagtggatacggagtgatttggtgtccatgcttttcactctgaggacatttaatcggagaacctcctggggaattttgtgggagacacttgggaacaaaacagacaccctgggaatgcagttgcaagcacagatgctgccaccagtgtctctgaccaccctggtgtgactgctgactgccagcgtggtacctcccatgctgcaggcctccatctaaatgagacaacaaagcacaatgttcactgtttacaaccaagacaactgcgtgggtccaaacactcctcttcctccaggtcatttgttttgcatttttaatgtctttattttttgtaatgaaaaagcacactaagctgcccctggaatcgggtgcagctgaataggcacccaaaagtccgtgactaaatttcgtttgtctttttgatagcaaattatgttaagagacagtgatggctagggctcaacaattttgtattcccatgtttgtgtgagacagagtttgttttcccttgaacttggttagaattgtgctactgtgaacgctgatcctgcatatggaagtcccacttcggtgacatttcctggccattcttgtttccattgtgtggatggtgggttgtgcccacttcctggagtgagacagctcctggtgtgtagaattcccggagcgtccgtggttcagagtaaacttgaagcagatctgtgcatgcttttcctctgcaacaattggctcgtttctcttttttgttctcttttgataggatcctgtttcctatgtgtgcaaaataaaaataaatttgggcaaaaaaacaaacaaaaaaaaaaaaaaaaaaaaaaaaatgggggtttttttggggggggggaaaaagggtgaaaggggcgtggtcataggcgtggttcctgggacccaggtttttttgtcacaaggggggaaaatcgggcggggtcccccaaaaaggagaggccgggaaaaataccgaaaaacgccgggtaaccccgggattattgcactctcgcaacagancacacacgacgcccgccgcacagcgaggtgagagcgaaacgggcaacaaggagggagccacccccttggacgcacgacaaaaaaaccagggaccaagaaaccaatgctgtatacgaaccagacaaagaaaacaccggtaccacggcagaaggaaaagatcaagaaaatatagaacgacgcacactcgtcaattcacgaacaacgtcgcgtatccagcacacgtcggcgaccacgaacacgcacacacgagctcagacaatggagagccaccatcaaacaatcaaacacacgcataaatccagcggaacacagagacag

SEQ ID NO: 453613 - DNA, 3411 bp, Homo sapiens
  misc_feature (2808)..(2808): n is a, c, g, or t
  misc_feature (2811)..(2811): n is a, c, g, or t
  misc_feature (2813)..(2813): n is a, c, g, or t
  misc_feature (2825)..(2826): n is a, c, g, or t
  misc_feature (2833)..(2833): n is a, c, g, or t
  misc_feature (2840)..(2840): n is a, c, g, or t
  misc_feature (2842)..(2842): n is a, c, g, or t
  misc_feature (3093)..(3093): n is a, c, g, or t
agcgggctcccagccgggccccccagcggtcggcgggacggctcccggctgcagtctgcccgcccgccccgcgcgggggccgagtcgcgaagcgcgcctgcgacccggcgtccgggcgcgctggagaggacgcgaggagccatgaggcgccagcctgcgaaggtggcggcgctgctgctcgggctgctcttggagtgcacagaagccaaaaagcattgctggtatttcgaaggactctatccaacctattatatatgccgctcctacgaggactgctgtggctccaggtgctgtgtgcgggccctctccatacagaggctgtggtacttctggttccttctgatgatgggcgtgcttttctgctgcggagccggcttcttcatccggaggcgcatgtaccccccgccgctgatcgaggagccagccttcaatgtgtcctacaccaggcagcccccaaatcccggcccaggagcccagcagccggggccgccctattacaccgacccaggaggaccggggatgaaccctgtcgggaattccatggcaatggctttccaggtcccacccaactcaccccaggggagtgtggcctgcccgccccctccagcctactgcaacacgcctccgcccccgtacgaacaggtagtgaaggccaagtagtggggtgcccacgtgcaagaggagagacaggagagggcctttccctggcctttctgtcttcgttgatgttcacttccaggaacggtctcgtgggctgctaagggcagttcctctgatatcctcacagcaagcacagctctctttcaggctttccatggagtacaatatatgaactcacactttgtctcctctgttgcttctgtttctgacgcagtctgtgctctcacatggtagtgtggtgacagtccccgagggctgacgtccttacggtggcgtgaccagatctacaggagagagactgagaggaagaaggcagtgctggaggtgcaggtggcatgtagaggggccaggccgagcatcccaggcaagcatccttctgcccgggtattaataggaagccccatgccgggcggctcagccgatgaagcagcagccgactgagctgagcccagcaggtcatctgctccagcctgtcctctcgtcagccttcctcttccagaagctgttggagagacattcaggagagagcaagccccttgtcatgtttctgtctctgttcatatcctaaagatagacttctcctgcaccgccagggaagggtagcacgtgcagctctcaccgcaggatggggcctagaatcaggcttgccttggaggcctgacagtgatctgacatccactaagcaaatttatttaaattcatgggaaatcacttcctgccccaaactgagacattgcattttgtgagctcttggtctgatttggagaaaggactgttacccatttttttggtgtgtttatggaagtgcatgtagagcgtcctgccctttgaaatcagactgggtgtgtgtcttccctggacatcactgcctctccagggcattctcaggcccgggggtctccttccctcaggcagctccagtggtgggttctgaagggtgctttcaaaacggggcacatctggctgggaagtcacatggactcttccagggagagagaccagctgaggcgtctctctctgaggttgtgttgggtctaagcgggtgtgtgctgggctccaaggaggaggagcttgctgggaaaagacaggagaagtactgactcaactgcactgaccatgttgtcataattagaataaagaagaagtggtcggaaatgcacattcctggataggaatcacagctcaccccaggatctcacaggtagtctcctgagtagttgacggctagcggggagctagttccgccgcatagttatagtgttgatgtgtgaacgctgacctgtcctgtgtgctaagagctatgcagcttagctgaggcgcctagattactagatgtgctgtatcacggggaatgaggtgggggtgcttattttttaatgaactaatcagagcctcttgagaaattgttactcattgaactggagcatcaagacatctcatggaagtggatacggagtgatttggtgtccatgcttttcactctgaggacatttaatcggagaacctcctggggaattttgtgggagacacttgggaacaaaacagacaccctgggaatgcagttgcaagcacagatgctgccaccagtgtctctgaccaccctggtgtgactgctgactgccagcgtggtacctcccatgctgcaggcctccatctaaatgagacaacaaagcacaatgttcactgtttacaaccaagacaactgcgtgggtccaaacactcctcttcctccaggtcatttgttttgcatttttaatgtctttattttttgtaatgaaaaagcacactaagctgcccctggaatcgggtgcagctgaataggcacccaaaagtccgtgactaaatttcgtttgtctttttgatagcaaattatgttaagagacagtgatggctagggctcaacaattttgtattcccatgtttgtgtgagacagagtttgttttcccttgaacttggttagaattgtgctactgtgaacgctgatcctgcatatggaagtcccacttcggtgacatttcctggccattcttgtttccattgtgtggatggtgggttgtgcccacttcctggagtgagacagctcctggtgtgtagaattcccggagcgtccgtggttcagagtaaacttgaagcaatttgggtggttnccncngaatggccgctnntgggccntggaagncnggccttgtggaaaaaattggggcaacacacaaaaaaacaaacaaaaaaaaaaaaaaaaaaaaaaaaatgggggtttttttggggggggggaaaaagggtgaaaggggcgtggtcataggcgtggttcctgggacccaggtttttttgtcacaaggggggaaaatcgggcggggtcccccaaaaaggagaggccgggaaaaataccgaaaaacgccgggtaaccccgggattattgcactctcgcaacagancacacacgacgcccgccgcacagcgaggtgagagcgaaacgggcaacaaggagggagccacccccttggacgcacgacaaaaaaaccagggaccaagaaaccaatgctgtatacgaaccagacaaagaaaacaccggtaccacggcagaaggaaaagatcaagaaaatatagaacgacgcacactcgtcaattcacgaacaacgtcgcgtatccagcacacgtcggcgaccacgaacacgcacacacgagctcagacaatggagagccaccatcaaacaatcaaacacacgcataaatccagcggaacacagagacag

SEQ ID NO: 453614 - DNA, 1873 bp, Homo sapiens
agcgggctcccagccgggccccccagcggtcggcgggacggctcccggctgcagtctgcccgcccgccccgcgcgggggccgagtcgcgaagcgcgcctgcgacccggcgtccgggcgcgctggagaggacgcgaggagccatgaggcgccagcctgcgaaggtggcggcgctgctgctcgggctgctcttggagtgcacagaagccaaaaagcattgctggtatttcgaaggactctatccaacctattatatatgccgctcctacgaggactgctgtggctccaggtgctgtgtgcgggccctctccatacagaggctgtggtacttctggttccttctgatgatgggcgtgcttttctgctgcggagccggcttcttcatccggaggcgcatgtaccccccgccgctgatcgaggagccagccttcaatgtgtcctacaccaggcagcccccaaatcccggcccaggagcccagcagccggggccgccctattacaccgacccaggaggaccggggatgaaccctgtcgggaattccatggcaatggctttccaggtcccacccaactcaccccaggggagtgtggcctgcccgccccctccagcctactgcaacacgcctccgcccccgtacgaacaggtagtgaaggccaagtagtggggtgcccacgtgcaagaggagagacaggagagggcctttccctggcctttctgtcttcgttgatgttcacttccaggaacggtctcgtgggctgctaagggcagttcctctgatatcctcacagcaagcacagctctctttcaggctttccatggagtacaatatatgaactcacactttgtctcctctgttgcttctgtttctgacgcagtctgtgctctcacatggtagtgtggtgacagtccccgagggctgacgtccttacggtggcgtgaccagatctacaggagagagactgagaggaagaaggcagtgctggaggtgcaggtggcatgtagaggggccaggccgagcatcccaggcaagcatccttctgcccgggtattaataggaagccccatgccgggcggctcagccgatgaagcagcagccgactgagctgagcccagcaggtcatctgctccagcctgtcctctcgtcagccttcctcttccagaagctgttggagagacattcaggagagagcaagccccttgtcatgtttctgtctctgttcatatcctaaagatagacttctcctgcaccgccagggaagggtagcacgtgcagctctcaccgcaggatggggcctagaatcaggcttgccttggaggcctgacagtgatctgacatccactaagcaaatttatttaaattcatgggaaatcacttcctgccccaaactgagacattgcattttgtgagctcttggtctgatttggagaaaggactgttacccatttttttggtgtgtttatggaagtgcatgtagagcgtcctgccctttgaaatcagactgggtgtgtgtcttccctggacatcactgcctctccagggcattctcaggcccgggggtctccttccctcaggcagctccagtggtgggttctgaagggtgctttcaaaacggggcacatctggctgggaatcccacttcggtgacatttcctggccattcttgtttccattgtgtggatggtgggttgtgcccacttcctggagtgagacagctcctggtgtgtagaattcccggagcgtccgtggttcagagtaaacttgaagcagatctgtgcatgcttttcctctgcaacaattggctcgtttctcttttttgttctcttttgataggatcctgtttcctatgtgtgcaaaataaaaataaatttgggca

SEQ ID NO: 453615 - DNA, 136 bp, Homo sapiens
gcggagccggcttcttcatccggaggcgcatgtaccccccgccgctgatcgaggagccagccttcaatgtgtcctacaccaggcagcccccaaatcccggcccaggtcagccagccctgtccttgtctctcctccc

SEQ ID NO: 453616 - DNA, 493 bp, Homo sapiens
gggagccgctctgcctccaacatggcgatcgttgatgtgaagatggtctccctgtgtaacttacacagggagccgctctgcctccaacatggcgatcgttgatgtgaagatggtctctggcttcattcccctgaagccaacagtgaaaatgcttgaaagatctaaccatgtgagccggacagaagtcagcagcaaccatgtcttgatttaccttgataaggtgtcaaatcagacactgagcttgttcttcacggttctgcaagatgtcccagtaagagatctgaaaccagccatagtgaaagtctatgattactacgagacggatgagtttgcaattgctgagtacaatgctccttgcagcaaagatcttggaaatgcttgaagaccacaaggctgaaaagtgctttgctggagtcctgttctcagagctccacagaagacacgtgtttttgtatctttaaagacttgatgaataaacactttttctggtcaa

SEQ ID NO: 453617 - DNA, 556 bp, Homo sapiens
  misc_feature (4)..(4): n is a, c, g, or t
  misc_feature (23)..(23): n is a, c, g, or t
aaangcacccgggcaggtgcaanttgaaccttttccgccttccaaagtggccccaggaaaagggcccacaagcgcctcactgcatctgtgcaaacgggcggcaaactgtgtcctgggcagtaaccccaaagtcattaggaaatgtgaatttcactgtgagcgcagaggcactagagtctctggcttcattcccctgaagccaacagtgaaaatgcttgaaagatctaaccatgtgagccggacagaagtcagcagcaaccatgtcttgatttaccttgataaggtgtcaaatcagacactgagcttgttcttcacggttctgcaagatgtcccagtaagagatctgaaaccagccatagtgaaagtctatgattactacgagacggatgagtttgcaattgctgagtacaatgctccttgcagcaaagatcttggaaatgcttgaagaccacaaggctgaaaagtgctttgctggagtcctgttctcagagctccacagaagacacgtgtttttgtatctttaaagacttgatgaataaacactttttctggtcaa

SEQ ID NO: 453618 - DNA, 352 bp, Homo sapiens
gaagctggtgtgggctttgggttcatcacaagtttgaggcagagtctgcagcaaccatgtcttgatttaccttgataaggtgtcaaatcagacactgagcttgttcttcacggttctgcaagatgtcccagtaagagatctgaaaccagccatagtgaaagtctatgattactacgagacggatgagtttgcaattgctgagtacaatgctccttgcagcaaagatcttggaaatgcttgaagaccacaaggctgaaaagtgctttgctggagtcctgttctcagagctccacagaagacacgtgtttttgtatctttaaagacttgatgaataaacactttttctggtcaa

SEQ ID NO: 453619 - DNA, 633 bp, Homo sapiens
caaagtctgatcttatttatttgttactcacgagggtattgatgaatgtaaaaattttcttctcccatgggtaatgatttggaatagatttggtttcccactgtactgattaggtttccttgggcactatgctacccagaactaagggaaagaatactctctgctcatggagacccaaatctgtcttaattttttttctttccaatgtcacagatcttggaaatgcttgaagaccacaaggctgaaaagtgctttgctggagtcctgttctcagagctccacagaagacacgtgtttttgtatctttaaagacttgatgaataaacactttttctggtcaaatgtctttccctgtttcctgttcattcaataaatatcattgtacatttccatatgattcccaatagaataccaagattaaacttaaaggaatcaagtgctgaaggacttcagaatacaaaaaaatgatacagtgatgtcggtctgagtaggcttcatgtaaggactgtggggaaagaagaaagtattgggttatgtactaggaaagtgtaaagtgtgtttggttatgggaataccctatgaaaaacccaaagggtgaatttttatgagaaaataaaagactgacttcccaga

SEQ ID NO: 453620 - DNA, 547 bp, Homo sapiens
ccctctgttctccttccctctctactccctttcttatgtgtggtttcaggtcagtgtgcagctggaagcctctcccgccttcctagctgtcccagtggagaaggaacaagcgcctcactgcatctgtgcaaacgggcggcaaactgtgtcctgggcagtaaccccaaagtcattaggaaatgtgaatttcactgtgagcgcagaggcactagagtctcaagagctgtgtgggactgaggtgccttcagttcctgaacacggaaggaaagacacagtcatcaagcctctgttggttgaacctgaaggactagagaaggaaacaacattcaactccctactttgtccatcaggtggtgaggtttctgaagaattatccctgaaactgccaccaaatgtggtagaagaatctgcccgagcttctgtctcagttttgggtgagtctccagcccctagtggatccgggcattaacagcttctattatactatttttatttcccataaatatttactaaaaataatactataattttaacttctttcttctct

SEQ ID NO: 453621 - DNA, 387 bp, Homo sapiens
atttgggaagacttacgtgtaccttttagagctgtggaatgcttaacatggacatagaagaagaaaatatttaaaaacacagaaaaccctaatcctttcctctccctggagtcctcagttacacagggagccgctctgcctccaacatggcgatcgttgatgtgaagatggtctctggcttcattcccctgaagccaacagtgaaaatgggtaggtttatcataaccccagactgccctattttatttaatgatgtatgtatccccagcataagacaatactaatatcaaaatactattaaagtcaatctctatcaaagccttatcctttttccagctcagaaatataatcacatgtgtttgtatgaatgctgaccatgtgcagagc

SEQ ID NO: 453622 - DNA, 508 bp, Homo sapiens
gaacagagctatgtattggcattgacagaggtatatgcgttatgttagttatttaagaaataatctggagaatttatcatcccctctgagagatttctgcacaatttaattaaggaccctatagtgtgctgtaggataataaagcttttcccccaaaaaacaggtgaatacttaaactaattcaaagagagaagaaagcttcctgaaaggtcatttaattgacttttgctttccagtgtcaaatcagacactgagcttgttcttcacggttctgcaagatgtcccagtaagagatctgaaaccagccatagtgaaagtctatgattactacgagacggatgagtttgcaattgctgagtacaatgctccttgcagcaaagatcttggaaatgcttgaagaccacaaggctgaaaagtgctttgctggagtcctgttctcagagctccacagaagacacgtgtttttgtatctttaaagacttgatgaataaacactttttctggtcaa

SEQ ID NO: 453623 - DNA, 310 bp, Homo sapiens
cagataaataactttacacattagtcgtgtgttatactaatagtaaaccctttatgcctttcatttttaattgtattacattatatatttccttacaaaaagcatttgaagaattctaccctcagggttattttggcaatacaaagattttttctctggatcccccaggggtttcatctatttattaacatttgtggtatttcaattttcttcagcttgaaagatctaaccatgtgagccggacagaagtcagcagcaaccatgtcttgatttaccttgataaggtaagagaacttccagtctatttgca

SEQ ID NO: 453624 - DNA, 4586 bp, Homo sapiens
cacgagagagagagagagagagagagagagagagagagagagagagagagagagagagagaggtagggtacaatacagtctgttctcctccagctccttctttctgcaacatggggaagaacaaactccttcatccaagtctggttcttctcctcttggtcctcctgcccacagacgcctcagtctctggaaaaccgcagtatatggttctggtcccctccctgctccacactgagaccactgagaagggctgtgtccttctgagctacctgaatgagacagtgactgtaagtgcttccttggagtctgtcaggggaaacaggagcctcttcactgacctggaggcggagaatgacgtactccactgtgtcgccttcgctgtcccaaagtcttcatccaatgaggaggtaatgttcctcactgtccaagtgaaaggaccaacccaagaatttaagaagcggaccacagtgatggttaagaacgaggacagtctggtctttgtccagacagacaaatcaatctacaaaccagggcagacagtgaaatttcgtgttgtctccatggatgaaaactttcaccccctgaatgagttgattccactagtatacattcaggatcccaaaggaaatcgcatcgcacaatggcagagtttccagttagagggtggcctcaagcaattttcttttcccctctcatcagagcccttccagggctcctacaaggtggtggtacagaagaaatcaggtggaaggacagagcaccctttcaccgtggaggaatttgttcttcccaagtttgaagtacaagtaacagtgccaaagataatcaccatcttggaagaagagatgaatgtatcagtgtgtggcctatacacatatgggaagcctgtccctggacatgtgactgtgagcatttgcagaaagtatagtgacgcttccgactgccacggtgaagattcacaggctttctgtgagaaattcagtggacagctaaacagccatggctgcttctatcagcaagtaaaaaccaaggtcttccagctgaagaggaaggagtatgaaatgaaacttcacactgaggcccagatccaagaagaaggaacagtggtggaattgactggaaggcagtccagtgaaatcacaagaaccataaccaaactctcatttgtgaaagtggactcacactttcgacagggaattcccttctttgggcaggtgcgcctagtagatgggaaaggcgtccctataccaaataaagtcatattcatcagaggaaatgaagcaaactattactccaatgctaccacggatgagcatggccttgtacagttctctatcaacaccaccaatgttatgggtacctctcttactgttagggtcaattacaaggatcgtagtccctgttacggctaccagtgggtgtcagaagaacacgaagaggcacatcacactgcttatcttgtgttctccccaagcaagagctttgtccaccttgagcccatgtctcatgaactaccctgtggccatactcagacagtccaggcacattatattctgaatggaggcaccctgctggggctgaagaagctctccttctattatctgataatggcaaagggaggcattgtccgaactgggactcatggactgcttgtgaagcaggaagacatgaagggccatttttccatctcaatccctgtgaagtcagacattgctcctgtcgctcggttgctcatctatgctgttttacctaccggggacgtgattggggattctgcaaaatatgatgttgaaaattgtctggccaacaaggtggatttgagcttcagcccatcacaaagtctcccagcctcacacgcccacctgcgagtcacagcggctcctcagtccgtctgcgccctccgtgctgtggaccaaagcgtgctgctcatgaagcctgatgctgagctctcggcgtcctcggtttacaacctgctaccagaaaaggacctcactggcttccctgggcctttgaatgaccaggacgatgaagactgcatcaatcgtcataatgtctatattaatggaatcacatatactccagtatcaagtacaaatgaaaaggatatgtacagcttcctagaggacatgggcttaaaggcattcaccaactcaaagattcgtaaacccaaaatgtagtcagatgtaatgggaagaggccatgcacgcctggtgcatgttgaagagcctcacacggagaccgtacgaaagtacttccctgagacatggatctgggatttggtggtggtaaactcagcaggtgtggctgaggtaggagtaacagtccctgacaccatcaccgagtggaaggcaggggccttctgcctgtctgaagatgctggacttggtatctcttccactgcctctctccgagccttccagcccttctttgtggagctcacaatgccttactctgtgattcgtggagaggccttcacactcaaggccacggtcctaaactaccttcccaaatgcatccgggtcagtgtgcagctggaagcctctcccgccttcctagctgtcccagtggagaaggaacaagcgcctcactgcatctgtgcaaacgggcggcaaactgtgtcctgggcagtaaccccaaagtcattaggaaatgtgaatttcactgtgagcgcagaggcactagagtctcaagagctgtgtgggactgaggtgccttcagttcctgaacacggaaggaaagacacagtcatcaagcctctgttggttgaacctgaaggactagagaaggaaacaacattcaactccctactttgtccatcaggtggtgaggtttctgaagaattatccctgaaactgccaccaaatgtggtagaagaatctgcccgagcttctgtctcagttttgggagacatattaggctctgccatgcaaaacacacaaaatcttctccagatgccctatggctgtggagagcagaatatggtcctctttgctcctaacatctatgtactggattatctaaatgaaacacagcagcttactccagagatcaagtccaaggccattggctatctcaacactggttaccagagacagttgaactacaaacactatgatggctcctacagcacctttggggagcgatatggcaggaaccagggcaacacctggctcacagcctttgttctgaagacttttgcccaagctcgagcctacatcttcatcgatgaagcacacattacccaagccctcatatggctctcccagaggcagaaggacaatggctgtttcaggagctctgggtcactgctcaacaatgccataaagggaggagtagaagatgaagtgaccctctccgcctatatcaccatcgcccttctggagattcctctcacagtcactcaccctgttgtccgcaatgccctgttttgcctggagtcagcctggaagacagcacaagaaggggaccatggcagccatgtatataccaaagcactgctggcctatgcttttgccctggcaggtaaccaggacaagaggaaggaagtactcaagtcacttaatgaggaagctgtgaagaaagacaactctgtccattgggagcgccctcagaaacccaaggcaccagtggggcatttttacgaaccccaggctccctctgctgaggtggagatgacatcctatgtgctcctcgcttatctcacggcccagccagccccaacctcggaggacctgacctctgcaaccaacatcgtgaagtggatcacgaagcagcagaatgcccagggcggtttctcctccacccaggacacagtggtggctctccatgctctgtccaaatatggagcagccacatttaccaggactgggaaggctgcacaggtgactatccagtcttcagggacattttccagcaaattccaagtggacaacaacaaccgcctgttactgcagcaggtctcattgccagagctgcctggggaatacagcatgaaagtgacaggagaaggatgtgtctacctccagacatccttgaaatacaatattctcccagaaaaggaagagttcccctttgctttaggagtgcagactctgcctcaaacttgtgatgaacccaaagcccacaccagcttccaaatctccctaagtgtcagttacacagggagccgctctgcctccaacatggcgatcgttgatgtgaagatggtctctggcttcattcccctgaagccaacagtgaaaatgcttgaaagatctaaccatgtgagccggacagaagtcagcagcaaccatgtcttgatttaccttgataaggtgtcaaatcagacactgagcttgttcttcacggttctgcaagatgtcccagtaagagatctgaaaccagccatagtgaaagtctatgattactacgagacggatgagtttgcaattgctgagtacaatgctccttgcagcaaagatcttggaaatgcttgaagaccacaaggctgaaaagtgctttgctggagtcctgttctcagagctccacagaagacacgtgtttttgtatctttaaagacttgatgaataaacactttttctggtcaa

SEQ ID NO: 453625 - DNA, 4592 bp, Homo sapiens
cacgagagagagagagagagagagagagagagagagagagagagagagagagagagagagaggtagggtacaatacagtctgttctcctccagctccttctttctgcaacatggggaagaacaaactccttcatccaagtctggttcttctcctcttggtcctcctgcccacagacgcctcagtctctggaaaaccgcagtatatggttctggtcccctccctgctccacactgagaccactgagaagggctgtgtccttctgagctacctgaatgagacagtgactgtaagtgcttccttggagtctgtcaggggaaacaggagcctcttcactgacctggaggcggagaatgacgtactccactgtgtcgccttcgctgtcccaaagtcttcatccaatgaggaggtaatgttcctcactgtccaagtgaaaggaccaacccaagaatttaagaagcggaccacagtgatggttaagaacgaggacagtctggtctttgtccagacagacaaatcaatctacaaaccagggcagacagtgaaatttcgtgttgtctccatggatgaaaactttcaccccctgaatgagttgattccactagtatacattcaggatcccaaaggaaatcgcatcgcacaatggcagagtttccagttagagggtggcctcaagcaattttcttttcccctctcatcagagcccttccagggctcctacaaggtggtggtacagaagaaatcaggtggaaggacagagcaccctttcaccgtggaggaatttgttcttcccaagtttgaagtacaagtaacagtgccaaagataatcaccatcttggaagaagagatgaatgtatcagtgtgtggcctatacacatatgggaagcctgtccctggacatgtgactgtgagcatttgcagaaagtatagtgacgcttccgactgccacggtgaagattcacaggctttctgtgagaaattcagtggacagctaaacagccatggctgcttctatcagcaagtaaaaaccaaggtcttccagctgaagaggaaggagtatgaaatgaaacttcacactgaggcccagatccaagaagaaggaacagtggtggaattgactggaaggcagtccagtgaaatcacaagaaccataaccaaactctcatttgtgaaagtggactcacactttcgacagggaattcccttctttgggcaggtgcgcctagtagatgggaaaggcgtccctataccaaataaagtcatattcatcagaggaaatgaagcaaactattactccaatgctaccacggatgagcatggccttgtacagttctctatcaacaccaccaatgttatgggtacctctcttactgttagggtcaattacaaggatcgtagtccctgttacggctaccagtgggtgtcagaagaacacgaagaggcacatcacactgcttatcttgtgttctccccaagcaagagctttgtccaccttgagcccatgtctcatgaactaccctgtggccatactcagacagtccaggcacattatattctgaatggaggcaccctgctggggctgaagaagctctccttctattatctgataatggcaaagggaggcattgtccgaactgggactcatggactgcttgtgaagcaggaagacatgaagggccatttttccatctcaatccctgtgaagtcagacattgctcctgtcgctcggttgctcatctatgctgttttacctaccggggacgtgattggggattctgcaaaatatgatgttgcagcctcacacgcccacctgcgagtcacagcggctcctcagtccgtctgcgccctccgtgctgtggaccaaagcgtgctgctcatgaagcctgatgctgagctctcggcgtcctcggtttacaacctgctaccagaaaaggacctcactggcttccctgggcctttgaatgaccaggacgatgaagactgcatcaatcgtcataatgtctatattaatggaatcacatatactccagtatcaagtacaaatgaaaaggatatgtacagcttcctagaggacatgggcttaaaggcattcaccaactcaaagattcgtaaacccaaaatgtgtccacagcttcaacagtatgaaatgcatggacctgaaggtctacgtgtaggtttttatgagtcagatgtaatgggaagaggccatgcacgcctggtgcatgttgaagagcctcacacggagaccgtacgaaagtacttccctgagacatggatctgggatttggtggtggtaaactcagcaggtgtggctgaggtaggagtaacagtccctgacaccatcaccgagtggaaggcaggggccttctgcctgtctgaagatgctggacttggtatctcttccactgcctctctccgagccttccagcccttctttgtggagctcacaatgccttactctgtgattcgtggagaggccttcacactcaaggccacggtcctaaactaccttcccaaatgcatccgggtcagtgtgcagctggaagcctctcccgccttcctagctgtcccagtggagaaggaacaagcgcctcactgcatctgtgcaaacgggcggcaaactgtgtcctgggcagtaaccccaaagtcattaggaaatgtgaatttcactgtgagcgcagaggcactagagtctcaagagctgtgtgggactgaggtgccttcagttcctgaacacggaaggaaagacacagtcatcaagcctctgttggttgaacctgaaggactagagaaggaaacaacattcaactccctactttgtccatcaggtggtgaggtttctgaagaattatccctgaaactgccaccaaatgtggtagaagaatctgcccgagcttctgtctcagttttgggagacatattaggctctgccatgcaaaacacacaaaatcttctccagatgccctatggctgtggagagcagaatatggtcctctttgctcctaacatctatgtactggattatctaaatgaaacacagcagcttactccagagatcaagtccaaggccattggctatctcaacactggttaccagagacagttgaactacaaacactatgatggctcctacagcacctttggggagcgatatggcaggaaccagggcaacacctggctcacagcctttgttctgaagacttttgcccaagctcgagcctacatcttcatcgatgaagcacacattacccaagccctcatatggctctcccagaggcagaaggacaatggctgtttcaggagctctgggtcactgctcaacaatgccataaagggaggagtagaagatgaagtgaccctctccgcctatatcaccatcgcccttctggagattcctctcacagtcactcaccctgttgtccgcaatgccctgttttgcctggagtcagcctggaagacagcacaagaaggggaccatggcagccatgtatataccaaagcactgctggcctatgcttttgccctggcaggtaaccaggacaagaggaaggaagtactcaagtcacttaatgaggaagctgtgaagaaagacaactctgtccattgggagcgccctcagaaacccaaggcaccagtggggcatttttacgaaccccaggctccctctgctgaggtggagatgacatcctatgtgctcctcgcttatctcacggcccagccagccccaacctcggaggacctgacctctgcaaccaacatcgtgaagtggatcacgaagcagcagaatgcccagggcggtttctcctccacccaggacacagtggtggctctccatgctctgtccaaatatggagcagccacatttaccaggactgggaaggctgcacaggtgactatccagtcttcagggacattttccagcaaattccaagtggacaacaacaaccgcctgttactgcagcaggtctcattgccagagctgcctggggaatacagcatgaaagtgacaggagaaggatgtgtctacctccagacatccttgaaatacaatattctcccagaaaaggaagagttcccctttgctttaggagtgcagactctgcctcaaacttgtgatgaacccaaagcccacaccagcttccaaatctccctaagtgtcagttacacagggagccgctctgcctccaacatggcgatcgttgatgtgaagatggtctctggcttcattcccctgaagccaacagtgaaaatgcttgaaagatctaaccatgtgagccggacagaagtcagcagcaaccatgtcttgatttaccttgataaggtgtcaaatcagacactgagcttgttcttcacggttctgcaagatgtcccagtaagagatctgaaaccagccatagtgaaagtctatgattactacgagacggatgagtttgcaattgctgagtacaatgctccttgcagcaaagatcttggaaatgcttgaagaccacaaggctgaaaagtgctttgctggagtcctgttctcagagctccacagaagacacgtgtttttgtatctttaaagacttgatgaataaacactttttctggtcaa

SEQ ID NO: 453626 - DNA, 3280 bp, Homo sapiens
gtagaacatgagtaggcagacctcggagctgcattatgtagtgttactcatggaacgataaggagctttgctacagagtagcactggccacgtgcatctatgagctaggcactgtggaccatatatcaaaacagccccgagggcacaattcatagtcgctgcaagtaggcaggactccactagtggagggctgaggatacgttcttgttaccatatactactcgataatggccaagacgaagacgtgccattagttcacgatatcatggacgcaaggattgctggtgaagcaaggaagacattgaagggccatttttccatctcaatccctgtgaagtcagacattgctcctgtcgctcggttgctcatctatgctgttttacctaccggggacgtgattggggattctgcaaaatatgatgttgaaaattgtctggccaacaaggtggatttgagcttcagcccatcacaaagtctcccagcctcacacgcccacctgcgagtcacagcggctcctcagtccgtctgcgccctccgtgctgtggaccaaagcgtgctgctcatgaagcctgatgctgagctctcggcgtcctcggtttacaacctgctaccagaaaaggacctcactggcttccctgggcctttgaatgaccaggacgatgaagactgcatcaatcgtcataatgtctatattaatggaatcacatatactccagtatcaagtacaaatgaaaaggatatgtacagcttcctagaggacatgggcttaaaggcattcaccaactcaaagattcgtaaacccaaaatgtgtccacagcttcaacagtatgaaatgcatggacctgaaggtctacgtgtaggtttttatgagtcagatgtaatgggaagaggccatgcacgcctggtgcatgttgaagagcctcacacggagaccgtacgaaagtacttccctgagacatggatctgggatttggtggtggtaaactcagcaggtgtggctgaggtaggagtaacagtccctgacaccatcaccgagtggaaggcaggggccttctgcctgtctgaagatgctggacttggtatctcttccactgcctctctccgagccttccagcccttctttgtggagctcacaatgccttactctgtgattcgtggagaggccttcacactcaaggccacggtcctaaactaccttcccaaatgcatccgggtcagtgtgcagctggaagcctctcccgccttcctagctgtcccagtggagaaggaacaagcgcctcactgcatctgtgcaaacgggcggcaaactgtgtcctgggcagtaaccccaaagtcattaggaaatgtgaatttcactgtgagcgcagaggcactagagtctcaagagctgtgtgggactgaggtgccttcagttcctgaacacggaaggaaagacacagtcatcaagcctctgttggttgaacctgaaggactagagaaggaaacaacattcaactccctactttgtccatcaggtggtgaggtttctgaagaattatccctgaaactgccaccaaatgtggtagaagaatctgcccgagcttctgtctcagttttgggagacatattaggctctgccatgcaaaacacacaaaatcttctccagatgccctatggctgtggagagcagaatatggtcctctttgctcctaacatctatgtactggattatctaaatgaaacacagcagcttactccagagatcaagtccaaggccattggctatctcaacactggttaccagagacagttgaactacaaacactatgatggctcctacagcacctttggggagcgatatggcaggaaccagggcaacacctggctcacagcctttgttctgaagacttttgcccaagctcgagcctacatcttcatcgatgaagcacacattacccaagccctcatatggctctcccagaggcagaaggacaatggctgtttcaggagctctgggtcactgctcaacaatgccataaagggaggagtagaagatgaagtgaccctctccgcctatatcaccatcgcccttctggagattcctctcacagtcactcaccctgttgtccgcaatgccctgttttgcctggagtcagcctggaagacagcacaagaaggggaccatggcagccatgtatataccaaagcactgctggcctatgcttttgccctggcaggtaaccaggacaagaggaaggaagtactcaagtcacttaatgaggaagctgtgaagaaagacaactctgtccattgggagcgccctcagaaacccaaggcaccagtggggcatttttacgaaccccaggctccctctgctgaggtggagatgacatcctatgtgctcctcgcttatctcacggcccagccagccccaacctcggaggacctgacctctgcaaccaacatcgtgaagtggatcacgaagcagcagaatgcccagggcggtttctcctccacccaggacacagtggtggctctccatgctctgtccaaatatggagcagccacatttaccaggactgggaaggctgcacaggtgactatccagtcttcagggacattttccagcaaattccaagtggacaacaacaaccgcctgttactgcagcaggtctcattgccagagctgcctggggaatacagcatgaaagtgacaggagaaggatgtgtctacctccagacatccttgaaatacaatattctcccagaaaaggaagagttcccctttgctttaggagtgcagactctgcctcaaacttgtgatgaacccaaagcccacaccagcttccaaatctccctaagtgtcagttacacagggagccgctctgcctccaacatggcgatcgttgatgtgaagatggtctctggcttcattcccctgaagccaacagtgaaaatgcttgaaagatctaaccatgtgagccggacagaagtcagcagcaaccatgtcttgatttaccttgataaggtgtcaaatcagacactgagcttgttcttcacggttctgcaagatgtcccagtaagagatctgaaaccagccatagtgaaagtctatgattactacgagacggatgagtttgcaattgctgagtacaatgctccttgcagcaaagatcttggaaatgcttgaagaccacaaggctgaaaagtgctttgctggagtcctgttctcagagctccacagaagacacgtgtttttgtatctttaaagacttgatgaataaacactttttctggtcaa

SEQ ID NO: 453627 - DNA, 2851 bp, Homo sapiens
cgaacaagataatagtgtaacgacgccgtcaccgttatttcagtccgggccggtcttacttgaatactaggccctgttacaattaaatcagtccgtctgcgccctccgtgctgtggaccaaagcgtgctgctcatgaagcctgatgctgagctctcggcgtcctcggtttacaacctgctaccagaaaaggacctcactggcttccctgggcctttgaatgaccaggacgatgaagactgcatcaatcgtcataatgtctatattaatggaatcacatatactccagtatcaagtacaaatgaaaaggatatgtacagcttcctagaggacatgggcttaaaggcattcaccaactcaaagattcgtaaacccaaaatgtgtccacagcttcaacagtatgaaatgcatggacctgaaggtctacgtgtaggtttttatgagtcagatgtaatgggaagaggccatgcacgcctggtgcatgttgaagagcctcacacggagaccgtacgaaagtacttccctgagacatggatctgggatttggtggtggtaaactcagcaggtgtggctgaggtaggagtaacagtccctgacaccatcaccgagtggaaggcaggggccttctgcctgtctgaagatgctggacttggtatctcttccactgcctctctccgagccttccagcccttctttgtggagctcacaatgccttactctgtgattcgtggagaggccttcacactcaaggccacggtcctaaactaccttcccaaatgcatccgggtcagtgtgcagctggaagcctctcccgccttcctagctgtcccagtggagaaggaacaagcgcctcactgcatctgtgcaaacgggcggcaaactgtgtcctgggcagtaaccccaaagtcattaggaaatgtgaatttcactgtgagcgcagaggcactagagtctcaagagctgtgtgggactgaggtgccttcagttcctgaacacggaaggaaagacacagtcatcaagcctctgttggttgaacctgaaggactagagaaggaaacaacattcaactccctactttgtccatcaggtggtgaggtttctgaagaattatccctgaaactgccaccaaatgtggtagaagaatctgcccgagcttctgtctcagttttgggagacatattaggctctgccatgcaaaacacacaaaatcttctccagatgccctatggctgtggagagcagaatatggtcctctttgctcctaacatctatgtactggattatctaaatgaaacacagcagcttactccagagatcaagtccaaggccattggctatctcaacactggttaccagagacagttgaactacaaacactatgatggctcctacagcacctttggggagcgatatggcaggaaccagggcaacacctggctcacagcctttgttctgaagacttttgcccaagctcgagcctacatcttcatcgatgaagcacacattacccaagccctcatatggctctcccagaggcagaaggacaatggctgtttcaggagctctgggtcactgctcaacaatgccataaagggaggagtagaagatgaagtgaccctctccgcctatatcaccatcgcccttctggagattcctctcacagtcactcaccctgttgtccgcaatgccctgttttgcctggagtcagcctggaagacagcacaagaaggggaccatggcagccatgtatataccaaagcactgctggcctatgcttttgccctggcaggtaaccaggacaagaggaaggaagtactcaagtcacttaatgaggaagctgtgaagaaagacaactctgtccattgggagcgccctcagaaacccaaggcaccagtggggcatttttacgaaccccaggctccctctgctgaggtggagatgacatcctatgtgctcctcgcttatctcacggcccagccagccccaacctcggaggacctgacctctgcaaccaacatcgtgaagtggatcacgaagcagcagaatgcccagggcggtttctcctccacccaggacacagtggtggctctccatgctctgtccaaatatggagcagccacatttaccaggactgggaaggctgcacaggtgactatccagtcttcagggacattttccagcaaattccaagtggacaacaacaaccgcctgttactgcagcaggtctcattgccagagctgcctggggaatacagcatgaaagtgacaggagaaggatgtgtctacctccagacatccttgaaatacaatattctcccagaaaaggaagagttcccctttgctttaggagtgcagactctgcctcaaacttgtgatgaacccaaagcccacaccagcttccaaatctccctaagtgtcagttacacagggagccgctctgcctccaacatggcgatcgttgatgtgaagatggtctctggcttcattcccctgaagccaacagtgaaaatgcttgaaagatctaaccatgtgagccggacagaagtcagcagcaaccatgtcttgatttaccttgataaggtgtcaaatcagacactgagcttgttcttcacggttctgcaagatgtcccagtaagagatctgaaaccagccatagtgaaagtctatgattactacgagacggatgagtttgcaattgctgagtacaatgctccttgcagcaaagatcttggaaatgcttgaagaccacaaggctgaaaagtgctttgctggagtcctgttctcagagctccacagaagacacgtgtttttgtatctttaaagacttgatgaataaacactttttctggtcaa

SEQ ID NO: 453628 - DNA, 2307 bp, Homo sapiens
gtggtcatagctagttccagagggatcccatgctgtatcacatgaccttgaaccatcaccgagtggaaggcaggggccttctgcctgtctgaagatgctggacttggtatctcttccactgcctctctccgagccttccagcccttctttgtggagctcacaatgccttactctgtgattcgtggagaggccttcacactcaaggccacggtcctaaactaccttcccaaatgcatccgggtcagtgtgcagctggaagcctctcccgccttcctagctgtcccagtggagaaggaacaagcgcctcactgcatctgtgcaaacgggcggcaaactgtgtcctgggcagtaaccccaaagtcattaggaaatgtgaatttcactgtgagcgcagaggcactagagtctcaagagctgtgtgggactgaggtgccttcagttcctgaacacggaaggaaagacacagtcatcaagcctctgttggttgaacctgaaggactagagaaggaaacaacattcaactccctactttgtccatcaggtggtgaggtttctgaagaattatccctgaaactgccaccaaatgtggtagaagaatctgcccgagcttctgtctcagttttgggagacatattaggctctgccatgcaaaacacacaaaatcttctccagatgccctatggctgtggagagcagaatatggtcctctttgctcctaacatctatgtactggattatctaaatgaaacacagcagcttactccagagatcaagtccaaggccattggctatctcaacactggttaccagagacagttgaactacaaacactatgatggctcctacagcacctttggggagcgatatggcaggaaccagggcaacacctggctcacagcctttgttctgaagacttttgcccaagctcgagcctacatcttcatcgatgaagcacacattacccaagccctcatatggctctcccagaggcagaaggacaatggctgtttcaggagctctgggtcactgctcaacaatgccataaagggaggagtagaagatgaagtgaccctctccgcctatatcaccatcgcccttctggagattcctctcacagtcactcaccctgttgtccgcaatgccctgttttgcctggagtcagcctggaagacagcacaagaaggggaccatggcagccatgtatataccaaagcactgctggcctatgcttttgccctggcaggtaaccaggacaagaggaaggaagtactcaagtcacttaatgaggaagctgtgaagaaagacaactctgtccattgggagcgccctcagaaacccaaggcaccagtggggcatttttacgaaccccaggctccctctgctgaggtggagatgacatcctatgtgctcctcgcttatctcacggcccagccagccccaacctcggaggacctgacctctgcaaccaacatcgtgaagtggatcacgaagcagcagaatgcccagggcggtttctcctccacccaggacacagtggtggctctccatgctctgtccaaatatggagcagccacatttaccaggactgggaaggctgcacaggtgactatccagtcttcagggacattttccagcaaattccaagtggacaacaacaaccgcctgttactgcagcaggtctcattgccagagctgcctggggaatacagcatgaaagtgacaggagaaggatgtgtctacctccagacatccttgaaatacaatattctcccagaaaaggaagagttcccctttgctttaggagtgcagactctgcctcaaacttgtgatgaacccaaagcccacaccagcttccaaatctccctaagtgtcagttacacagggagccgctctgcctccaacatggcgatcgttgatgtgaagatggtctctggcttcattcccctgaagccaacagtgaaaatgcttgaaagatctaaccatgtgagccggacagaagtcagcagcaaccatgtcttgatttaccttgataaggtgtcaaatcagacactgagcttgttcttcacggttctgcaagatgtcccagtaagagatctgaaaccagccatagtgaaagtctatgattactacgagacggatgagtttgcaattgctgagtacaatgctccttgcagcaaagatcttggaaatgcttgaagaccacaaggctgaaaagtgctttgctggagtcctgttctcagagctccacagaagacacgtgtttttgtatctttaaagacttgatgaataaacactttttctggtcaa

SEQ ID NO: 453629 - DNA, 5191 bp, Homo sapiens
aggcgttgtgaggagttgtgggggagtgagggagagaagaggttgaaaagcttattagctgctgtacggtaaaagtgagctcttacgggaatgggaatgtagttttagccctccagggattctatttagcccgccaggaattaaccttgactataaataggccatcaatgacctttccagagaatgttcagagacctcaactttgtttagagatcttgtgtgggtggaacttcctgtttgcacacagagcagcataaagcccagttgctttgggaagtgtttgggaccagatggattgtagggagtagggtacaatacagtctgttctcctccagctccttctttctgcaacatggggaagaacaaactccttcatccaagtctggttcttctcctcttggtcctcctgcccacagacgcctcagtctctggaaaaccgcagtatatggttctggtcccctccctgctccacactgagaccactgagaagggctgtgtccttctgagctacctgaatgagacagtgactgtaagtgcttccttggagtctgtcaggggaaacaggagcctcttcactgacctggaggcggagaatgacgtactccactgtgtcgccttcgctgtcccaaagtcttcatccaatgaggaggtaatgttcctcactgtccaagtgaaaggaccaacccaagaatttaagaagcggaccacagtgatggttaagaacgaggacagtctggtctttgtccagacagacaaatcaatctacaaaccagggcagacagtgaaatttcgtgttgtctccatggatgaaaactttcaccccctgaatgagttgattccactagtatacattcaggatcccaaaggaaatcgcatcgcacaatggcagagtttccagttagagggtggcctcaagcaattttcttttcccctctcatcagagcccttccagggctcctacaaggtggtggtacagaagaaatcaggtggaaggacagagcaccctttcaccgtggaggaatttgttcttcccaagtttgaagtacaagtaacagtgccaaagataatcaccatcttggaagaagagatgaatgtatcagtgtgtggcctatacacatatgggaagcctgtccctggacatgtgactgtgagcatttgcagaaagtatagtgacgcttccgactgccacggtgaagattcacaggctttctgtgagaaattcagtggacagctaaacagccatggctgcttctatcagcaagtaaaaaccaaggtcttccagctgaagaggaaggagtatgaaatgaaacttcacactgaggcccagatccaagaagaaggaacagtggtggaattgactggaaggcagtccagtgaaatcacaagaaccataaccaaactctcatttgtgaaagtggactcacactttcgacagggaattcccttctttgggcaggtgcgcctagtagatgggaaaggcgtccctataccaaataaagtcatattcatcagaggaaatgaagcaaactattactccaatgctaccacggatgagcatggccttgtacagttctctatcaacaccaccaatgttatgggtacctctcttactgttagggtcaattacaaggatcgtagtccctgttacggctaccagtgggtgtcagaagaacacgaagaggcacatcacactgcttatcttgtgttctccccaagcaagagctttgtccaccttgagcccatgtctcatgaactaccctgtggccatactcagacagtccaggcacattatattctgaatggaggcaccctgctggggctgaagaagctctccttctattatctgataatggcaaagggaggcattgtccgaactgggactcatggactgcttgtgaagcaggaagacatgaagggccatttttccatctcaatccctgtgaagtcagacattgctcctgtcgctcggttgctcatctatgctgttttacctaccggggacgtgattggggattctgcaaaatatgatgttgaaaattgtctggccaacaaggtggatttgagcttcagcccatcacaaagtctcccagcctcacacgcccacctgcgagtcacagcggctcctcagtccgtctgcgccctccgtgctgtggaccaaagcgtgctgctcatgaagcctgatgctgagctctcggcgtcctcggtttacaacctgctaccagaaaaggacctcactggcttccctgggcctttgaatgaccaggacgatgaagactgcatcaatcgtcataatgtctatattaatggaatcacatatactccagtatcaagtacaaatgaaaaggatatgtacagcttcctagaggacatgggcttaaaggcattcaccaactcaaagattcgtaaacccaaaatgtgtccacagcttcaacagtatgaaatgcatggacctgaaggtctacgtgtaggtttttatgagtcagatgtaatgggaagaggccatgcacgcctggtgcatgttgaagagcctcacacggagaccgtacgaaagtacttccctgagacatggatctgggatttggtggtggtaaactcagcaggtgtggctgaggtaggagtaacagtccctgacaccatcaccgagtggaaggcaggggccttctgcctgtctgaagatgctggacttggtatctcttccactgcctctctccgagccttccagcccttctttgtggagctcacaatgccttactctgtgattcgtggagaggccttcacactcaaggccacggtcctaaactaccttcccaaatgcatccgggtcagtgtgcagctggaagcctctcccgccttcctagctgtcccagtggagaaggaacaagcgcctcactgcatctgtgcaaacgggcggcaaactgtgtcctgggcagtaaccccaaagtcattaggaaatgtgaatttcactgtgagcgcagaggcactagagtctcaagagctgtgtgggactgaggtgccttcagttcctgaacacggaaggaaagacacagtcatcaagcctctgttggttgaacctgaaggactagagaaggaaacaacattcaactccctactttgtccatcaggtggtgaggtttctgaagaattatccctgaaactgccaccaaatgtggtagaagaatctgcccgagcttctgtctcagttttgggagacatattaggctctgccatgcaaaacacacaaaatcttctccagatgccctatggctgtggagagcagaatatggtcctctttgctcctaacatctatgtactggattatctaaatgaaacacagcagcttactccagagatcaagtccaaggccattggctatctcaacactggttaccagagacagttgaactacaaacactatgatggctcctacagcacctttggggagcgatatggcaggaaccagggcaacacctggctcacagcctttgttctgaagacttttgcccaagctcgagcctacatcttcatcgatgaagcacacattacccaagccctcatatggctctcccagaggcagaaggacaatggctgtttcaggagctctgggtcactgctcaacaatgccataaagggaggagtagaagatgaagtgaccctctccgcctatatcaccatcgcccttctggagattcctctcacagtcactcaccctgttgtccgcaatgccctgttttgcctggagtcagcctggaagacagcacaagaaggggaccatggcagccatgtatataccaaagcactgctggcctatgcttttgccctggcaggtaaccaggacaagaggaaggaagtactcaagtcacttaatgaggaagctgtgaagaaagacaactctgtccattgggagcgccctcagaaacccaaggcaccagtggggcatttttacgaaccccaggctccctctgctgaggtggagatgacatcctatgtgctcctcgcttatctcacggcccagccagccccaacctcggaggacctgacctctgcaaccaacatcgtgaagtggatcacgaagcagcagaatgcccagggcggtttctcctccacccaggacacagtggtggctctccatgctctgtccaaatatggagcagccacatttaccaggactgggaaggctgcacaggtgactatccagtcttcagggacattttccagcaaattccaagtggacaacaacaaccgcctgttactgcagcaggtctcattgccagagctgcctggggaatacagcatgaaagtgacaggagaaggatgtgtctacctccagacatccttgaaatacaatattctcccagaaaaggaagagttcccctttgctttaggagtgcagactctgcctcaaacttgtgatgaacccaaagcccacaccagcttccaaatctccctaagtgtcagttacacagggagccgctctgcctccaacatggcgatcgttgatgtgaagatggtctctggcttcattcccctgaagccaacagtgaaaatgcttgaaagatctaaccatgtgagccggacagaagtcagcagcaaccatgtcttgatttaccttgataaggtgtcaaatcagacactgagcttgttcttcacggttctgcaagatgtcccagtaagagatctgaaaccagccatagtgaaagtctatgattactacgagacggatgagtttgcaattgctgagtacaatgctccttgcagcaaagatcttggaaatgcttgaagaccacaaggctgaaaagtgctttgctggagtcctgttctcagagctccacagaagacacgtgtttttgtatctttaaagacttgatgaataaacactttttctggtcaaaaaaaaaaaaaaaaaaaaaaagggcggccgctcgcgatcagacactgagcttgtttttcccggttttgcaagatgtcccagtaaaagatttgaaaccacccatagtgaaagtctatgattactacgagacggatgagtttgcaattgctgagtacaatgctccttgcagcaaagatttttggaaatgcttgaagcccccaaggctgaaaagtgctttgctggagtcctgttttcaaagccccccaaaaaacacgtgtttttgtatctttaaaaacttgatgaataaaccctttttttggtcca

SEQ ID NO: 453630 - DNA, 1602 bp, Homo sapiens
  misc_feature (9)..(9): n is a, c, g, or t
  misc_feature (15)..(15): n is a, c, g, or t
cttagtgantgggtnatgtgtgcttcatcgatgaagatgtaggctcgagcttgggcaaaagtcttcagaacaaagctgtgagccaggtgttgcactggttaccagagacagttgaactacaaacactatgatggctcctacagcacctttggggagcgatatggcaggaaccagggcaacacctggctcacagcctttgttctgaagacttttgcccaagctcgagcctacatcttcatcgatgaagcacacattacccaagccctcatatggctctcccagaggcagaaggacaatggctgtttcaggagctctgggtcactgctcaacaatgccataaagggaggagtagaagatgaagtgaccctctccgcctatatcaccatcgcccttctggagattcctctcacagtcactcaccctgttgtccgcaatgccctgttttgcctggagtcagcctggaagacagcacaagaaggggaccatggcagccatgtatataccaaagcactgctggcctatgcttttgccctggcaggtaaccaggacaagaggaaggaagtactcaagtcacttaatgaggaagctgtgaagaaagacaactctgtccattgggagcgccctcagaaacccaaggcaccagtggggcatttttacgaaccccaggctccctctgctgaggtggagatgacatcctatgtgctcctcgcttatctcacggcccagccagccccaacctcggaggacctgacctctgcaaccaacatcgtgaagtggatcacgaagcagcagaatgcccagggcggtttctcctccacccaggacacagtggtggctctccatgctctgtccaaatatggagcagccacatttaccaggactgggaaggctgcacaggtgactatccagtcttcagggacattttccagcaaattccaagtggacaacaacaaccgcctgttactgcagcaggtctcattgccagagctgcctggggaatacagcatgaaagtgacaggagaaggatgtgtctacctccagacatccttgaaatacaatattctcccagaaaaggaagagttcccctttgctttaggagtgcagactctgcctcaaacttgtgatgaacccaaagcccacaccagcttccaaatctccctaagtgtcagttacacagggagccgctctgcctccaacatggcgatcgttgatgtgaagatggtctctggcttcattcccctgaagccaacagtgaaaatgcttgaaagatctaaccatgtgagccggacagaagtcagcagcaaccatgtcttgatttaccttgataaggtgtcaaatcagacactgagcttgttcttcacggttctgcaagatgtcccagtaagagatctgaaaccagccatagtgaaagtctatgattactacgagacggatgagtttgcaattgctgagtacaatgctccttgcagcaaagatcttggaaatgcttgaagaccacaaggctgaaaagtgctttgctggagtcctgttctcagagctccacagaagacacgtgtttttgtatctttaaagacttgatgaataaacactttttctggtcaa

SEQ ID NO: 453631 - DNA, 1443 bp, Homo sapiens
gagggcggggcgaggggggggacggggaccgggcgtagctccccgtctggccgggggcaagctcgagcctacatcttcatcgatgaagcacacattacccaagccctcatatggctctcccagaggcagaaggacaatggctgtttcaggagctctgggtcactgctcaacaatgccataaagggaggagtagaagatgaagtgaccctctccgcctatatcaccatcgcccttctggagattcctctcacagtcactcaccctgttgtccgcaatgccctgttttgcctggagtcagcctggaagacagcacaagaaggggaccatggcagccatgtatataccaaagcactgctggcctatgcttttgccctggcaggtaaccaggacaagaggaaggaagtactcaagtcacttaatgaggaagctgtgaagaaagacaactctgtccattgggagcgccctcagaaacccaaggcaccagtggggcatttttacgaaccccaggctccctctgctgaggtggagatgacatcctatgtgctcctcgcttatctcacggcccagccagccccaacctcggaggacctgacctctgcaaccaacatcgtgaagtggatcacgaagcagcagaatgcccagggcggtttctcctccacccaggacacagtggtggctctccatgctctgtccaaatatggagcagccacatttaccaggactgggaaggctgcacaggtgactatccagtcttcagggacattttccagcaaattccaagtggacaacaacaaccgcctgttactgcagcaggtctcattgccagagctgcctggggaatacagcatgaaagtgacaggagaaggatgtgtctacctccagacatccttgaaatacaatattctcccagaaaaggaagagttcccctttgctttaggagtgcagactctgcctcaaacttgtgatgaacccaaagcccacaccagcttccaaatctccctaagtgtcagttacacagggagccgctctgcctccaacatggcgatcgttgatgtgaagatggtctctggcttcattcccctgaagccaacagtgaaaatgcttgaaagatctaaccatgtgagccggacagaagtcagcagcaaccatgtcttgatttaccttgataaggtgtcaaatcagacactgagcttgttcttcacggttctgcaagatgtcccagtaagagatctgaaaccagccatagtgaaagtctatgattactacgagacggatgagtttgcaattgctgagtacaatgctccttgcagcaaagatcttggaaatgcttgaagaccacaaggctgaaaagtgctttgctggagtcctgttctcagagctccacagaagacacgtgtttttgtatctttaaagacttgatgaataaacactttttctggtcaa

SEQ ID NO: 453632 - DNA, 5127 bp, Homo sapiens
aggcgttgtgaggagttgtgggggagtgagggagagaagaggttgaaaagcttattagctgctgtacggtaaaagtgagctcttacgggaatgggaatgtagttttagccctccagggattctatttagcccgccaggaattaaccttgactataaataggccatcaatgacctttccagagaatgttcagagacctcaactttgtttagagatcttgtgtgggtggaacttcctgtttgcacacagagcagcataaagcccagttgctttgggaagtgtttgggaccagatggattgtagggagtagggtacaatacagtctgttctcctccagctccttctttctgcaacatggggaagaacaaactccttcatccaagtctggttcttctcctcttggtcctcctgcccacagacgcctcagtctctggaaaaccgcagtatatggttctggtcccctccctgctccacactgagaccactgagaagggctgtgtccttctgagctacctgaatgagacagtgactgtaagtgcttccttggagtctgtcaggggaaacaggagcctcttcactgacctggaggcggagaatgacgtactccactgtgtcgccttcgctgtcccaaagtcttcatccaatgaggaggtaatgttcctcactgtccaagtgaaaggaccaacccaagaatttaagaagcggaccacagtgatggttaagaacgaggacagtctggtctttgtccagacagacaaatcaatctacaaaccagggcagacagtgaaatttcgtgttgtctccatggatgaaaactttcaccccctgaatgagttgattccactagtatacattcaggatcccaaaggaaatcgcatcgcacaatggcagagtttccagttagagggtggcctcaagcaattttcttttcccctctcatcagagcccttccagggctcctacaaggtggtggtacagaagaaatcaggtggaaggacagagcaccctttcaccgtggaggaatttgttcttcccaagtttgaagtacaagtaacagtgccaaagataatcaccatcttggaagaagagatgaatgtatcagtgtgtggcctatacacatatgggaagcctgtccctggacatgtgactgtgagcatttgcagaaagtatagtgacgcttccgactgccacggtgaagattcacaggctttctgtgagaaattcagtggacagctaaacagccatggctgcttctatcagcaagtaaaaaccaaggtcttccagctgaagaggaaggagtatgaaatgaaacttcacactgaggcccagatccaagaagaaggaacagtggtggaattgactggaaggcagtccagtgaaatcacaagaaccataaccaaactctcatttgtgaaagtggactcacactttcgacagggaattcccttctttgggcaggtgcgcctagtagatgggaaaggcgtccctataccaaataaagtcatattcatcagaggaaatgaagcaaactattactccaatgctaccacggatgagcatggccttgtacagttctctatcaacaccaccaatgttatgggtacctctcttactgttagggtcaattacaaggatcgtagtccctgttacggctaccagtgggtgtcagaagaacacgaagaggcacatcacactgcttatcttgtgttctccccaagcaagagctttgtccaccttgagcccatgtctcatgaactaccctgtggccatactcagacagtccaggcacattatattctgaatggaggcaccctgctggggctgaagaagctctccttctattatctgataatggcaaagggaggcattgtccgaactgggactcatggactgcttgtgaagcaggaagacatgaagggccatttttccatctcaatccctgtgaagtcagacattgctcctgtcgctcggttgctcatctatgctgttttacctaccggggacgtgattggggattctgcaaaatatgatgttgaaaattgtctggccaacaaggtggatttgagcttcagcccatcacaaagtctcccagcctcacacgcccacctgcgagtcacagcggctcctcagtccgtctgcgccctccgtgctgtggaccaaagcgtgctgctcatgaagcctgatgctgagctctcggcgtcctcggtttacaacctgctaccagaaaaggacctcactggcttccctgggcctttgaatgaccaggacgatgaagactgcatcaatcgtcataatgtctatattaatggaatcacatatactccagtatcaagtacaaatgaaaaggatatgtacagcttcctagaggacatgggcttaaaggcattcaccaactcaaagattcgtaaacccaaaatgtgtccacagcttcaacagtatgaaatgcatggacctgaaggtctacgtgtaggtttttatgagtcagatgtaatgggaagaggccatgcacgcctggtgcatgttgaagagcctcacacggagaccgtacgaaagtacttccctgagacatggatctgggatttggtggtggtaaactcagcaggtgtggctgaggtaggagtaacagtccctgacaccatcaccgagtggaaggcaggggccttctgcctgtctgaagatgctggacttggtatctcttccactgcctctctccgagccttccagcccttctttgtggagctcacaatgccttactctgtgattcgtggagaggccttcacactcaaggccacggtcctaaactaccttcccaaatgcatccgggtcagtgtgcagctggaagcctctcccgccttcctagctgtcccagtggagaaggaacaagcgcctcactgcatctgtgcaaacgggcggcaaactgtgtcctgggcagtaaccccaaagtcattaggaaatgtgaatttcactgtgagcgcagaggcactagagtctcaagagctgtgtgggactgaggtgccttcagttcctgaacacggaaggaaagacacagtcatcaagcctctgttggttgaacctgaaggactagagaaggaaacaacattcaactccctactttgtccatcaggtggtgaggtttctgaagaattatccctgaaactgccaccaaatgtggtagaagaatctgcccgagcttctgtctcagttttgggagacatattaggctctgccatgcaaaacacacaaaatcttctccagatgccctatggctgtggagagcagaatatggtcctctttgctcctaacatctatgtactggattatctaaatgaaacacagcagcttactccagagatcaagtccaaggccattggctatctcaacactggttaccagagacagttgaactacaaacactatgatggctcctacagcacctttggggagcgatatggcaggaaccagggcaacacctggctcacagcctttgttctgaagacttttgcccaagctcgagcctacatcttcatcgatgaagcacacattacccaagccctcatatggctctcccagaggcagaaggacaatggctgtttcaggagctctgggtcactgctcaacaatgccataaagggaggagtagaagatgaagtgaccctctccgcctatatcaccatcgcccttctggagattcctctcacagtcactcaccctgttgtccgcaatgccctgttttgcctggagtcagcctggaagacagcacaagaaggggaccatggcagccatgtatataccaaagcactgctggcctatgcttttgccctggcaggtaaccaggacaagaggaaggaagtactcaagtcacttaatgaggaagctgtgaagaaagacaactctgtccattgggagcgccctcagaaacccaaggcaccagtggggcatttttacgaaccccaggctccctctgctgaggtggagatgacatcctatgtgctcctcgcttatctcacggcccagccagccccaacctcggaggacctgacctctgcaaccaacatcgtgaagtggatcacgaagcagcagaatgcccagggcggtttctcctccacccaggacacagtggtggctctccatgctctgtccaaatatggagcagccacatttaccaggactgggaaggctgcacaggtgactatccagtcttcagggacattttccagcaaattccaagtggacaacaacaaccgcctgttactgcagcaggtctcattgccagagctgcctggggaatacagcatgaaagtgacaggagaaggatgtgtctacctccagacatccttgaaatacaatattctcccagaaaaggaagagttcccctttgctttaggagtgcagactctgcctcaaacttgtgatgaacccaaagcccacaccagcttccaaatctccctaagtgtcagttacacagggagccgctctgcctccaacatggcgatcgttgatgtgaagatggtctctggcttcattcccctgaagccaacagtgaaaatgcttgaaagatctaaccatgtgagccggacagaagtcagcagcaaccatgtcttgatttaccttgataaggtgtcaaatcagacactgagcttgttcttcacggttctgcaagatgtcccagtaagagatctgaaaccagccatagtgaaagtctatgattactacgagacggatgagtttgcaattgctgagtacaatgctccttgcagcaaagatcttggaaatgcttgaagaccacaaggctgaaaagtgctttgctggagtcctgttctcagagctccacagaagacacgtgtttttgtatctttaaagacttgatgaataaacactttttctggtcaaacacacagacaaccacacaaaaaaacaagaagactttgtttgggcccgccccgggccccggaaaaaagtttgtaaaacacccgctgtggggggcgggccccagtgttacgggcacatgggcccacctggtgccaagaaaaccgggcagcacagcggtcggttcccccataaaaagcccggggaacgcggtttcgaaacaccgagggctggagccccggctcccacagcgcacgaacaaa

SEQ ID NO: 453633 - DNA, 1424 bp, Homo sapiens
  misc_feature (196)..(196): n is a, c, g, or t
  misc_feature (211)..(211): n is a, c, g, or t
  misc_feature (213)..(213): n is a, c, g, or t
  misc_feature (216)..(216): n is a, c, g, or t
attggtcgtgataagtggtttatcctgggtagagttttgcaaagctgcgccaacctaaaaaaggaacaatgcttctgcttgcactgaacaggtttcttctccccccacgacacagtggtggctctccatgctctgtccaaatatggagcagccacatttaccaggactgggaaggctgcacaggtgactatccagncttcagggacatttncnagnaaattccaagtggacaacaacaacaccctgttgtccgcaatgccctgttttgcctggagtcagcctggaagacagcacaagaaggggaccatggcagccatgtatataccaaagcactgctggcctatgcttttgccctggcaggtaaccaggacaagaggaaggaagtactcaagtcacttaatgaggaagctgtgaagaaagacaactctgtccattgggagcgccctcagaaacccaaggcaccagtggggcatttttacgaaccccaggctccctctgctgaggtggagatgacatcctatgtgctcctcgcttatctcacggcccagccagccccaacctcggaggacctgacctctgcaaccaacatcgtgaagtggatcacgaagcagcagaatgcccagggcggtttctcctccacccaggacacagtggtggctctccatgctctgtccaaatatggagcagccacatttaccaggactgggaaggctgcacaggtgactatccagtcttcagggacattttccagcaaattccaagtggacaacaacaaccgcctgttactgcagcaggtctcattgccagagctgcctggggaatacagcatgaaagtgacaggagaaggatgtgtctacctccagacatccttgaaatacaatattctcccagaaaaggaagagttcccctttgctttaggagtgcagactctgcctcaaacttgtgatgaacccaaagcccacaccagcttccaaatctccctaagtgtcagttacacagggagccgctctgcctccaacatggcgatcgttgatgtgaagatggtctctggcttcattcccctgaagccaacagtgaaaatgcttgaaagatctaaccatgtgagccggacagaagtcagcagcaaccatgtcttgatttaccttgataaggtgtcaaatcagacactgagcttgttcttcacggttctgcaagatgtcccagtaagagatctgaaaccagccatagtgaaagtctatgattactacgagacggatgagtttgcaattgctgagtacaatgctccttgcagcaaagatcttggaaatgcttgaagaccacaaggctgaaaagtgctttgctggagtcctgttctcagagctccacagaagacacgtgtttttgtatctttaaagacttgatgaataaacactttttctggtcaa

SEQ ID NO: 453634 - DNA, 5231 bp, Homo sapiens
aggcgttgtgaggagttgtgggggagtgagggagagaagaggttgaaaagcttattagctgctgtacggtaaaagtgagctcttacgggaatgggaatgtagttttagccctccagggattctatttagcccgccaggaattaaccttgactataaataggccatcaatgacctttccagagaatgttcagagacctcaactttgtttagagatcttgtgtgggtggaacttcctgtttgcacacagagcagcataaagcccagttgctttgggaagtgtttgggaccagatggattgtagggagtagggtacaatacagtctgttctcctccagctccttctttctgcaacatggggaagaacaaactccttcatccaagtctggttcttctcctcttggtcctcctgcccacagacgcctcagtctctggaaaaccgcagtatatggttctggtcccctccctgctccacactgagaccactgagaagggctgtgtccttctgagctacctgaatgagacagtgactgtaagtgcttccttggagtctgtcaggggaaacaggagcctcttcactgacctggaggcggagaatgacgtactccactgtgtcgccttcgctgtcccaaagtcttcatccaatgaggaggtaatgttcctcactgtccaagtgaaaggaccaacccaagaatttaagaagcggaccacagtgatggttaagaacgaggacagtctggtctttgtccagacagacaaatcaatctacaaaccagggcagacagtgaaatttcgtgttgtctccatggatgaaaactttcaccccctgaatgagttgattccactagtatacattcaggatcccaaaggaaatcgcatcgcacaatggcagagtttccagttagagggtggcctcaagcaattttcttttcccctctcatcagagcccttccagggctcctacaaggtggtggtacagaagaaatcaggtggaaggacagagcaccctttcaccgtggaggaatttgttcttcccaagtttgaagtacaagtaacagtgccaaagataatcaccatcttggaagaagagatgaatgtatcagtgtgtggcctatacacatatgggaagcctgtccctggacatgtgactgtgagcatttgcagaaagtatagtgacgcttccgactgccacggtgaagattcacaggctttctgtgagaaattcagtggacagctaaacagccatggctgcttctatcagcaagtaaaaaccaaggtcttccagctgaagaggaaggagtatgaaatgaaacttcacactgaggcccagatccaagaagaaggaacagtggtggaattgactggaaggcagtccagtgaaatcacaagaaccataaccaaactctcatttgtgaaagtggactcacactttcgacagggaattcccttctttgggcaggtgcgcctagtagatgggaaaggcgtccctataccaaataaagtcatattcatcagaggaaatgaagcaaactattactccaatgctaccacggatgagcatggccttgtacagttctctatcaacaccaccaatgttatgggtacctctcttactgttagggtcaattacaaggatcgtagtccctgttacggctaccagtgggtgtcagaagaacacgaagaggcacatcacactgcttatcttgtgttctccccaagcaagagctttgtccaccttgagcccatgtctcatgaactaccctgtggccatactcagacagtccaggcacattatattctgaatggaggcaccctgctggggctgaagaagctctccttctattatctgataatggcaaagggaggcattgtccgaactgggactcatggactgcttgtgaagcaggaagacatgaagggccatttttccatctcaatccctgtgaagtcagacattgctcctgtcgctcggttgctcatctatgctgttttacctaccggggacgtgattggggattctgcaaaatatgatgttgaaaattgtctggccaacaaggtggatttgagcttcagcccatcacaaagtctcccagcctcacacgcccacctgcgagtcacagcggctcctcagtccgtctgcgccctccgtgctgtggaccaaagcgtgctgctcatgaagcctgatgctgagctctcggcgtcctcggtttacaacctgctaccagaaaaggacctcactggcttccctgggcctttgaatgaccaggacgatgaagactgcatcaatcgtcataatgtctatattaatggaatcacatatactccagtatcaagtacaaatgaaaaggatatgtacagcttcctagaggacatgggcttaaaggcattcaccaactcaaagattcgtaaacccaaaatgtgtccacagcttcaacagtatgaaatgcatggacctgaaggtctacgtgtaggtttttatgagtcagatgtaatgggaagaggccatgcacgcctggtgcatgttgaagagcctcacacggagaccgtacgaaagtacttccctgagacatggatctgggatttggtggtggtaaactcagcaggtgtggctgaggtaggagtaacagtccctgacaccatcaccgagtggaaggcaggggccttctgcctgtctgaagatgctggacttggtatctcttccactgcctctctccgagccttccagcccttctttgtggagctcacaatgccttactctgtgattcgtggagaggccttcacactcaaggccacggtcctaaactaccttcccaaatgcatccgggtcagtgtgcagctggaagcctctcccgccttcctagctgtcccagtggagaaggaacaagcgcctcactgcatctgtgcaaacgggcggcaaactgtgtcctgggcagtaaccccaaagtcattaggaaatgtgaatttcactgtgagcgcagaggcactagagtctcaagagctgtgtgggactgaggtgccttcagttcctgaacacggaaggaaagacacagtcatcaagcctctgttggttgaacctgaaggactagagaaggaaacaacattcaactccctactttgtccatcaggtggtgaggtttctgaagaattatccctgaaactgccaccaaatgtggtagaagaatctgcccgagcttctgtctcagttttgggagacatattaggctctgccatgcaaaacacacaaaatcttctccagatgccctatggctgtggagagcagaatatggtcctctttgctcctaacatctatgtactggattatctaaatgaaacacagcagcttactccagagatcaagtccaaggccattggctatctcaacactggttaccagagacagttgaactacaaacactatgatggctcctacagcacctttggggagcgatatggcaggaaccagggcaacacctggctcacagcctttgttctgaagacttttgcccaagctcgagcctacatcttcatcgatgaagcacacattacccaagccctcatatggctctcccagaggcagaaggacaatggctgtttcaggagctctgggtcactgctcaacaatgccataaagggaggagtagaagatgaagtgaccctctccgcctatatcaccatcgcccttctggagattcctctcacagtcactcaccctgttgtccgcaatgccctgttttgcctggagtcagcctggaagacagcacaagaaggggaccatggcagccatgtatataccaaagcactgctggcctatgcttttgccctggcaggtaaccaggacaagaggaaggaagtactcaagtcacttaatgaggaagctgtgaagaaagacaactctgtccattgggagcgccctcagaaacccaaggcaccagtggggcatttttacgaaccccaggctccctctgctgaggtggagatgacatcctatgtgctcctcgcttatctcacggcccagccagccccaacctcggaggacctgacctctgcaaccaacatcgtgaagtggatcacgaagcagcagaatgcccagggcggtttctcctccacccaggacacagtggtggctctccatgctctgtccaaatatggagcagccacatttaccaggactgggaaggctgcacaggtgactatccagtcttcagggacattttccagcaaattccaagtggacaacaacaaccgcctgttactgcagcaggtctcattgccagagctgcctggggaatacagcatgaaagtgacaggagaaggatgtgtctacctccagacatccttgaaatacaatattctcccagaaaaggaagagttcccctttgctttaggagtgcagactctgcctcaaacttgtgatgaacccaaagcccacaccagcttccaaatctccctaagtgtcagttacacagggagccgctctgcctccaacatggcgatcgttgatgtgaagatggtctctggcttcattcccctgaagccaacagtgaaaatgcttgaaagatctaaccatgtgagccggacagaagtcagcagcaaccatgtcttgatttaccttgataaggtgtcaaatcagacactgagcttgttcttcacggttctgcaagatgtcccagtaagagatctgaaaccagccatagtgaaagtctatgattactacgagacggatgagtttgcaattgctgagtacaatgctccttgcagcaaaggtaagccactcacactcctccaaaaggcagtcagagctccttcagcttgccccccaaaccttctccttcataaaacgctgggtaaatatttgtcaaaaacatcaaattactcacactgcacattattatagaaaaacacatttattggagagggccgctgactctgtcaaacctcagagagtccataggattgcttatgggtaatgatttggaatagatttggtttcccactgtactgattaggtttccttgggcactatgctacccagaactaagggaaagaatactctctgctcatggagacccaaatctgtcttaattttttttctttccaatgtcacagatcttggaaatgcttgaagaccacaaggctgaaaagtgctttgctggagtcctgttctcagagctccacagaagacacgtgtttttgtatctttaaagacttgatgaataaacactttttctggtcaa

SEQ ID NO: 453635 - DNA, 4780 bp, Homo sapiens
aggcgttgtgaggagttgtgggggagtgagggagagaagaggttgaaaagcttattagctgctgtacggtaaaagtgagctcttacgggaatgggaatgtagttttagccctccagggattctatttagcccgccaggaattaaccttgactataaataggccatcaatgacctttccagagaatgttcagagacctcaactttgtttagagatcttgtgtgggtggaacttcctgtttgcacacagagcagcataaagcccagttgctttgggaagtgtttgggaccagatggattgtagggagtagggtacaatacagtctgttctcctccagctccttctttctgcaacatggggaagaacaaactccttcatccaagtctggttcttctcctcttggtcctcctgcccacagacgcctcagtctctggaaaaccgcagtatatggttctggtcccctccctgctccacactgagaccactgagaagggctgtgtccttctgagctacctgaatgagacagtgactgtaagtgcttccttggagtctgtcaggggaaacaggagcctcttcactgacctggaggcggagaatgacgtactccactgtgtcgccttcgctgtcccaaagtcttcatccaatgaggaggtaatgttcctcactgtccaagtgaaaggaccaacccaagaatttaagaagcggaccacagtgatggttaagaacgaggacagtctggtctttgtccagacagacaaatcaatctacaaaccagggcagacagtgaaatttcgtgttgtctccatggatgaaaactttcaccccctgaatgagttgattccactagtatacattcaggatcccaaaggaaatcgcatcgcacaatggcagagtttccagttagagggtggcctcaagcaattttcttttcccctctcatcagagcccttccagggctcctacaaggtggtggtacagaagaaatcaggtggaaggacagagcaccctttcaccgtggaggaatttgttcttcccaagtttgaagtacaagtaacagtgccaaagataatcaccatcttggaagaagagatgaatgtatcagtgtgtggcctatacacatatgggaagcctgtccctggacatgtgactgtgagcatttgcagaaagtatagtgacgcttccgactgccacggtgaagattcacaggctttctgtgagaaattcagtggacagctaaacagccatggctgcttctatcagcaagtaaaaaccaaggtcttccagctgaagaggaaggagtatgaaatgaaacttcacactgaggcccagatccaagaagaaggaacagtggtggaattgactggaaggcagtccagtgaaatcacaagaaccataaccaaactctcatttgtgaaagtggactcacactttcgacagggaattcccttctttgggcaggtgcgcctagtagatgggaaaggcgtccctataccaaataaagtcatattcatcagaggaaatgaagcaaactattactccaatgctaccacggatgagcatggccttgtacagttctctatcaacaccaccaatgttatgggtacctctcttactgttagggtcaattacaaggatcgtagtccctgttacggctaccagtgggtgtcagaagaacacgaagaggcacatcacactgcttatcttgtgttctccccaagcaagagctttgtccaccttgagcccatgtctcatgaactaccctgtggccatactcagacagtccaggcacattatattctgaatggaggcaccctgctggggctgaagaagctctccttctattatctgataatggcaaagggaggcattgtccgaactgggactcatggactgcttgtgaagcaggaagacatgaagggccatttttccatctcaatccctgtgaagtcagacattgctcctgtcgctcggttgctcatctatgctgttttacctaccggggacgtgattggggattctgcaaaatatgatgttgaaaattgtctggccaacaaggtggatttgagcttcagcccatcacaaagtctcccagcctcacacgcccacctgcgagtcacagcggctcctcagtccgtctgcgccctccgtgctgtggaccaaagcgtgctgctcatgaagcctgatgctgagctctcggcgtcctcggtttacaacctgctaccagaaaaggacctcactggcttccctgggcctttgaatgaccaggacgatgaagactgcatcaatcgtcataatgtctatattaatggaatcacatatactccagtatcaagtacaaatgaaaaggatatgtacagcttcctagaggacatgggcttaaaggcattcaccaactcaaagattcgtaaacccaaaatgtgtccacagcttcaacagtatgaaatgcatggacctgaaggtctacgtgtaggtttttatgagtcagatgtaatgggaagaggccatgcacgcctggtgcatgttgaagagcctcacacggagaccgtacgaaagtacttccctgagacatggatctgggatttggtggtggtaaactcagcaggtgtggctgaggtaggagtaacagtccctgacaccatcaccgagtggaaggcaggggccttctgcctgtctgaagatgctggacttggtatctcttccactgcctctctccgagccttccagcccttctttgtggagctcacaatgccttactctgtgattcgtggagaggccttcacactcaaggccacggtcctaaactaccttcccaaatgcatccgggtcagtgtgcagctggaagcctctcccgccttcctagctgtcccagtggagaaggaacaagcgcctcactgcatctgtgcaaacgggcggcaaactgtgtcctgggcagtaaccccaaagtcattaggaaatgtgaatttcactgtgagcgcagaggcactagagtctcaagagctgtgtgggactgaggtgccttcagttcctgaacacggaaggaaagacacagtcatcaagcctctgttggttgaacctgaaggactagagaaggaaacaacattcaactccctactttgtccatcaggtggtgaggtttctgaagaattatccctgaaactgccaccaaatgtggtagaagaatctgcccgagcttctgtctcagttttgggagacatattaggctctgccatgcaaaacacacaaaatcttctccagatgccctatggctgtggagagcagaatatggtcctctttgctcctaacatctatgtactggattatctaaatgaaacacagcagcttactccagagatcaagtccaaggccattggctatctcaacactggttaccagagacagttgaactacaaacactatgatggctcctacagcacctttggggagcgatatggcaggaaccagggcaacacctggctcacagcctttgttctgaagacttttgcccaagctcgagcctacatcttcatcgatgaagcacacattacccaagccctcatatggctctcccagaggcagaaggacaatggctgtttcaggagctctgggtcactgctcaacaatgccataaagggaggagtagaagatgaagtgaccctctccgcctatatcaccatcgcccttctggagattcctctcacagtcactcaccctgttgtccgcaatgccctgttttgcctggagtcagcctggaagacagcacaagaaggggaccatggcagccatgtatataccaaagcactgctggcctatgcttttgccctggcaggtaaccaggacaagaggaaggaagtactcaagtcacttaatgaggaagctgtgaagaaagacaactctgtccattgggagcgccctcagaaacccaaggcaccagtggggcatttttacgaaccccaggctccctctgctgaggtggagatgacatcctatgtgctcctcgcttatctcacggcccagccagccccaacctcggaggacctgacctctgcaaccaacatcgtgaagtggatcacgaagcagcagaatgcccagggcggtttctcctccacccaggacacagtggtggctctccatgctctgtccaaatatggagcagccacatttaccaggactgggaaggctgcacaggtgactatccagtcttcagggacattttccagcaaattccaagtggacaacaacaaccgcctgttactgcagcaggtctcattgccagagctgcctggggaatacagcatgaaagtgacaggagaaggatgtgtctacctccagacatccttgaaatacaatattctcccagaaaaggaagagttcccctttgctttaggagtgcagactctgcctcaaacttgtgatgaacccaaagcccacaccagcttccaaatctccctaagtgtcagttacacagggagccgctctgcctccaacatggcgatcgttgatgtgaagatggtctctggcttcattcccctgaagccaacagtgaaaatgcttgaaagatctaaccatgtgagccggacagaagtcagcagcaaccatgtcttgatttaccttgataaggtgtcaaatcagacactgagcttgttcttcacggttctgcaagatgtcccagtaagagatctgaaaccagccatagtgaaagtctatgattactacgagacggatgagtttgcaattgctgaataataatgcggccaacaagtaatctcatatctttgcagccac

SEQ ID NO: 453636 - DNA, 4699 bp, Homo sapiens
aggcgttgtgaggagttgtgggggagtgagggagagaagaggttgaaaagcttattagctgctgtacggtaaaagtgagctcttacgggaatgggaatgtagttttagccctccagggattctatttagcccgccaggaattaaccttgactataaataggccatcaatgacctttccagagaatgttcagagacctcaactttgtttagagatcttgtgtgggtggaacttcctgtttgcacacagagcagcataaagcccagttgctttgggaagtgtttgggaccagatggattgtagggagtagggtacaatacagtctgttctcctccagctccttctttctgcaacatggggaagaacaaactccttcatccaagtctggttcttctcctcttggtcctcctgcccacagacgcctcagtctctggaaaaccgcagtatatggttctggtcccctccctgctccacactgagaccactgagaagggctgtgtccttctgagctacctgaatgagacagtgactgtaagtgcttccttggagtctgtcaggggaaacaggagcctcttcactgacctggaggcggagaatgacgtactccactgtgtcgccttcgctgtcccaaagtcttcatccaatgaggaggtaatgttcctcactgtccaagtgaaaggaccaacccaagaatttaagaagcggaccacagtgatggttaagaacgaggacagtctggtctttgtccagacagacaaatcaatctacaaaccagggcagacagtgaaatttcgtgttgtctccatggatgaaaactttcaccccctgaatgagttgattccactagtatacattcaggatcccaaaggaaatcgcatcgcacaatggcagagtttccagttagagggtggcctcaagcaattttcttttcccctctcatcagagcccttccagggctcctacaaggtggtggtacagaagaaatcaggtggaaggacagagcaccctttcaccgtggaggaatttgttcttcccaagtttgaagtacaagtaacagtgccaaagataatcaccatcttggaagaagagatgaatgtatcagtgtgtggcctatacacatatgggaagcctgtccctggacatgtgactgtgagcatttgcagaaagtatagtgacgcttccgactgccacggtgaagattcacaggctttctgtgagaaattcagtggacagctaaacagccatggctgcttctatcagcaagtaaaaaccaaggtcttccagctgaagaggaaggagtatgaaatgaaacttcacactgaggcccagatccaagaagaaggaacagtggtggaattgactggaaggcagtccagtgaaatcacaagaaccataaccaaactctcatttgtgaaagtggactcacactttcgacagggaattcccttctttgggcaggtgcgcctagtagatgggaaaggcgtccctataccaaataaagtcatattcatcagaggaaatgaagcaaactattactccaatgctaccacggatgagcatggccttgtacagttctctatcaacaccaccaatgttatgggtacctctcttactgttagggtcaattacaaggatcgtagtccctgttacggctaccagtgggtgtcagaagaacacgaagaggcacatcacactgcttatcttgtgttctccccaagcaagagctttgtccaccttgagcccatgtctcatgaactaccctgtggccatactcagacagtccaggcacattatattctgaatggaggcaccctgctggggctgaagaagctctccttctattatctgataatggcaaagggaggcattgtccgaactgggactcatggactgcttgtgaagcaggaagacatgaagggccatttttccatctcaatccctgtgaagtcagacattgctcctgtcgctcggttgctcatctatgctgttttacctaccggggacgtgattggggattctgcaaaatatgatgttgaaaattgtctggccaacaaggtggatttgagcttcagcccatcacaaagtctcccagcctcacacgcccacctgcgagtcacagcggctcctcagtccgtctgcgccctccgtgctgtggaccaaagcgtgctgctcatgaagcctgatgctgagctctcggcgtcctcggtttacaacctgctaccagaaaaggacctcactggcttccctgggcctttgaatgaccaggacgatgaagactgcatcaatcgtcataatgtctatattaatggaatcacatatactccagtatcaagtacaaatgaaaaggatatgtacagcttcctagaggacatgggcttaaaggcattcaccaactcaaagattcgtaaacccaaaatgtgtccacagcttcaacagtatgaaatgcatggacctgaaggtctacgtgtaggtttttatgagtcagatgtaatgggaagaggccatgcacgcctggtgcatgttgaagagcctcacacggagaccgtacgaaagtacttccctgagacatggatctgggatttggtggtggtaaactcagcaggtgtggctgaggtaggagtaacagtccctgacaccatcaccgagtggaaggcaggggccttctgcctgtctgaagatgctggacttggtatctcttccactgcctctctccgagccttccagcccttctttgtggagctcacaatgccttactctgtgattcgtggagaggccttcacactcaaggccacggtcctaaactaccttcccaaatgcatccgggtcagtgtgcagctggaagcctctcccgccttcctagctgtcccagtggagaaggaacaagcgcctcactgcatctgtgcaaacgggcggcaaactgtgtcctgggcagtaaccccaaagtcattaggaaatgtgaatttcactgtgagcgcagaggcactagagtctcaagagctgtgtgggactgaggtgccttcagttcctgaacacggaaggaaagacacagtcatcaagcctctgttggttgaacctgaaggactagagaaggaaacaacattcaactccctactttgtccatcaggtggtgaggtttctgaagaattatccctgaaactgccaccaaatgtggtagaagaatctgcccgagcttctgtctcagttttgggagacatattaggctctgccatgcaaaacacacaaaatcttctccagatgccctatggctgtggagagcagaatatggtcctctttgctcctaacatctatgtactggattatctaaatgaaacacagcagcttactccagagatcaagtccaaggccattggctatctcaacactggttaccagagacagttgaactacaaacactatgatggctcctacagcacctttggggagcgatatggcaggaaccagggcaacacctggctcacagcctttgttctgaagacttttgcccaagctcgagcctacatcttcatcgatgaagcacacattacccaagccctcatatggctctcccagaggcagaaggacaatggctgtttcaggagctctgggtcactgctcaacaatgccataaagggaggagtagaagatgaagtgaccctctccgcctatatcaccatcgcccttctggagattcctctcacagtcactcaccctgttgtccgcaatgccctgttttgcctggagtcagcctggaagacagcacaagaaggggaccatggcagccatgtatataccaaagcactgctggcctatgcttttgccctggcaggtaaccaggacaagaggaaggaagtactcaagtcacttaatgaggaagctgtgaagaaagacaactctgtccattgggagcgccctcagaaacccaaggcaccagtggggcatttttacgaaccccaggctccctctgctgaggtggagatgacatcctatgtgctcctcgcttatctcacggcccagccagccccaacctcggaggacctgacctctgcaaccaacatcgtgaagtggatcacgaagcagcagaatgcccagggcggtttctcctccacccaggacacagtggtggctctccatgctctgtccaaatatggagcagccacatttaccaggactgggaaggctgcacaggtgactatccagtcttcagggacattttccagcaaattccaagtggacaacaacaaccgcctgttactgcagcaggtctcattgccagagctgcctggggaatacagcatgaaagtgacaggagaaggatgtgtctacctccagacatccttgaaatacaatattctcccagaaaaggaagagttcccctttgctttaggagtgcagactctgcctcaaacttgtgatgaacccaaagcccacaccagcttccaaatctccctaagtgtcagttacacagggagccgctctgcctccaacatggcgatcgttgatgtgaagatggtctctggcttcattcccctgaagccaacagtgaaaatgcttgaaagatctaaccatgtgagccggacagaagtcagcagcaaccatgtcttgatttaccttgataaggtcaaattctagacacatgagcttgttcgtcaccggttactcaagagtggactactattgcggataacgaggatacatcaagac

SEQ ID NO: 453637 - DNA, 4616 bp, Homo sapiens
aggcgttgtgaggagttgtgggggagtgagggagagaagaggttgaaaagcttattagctgctgtacggtaaaagtgagctcttacgggaatgggaatgtagttttagccctccagggattctatttagcccgccaggaattaaccttgactataaataggccatcaatgacctttccagagaatgttcagagacctcaactttgtttagagatcttgtgtgggtggaacttcctgtttgcacacagagcagcataaagcccagttgctttgggaagtgtttgggaccagatggattgtagggagtagggtacaatacagtctgttctcctccagctccttctttctgcaacatggggaagaacaaactccttcatccaagtctggttcttctcctcttggtcctcctgcccacagacgcctcagtctctggaaaaccgcagtatatggttctggtcccctccctgctccacactgagaccactgagaagggctgtgtccttctgagctacctgaatgagacagtgactgtaagtgcttccttggagtctgtcaggggaaacaggagcctcttcactgacctggaggcggagaatgacgtactccactgtgtcgccttcgctgtcccaaagtcttcatccaatgaggaggtaatgttcctcactgtccaagtgaaaggaccaacccaagaatttaagaagcggaccacagtgatggttaagaacgaggacagtctggtctttgtccagacagacaaatcaatctacaaaccagggcagacagtgaaatttcgtgttgtctccatggatgaaaactttcaccccctgaatgagttgattccactagtatacattcaggatcccaaaggaaatcgcatcgcacaatggcagagtttccagttagagggtggcctcaagcaattttcttttcccctctcatcagagcccttccagggctcctacaaggtggtggtacagaagaaatcaggtggaaggacagagcaccctttcaccgtggaggaatttgttcttcccaagtttgaagtacaagtaacagtgccaaagataatcaccatcttggaagaagagatgaatgtatcagtgtgtggcctatacacatatgggaagcctgtccctggacatgtgactgtgagcatttgcagaaagtatagtgacgcttccgactgccacggtgaagattcacaggctttctgtgagaaattcagtggacagctaaacagccatggctgcttctatcagcaagtaaaaaccaaggtcttccagctgaagaggaaggagtatgaaatgaaacttcacactgaggcccagatccaagaagaaggaacagtggtggaattgactggaaggcagtccagtgaaatcacaagaaccataaccaaactctcatttgtgaaagtggactcacactttcgacagggaattcccttctttgggcaggtgcgcctagtagatgggaaaggcgtccctataccaaataaagtcatattcatcagaggaaatgaagcaaactattactccaatgctaccacggatgagcatggccttgtacagttctctatcaacaccaccaatgttatgggtacctctcttactgttagggtcaattacaaggatcgtagtccctgttacggctaccagtgggtgtcagaagaacacgaagaggcacatcacactgcttatcttgtgttctccccaagcaagagctttgtccaccttgagcccatgtctcatgaactaccctgtggccatactcagacagtccaggcacattatattctgaatggaggcaccctgctggggctgaagaagctctccttctattatctgataatggcaaagggaggcattgtccgaactgggactcatggactgcttgtgaagcaggaagacatgaagggccatttttccatctcaatccctgtgaagtcagacattgctcctgtcgctcggttgctcatctatgctgttttacctaccggggacgtgattggggattctgcaaaatatgatgttgaaaattgtctggccaacaaggtggatttgagcttcagcccatcacaaagtctcccagcctcacacgcccacctgcgagtcacagcggctcctcagtccgtctgcgccctccgtgctgtggaccaaagcgtgctgctcatgaagcctgatgctgagctctcggcgtcctcggtttacaacctgctaccagaaaaggacctcactggcttccctgggcctttgaatgaccaggacgatgaagactgcatcaatcgtcataatgtctatattaatggaatcacatatactccagtatcaagtacaaatgaaaaggatatgtacagcttcctagaggacatgggcttaaaggcattcaccaactcaaagattcgtaaacccaaaatgtgtccacagcttcaacagtatgaaatgcatggacctgaaggtctacgtgtaggtttttatgagtcagatgtaatgggaagaggccatgcacgcctggtgcatgttgaagagcctcacacggagaccgtacgaaagtacttccctgagacatggatctgggatttggtggtggtaaactcagcaggtgtggctgaggtaggagtaacagtccctgacaccatcaccgagtggaaggcaggggccttctgcctgtctgaagatgctggacttggtatctcttccactgcctctctccgagccttccagcccttctttgtggagctcacaatgccttactctgtgattcgtggagaggccttcacactcaaggccacggtcctaaactaccttcccaaatgcatccgggtcagtgtgcagctggaagcctctcccgccttcctagctgtcccagtggagaaggaacaagcgcctcactgcatctgtgcaaacgggcggcaaactgtgtcctgggcagtaaccccaaagtcattaggaaatgtgaatttcactgtgagcgcagaggcactagagtctcaagagctgtgtgggactgaggtgccttcagttcctgaacacggaaggaaagacacagtcatcaagcctctgttggttgaacctgaaggactagagaaggaaacaacattcaactccctactttgtccatcaggtggtgaggtttctgaagaattatccctgaaactgccaccaaatgtggtagaagaatctgcccgagcttctgtctcagttttgggagacatattaggctctgccatgcaaaacacacaaaatcttctccagatgccctatggctgtggagagcagaatatggtcctctttgctcctaacatctatgtactggattatctaaatgaaacacagcagcttactccagagatcaagtccaaggccattggctatctcaacactggttaccagagacagttgaactacaaacactatgatggctcctacagcacctttggggagcgatatggcaggaaccagggcaacacctggctcacagcctttgttctgaagacttttgcccaagctcgagcctacatcttcatcgatgaagcacacattacccaagccctcatatggctctcccagaggcagaaggacaatggctgtttcaggagctctgggtcactgctcaacaatgccataaagggaggagtagaagatgaagtgaccctctccgcctatatcaccatcgcccttctggagattcctctcacagtcactcaccctgttgtccgcaatgccctgttttgcctggagtcagcctggaagacagcacaagaaggggaccatggcagccatgtatataccaaagcactgctggcctatgcttttgccctggcaggtaaccaggacaagaggaaggaagtactcaagtcacttaatgaggaagctgtgaagaaagacaactctgtccattgggagcgccctcagaaacccaaggcaccagtggggcatttttacgaaccccaggctccctctgctgaggtggagatgacatcctatgtgctcctcgcttatctcacggcccagccagccccaacctcggaggacctgacctctgcaaccaacatcgtgaagtggatcacgaagcagcagaatgcccagggcggtttctcctccacccaggacacagtggtggctctccatgctctgtccaaatatggagcagccacatttaccaggactgggaaggctgcacaggtgactatccagtcttcagggacattttccagcaaattccaagtggacaacaacaaccgcctgttactgcagcaggtctcattgccagagctgcctggggaatacagcatgaaagtgacaggagaaggatgtgtctacctccagacatccttgaaatacaatattctcccagaaaaggaagagttcccctttgctttaggagtgcagactctgcctcaaacttgtgatgaacccaaagcccacaccagcttccaaatctccctaagtgtcagttacacagggagccgctctgcctccaacatggcgatcgttgatgtgaagatggtctctggcttcattcccctgaagccaacagtgaaaatgcttgaaagatctaaccatgtgagccggacagaagtcagcagcaaccttcagataaaatgggggatcctct

SEQ ID NO: 453638 - DNA, 4711 bp, Homo sapiens
aggcgttgtgaggagttgtgggggagtgagggagagaagaggttgaaaagcttattagctgctgtacggtaaaagtgagctcttacgggaatgggaatgtagttttagccctccagggattctatttagcccgccaggaattaaccttgactataaataggccatcaatgacctttccagagaatgttcagagacctcaactttgtttagagatcttgtgtgggtggaacttcctgtttgcacacagagcagcataaagcccagttgctttgggaagtgtttgggaccagatggattgtagggagtagggtacaatacagtctgttctcctccagctccttctttctgcaacatggggaagaacaaactccttcatccaagtctggttcttctcctcttggtcctcctgcccacagacgcctcagtctctggaaaaccgcagtatatggttctggtcccctccctgctccacactgagaccactgagaagggctgtgtccttctgagctacctgaatgagacagtgactgtaagtgcttccttggagtctgtcaggggaaacaggagcctcttcactgacctggaggcggagaatgacgtactccactgtgtcgccttcgctgtcccaaagtcttcatccaatgaggaggtaatgttcctcactgtccaagtgaaaggaccaacccaagaatttaagaagcggaccacagtgatggttaagaacgaggacagtctggtctttgtccagacagacaaatcaatctacaaaccagggcagacagtgaaatttcgtgttgtctccatggatgaaaactttcaccccctgaatgagttgattccactagtatacattcaggatcccaaaggaaatcgcatcgcacaatggcagagtttccagttagagggtggcctcaagcaattttcttttcccctctcatcagagcccttccagggctcctacaaggtggtggtacagaagaaatcaggtggaaggacagagcaccctttcaccgtggaggaatttgttcttcccaagtttgaagtacaagtaacagtgccaaagataatcaccatcttggaagaagagatgaatgtatcagtgtgtggcctatacacatatgggaagcctgtccctggacatgtgactgtgagcatttgcagaaagtatagtgacgcttccgactgccacggtgaagattcacaggctttctgtgagaaattcagtggacagctaaacagccatggctgcttctatcagcaagtaaaaaccaaggtcttccagctgaagaggaaggagtatgaaatgaaacttcacactgaggcccagatccaagaagaaggaacagtggtggaattgactggaaggcagtccagtgaaatcacaagaaccataaccaaactctcatttgtgaaagtggactcacactttcgacagggaattcccttctttgggcaggtgcgcctagtagatgggaaaggcgtccctataccaaataaagtcatattcatcagaggaaatgaagcaaactattactccaatgctaccacggatgagcatggccttgtacagttctctatcaacaccaccaatgttatgggtacctctcttactgttagggtcaattacaaggatcgtagtccctgttacggctaccagtgggtgtcagaagaacacgaagaggcacatcacactgcttatcttgtgttctccccaagcaagagctttgtccaccttgagcccatgtctcatgaactaccctgtggccatactcagacagtccaggcacattatattctgaatggaggcaccctgctggggctgaagaagctctccttctattatctgataatggcaaagggaggcattgtccgaactgggactcatggactgcttgtgaagcaggaagacatgaagggccatttttccatctcaatccctgtgaagtcagacattgctcctgtcgctcggttgctcatctatgctgttttacctaccggggacgtgattggggattctgcaaaatatgatgttgaaaattgtctggccaacaaggtggatttgagcttcagcccatcacaaagtctcccagcctcacacgcccacctgcgagtcacagcggctcctcagtccgtctgcgccctccgtgctgtggaccaaagcgtgctgctcatgaagcctgatgctgagctctcggcgtcctcggtttacaacctgctaccagaaaaggacctcactggcttccctgggcctttgaatgaccaggacgatgaagactgcatcaatcgtcataatgtctatattaatggaatcacatatactccagtatcaagtacaaatgaaaaggatatgtacagcttcctagaggacatgggcttaaaggcattcaccaactcaaagattcgtaaacccaaaatgtgtccacagcttcaacagtatgaaatgcatggacctgaaggtctacgtgtaggtttttatgagtcagatgtaatgggaagaggccatgcacgcctggtgcatgttgaagagcctcacacggagaccgtacgaaagtacttccctgagacatggatctgggatttggtggtggtaaactcagcaggtgtggctgaggtaggagtaacagtccctgacaccatcaccgagtggaaggcaggggccttctgcctgtctgaagatgctggacttggtatctcttccactgcctctctccgagccttccagcccttctttgtggagctcacaatgccttactctgtgattcgtggagaggccttcacactcaaggccacggtcctaaactaccttcccaaatgcatccgggtcagtgtgcagctggaagcctctcccgccttcctagctgtcccagtggagaaggaacaagcgcctcactgcatctgtgcaaacgggcggcaaactgtgtcctgggcagtaaccccaaagtcattaggaaatgtgaatttcactgtgagcgcagaggcactagagtctcaagagctgtgtgggactgaggtgccttcagttcctgaacacggaaggaaagacacagtcatcaagcctctgttggttgaacctgaaggactagagaaggaaacaacattcaactccctactttgtccatcaggtggtgaggtttctgaagaattatccctgaaactgccaccaaatgtggtagaagaatctgcccgagcttctgtctcagttttgggagacatattaggctctgccatgcaaaacacacaaaatcttctccagatgccctatggctgtggagagcagaatatggtcctctttgctcctaacatctatgtactggattatctaaatgaaacacagcagcttactccagagatcaagtccaaggccattggctatctcaacactggttaccagagacagttgaactacaaacactatgatggctcctacagcacctttggggagcgatatggcaggaaccagggcaacacctggctcacagcctttgttctgaagacttttgcccaagctcgagcctacatcttcatcgatgaagcacacattacccaagccctcatatggctctcccagaggcagaaggacaatggctgtttcaggagctctgggtcactgctcaacaatgccataaagggaggagtagaagatgaagtgaccctctccgcctatatcaccatcgcccttctggagattcctctcacagtcactcaccctgttgtccgcaatgccctgttttgcctggagtcagcctggaagacagcacaagaaggggaccatggcagccatgtatataccaaagcactgctggcctatgcttttgccctggcaggtaaccaggacaagaggaaggaagtactcaagtcacttaatgaggaagctgtgaagaaagacaactctgtccattgggagcgccctcagaaacccaaggcaccagtggggcatttttacgaaccccaggctccctctgctgaggtggagatgacatcctatgtgctcctcgcttatctcacggcccagccagccccaacctcggaggacctgacctctgcaaccaacatcgtgaagtggatcacgaagcagcagaatgcccagggcggtttctcctccacccaggacacagtggtggctctccatgctctgtccaaatatggagcagccacatttaccaggactgggaaggctgcacaggtgactatccagtcttcagggacattttccagcaaattccaagtggacaacaacaaccgcctgttactgcagcaggtctcattgccagagctgcctggggaatacagcatgaaagtgacaggagaaggatgtgtctacctccagacatccttgaaatacaatattctcccagaaaaggaagagttcccctttgctttaggagtgcagactctgcctcaaacttgtgatgaacccaaagcccacaccagcttccaaatctccctaagtgtcagttacacagggagccgctctgcctccaacatggcgatcgttgatgtgaagatggtctctggcttcattcccctgaagccaacagtgaaaatggtgtcaaatcagacactgagcttgttcttcacggttctgcaagatgtcccagtaagagatctgaaaccagccatagtgaaagtctatgattactacgagacggatgagtttgcaattgctgaataataatgcggccaacaagtaatctcatatctttgcagccac

SEQ ID NO: 453639 - DNA, 4520 bp, Homo sapiens
aggcgttgtgaggagttgtgggggagtgagggagagaagaggttgaaaagcttattagctgctgtacggtaaaagtgagctcttacgggaatgggaatgtagttttagccctccagggattctatttagcccgccaggaattaaccttgactataaataggccatcaatgacctttccagagaatgttcagagacctcaactttgtttagagatcttgtgtgggtggaacttcctgtttgcacacagagcagcataaagcccagttgctttgggaagtgtttgggaccagatggattgtagggagtagggtacaatacagtctgttctcctccagctccttctttctgcaacatggggaagaacaaactccttcatccaagtctggttcttctcctcttggtcctcctgcccacagacgcctcagtctctggaaaaccgcagtatatggttctggtcccctccctgctccacactgagaccactgagaagggctgtgtccttctgagctacctgaatgagacagtgactgtaagtgcttccttggagtctgtcaggggaaacaggagcctcttcactgacctggaggcggagaatgacgtactccactgtgtcgccttcgctgtcccaaagtcttcatccaatgaggaggtaatgttcctcactgtccaagtgaaaggaccaacccaagaatttaagaagcggaccacagtgatggttaagaacgaggacagtctggtctttgtccagacagacaaatcaatctacaaaccagggcagacagtgaaatttcgtgttgtctccatggatgaaaactttcaccccctgaatgagttgattccactagtatacattcaggatcccaaaggaaatcgcatcgcacaatggcagagtttccagttagagggtggcctcaagcaattttcttttcccctctcatcagagcccttccagggctcctacaaggtggtggtacagaagaaatcaggtggaaggacagagcaccctttcaccgtggaggaatttgttcttcccaagtttgaagtacaagtaacagtgccaaagataatcaccatcttggaagaagagatgaatgtatcagtgtgtggcctatacacatatgggaagcctgtccctggacatgtgactgtgagcatttgcagaaagtatagtgacgcttccgactgccacggtgaagattcacaggctttctgtgagaaattcagtggacagctaaacagccatggctgcttctatcagcaagtaaaaaccaaggtcttccagctgaagaggaaggagtatgaaatgaaacttcacactgaggcccagatccaagaagaaggaacagtggtggaattgactggaaggcagtccagtgaaatcacaagaaccataaccaaactctcatttgtgaaagtggactcacactttcgacagggaattcccttctttgggcaggtgcgcctagtagatgggaaaggcgtccctataccaaataaagtcatattcatcagaggaaatgaagcaaactattactccaatgctaccacggatgagcatggccttgtacagttctctatcaacaccaccaatgttatgggtacctctcttactgttagggtcaattacaaggatcgtagtccctgttacggctaccagtgggtgtcagaagaacacgaagaggcacatcacactgcttatcttgtgttctccccaagcaagagctttgtccaccttgagcccatgtctcatgaactaccctgtggccatactcagacagtccaggcacattatattctgaatggaggcaccctgctggggctgaagaagctctccttctattatctgataatggcaaagggaggcattgtccgaactgggactcatggactgcttgtgaagcaggaagacatgaagggccatttttccatctcaatccctgtgaagtcagacattgctcctgtcgctcggttgctcatctatgctgttttacctaccggggacgtgattggggattctgcaaaatatgatgttgaaaattgtctggccaacaaggtggatttgagcttcagcccatcacaaagtctcccagcctcacacgcccacctgcgagtcacagcggctcctcagtccgtctgcgccctccgtgctgtggaccaaagcgtgctgctcatgaagcctgatgctgagctctcggcgtcctcggtttacaacctgctaccagaaaaggacctcactggcttccctgggcctttgaatgaccaggacgatgaagactgcatcaatcgtcataatgtctatattaatggaatcacatatactccagtatcaagtacaaatgaaaaggatatgtacagcttcctagaggacatgggcttaaaggcattcaccaactcaaagattcgtaaacccaaaatgtgtccacagcttcaacagtatgaaatgcatggacctgaaggtctacgtgtaggtttttatgagtcagatgtaatgggaagaggccatgcacgcctggtgcatgttgaagagcctcacacggagaccgtacgaaagtacttccctgagacatggatctgggatttggtggtggtaaactcagcaggtgtggctgaggtaggagtaacagtccctgacaccatcaccgagtggaaggcaggggccttctgcctgtctgaagatgctggacttggtatctcttccactgcctctctccgagccttccagcccttctttgtggagctcacaatgccttactctgtgattcgtggagaggccttcacactcaaggccacggtcctaaactaccttcccaaatgcatccgggtcagtgtgcagctggaagcctctcccgccttcctagctgtcccagtggagaaggaacaagcgcctcactgcatctgtgcaaacgggcggcaaactgtgtcctgggcagtaaccccaaagtcattaggaaatgtgaatttcactgtgagcgcagaggcactagagtctcaagagctgtgtgggactgaggtgccttcagttcctgaacacggaaggaaagacacagtcatcaagcctctgttggttgaacctgaaggactagagaaggaaacaacattcaactccctactttgtccatcaggtggtgaggtttctgaagaattatccctgaaactgccaccaaatgtggtagaagaatctgcccgagcttctgtctcagttttgggagacatattaggctctgccatgcaaaacacacaaaatcttctccagatgccctatggctgtggagagcagaatatggtcctctttgctcctaacatctatgtactggattatctaaatgaaacacagcagcttactccagagatcaagtccaaggccattggctatctcaacactggttaccagagacagttgaactacaaacactatgatggctcctacagcacctttggggagcgatatggcaggaaccagggcaacacctggctcacagcctttgttctgaagacttttgcccaagctcgagcctacatcttcatcgatgaagcacacattacccaagccctcatatggctctcccagaggcagaaggacaatggctgtttcaggagctctgggtcactgctcaacaatgccataaagggaggagtagaagatgaagtgaccctctccgcctatatcaccatcgcccttctggagattcctctcacagtcactcaccctgttgtccgcaatgccctgttttgcctggagtcagcctggaagacagcacaagaaggggaccatggcagccatgtatataccaaagcactgctggcctatgcttttgccctggcaggtaaccaggacaagaggaaggaagtactcaagtcacttaatgaggaagctgtgaagaaagacaactctgtccattgggagcgccctcagaaacccaaggcaccagtggggcatttttacgaaccccaggctccctctgctgaggtggagatgacatcctatgtgctcctcgcttatctcacggcccagccagccccaacctcggaggacctgacctctgcaaccaacatcgtgaagtggatcacgaagcagcagaatgcccagggcggtttctcctccacccaggacacagtggtggctctccatgctctgtccaaatatggagcagccacatttaccaggactgggaaggctgcacaggtgactatccagtcttcagggacattttccagcaaattccaagtggacaacaacaaccgcctgttactgcagcaggtctcattgccagagctgcctggggaatacagcatgaaagtgacaggagaaggatgtgtctacctccagacatccttgaaatacaatattctcccagaaaaggaagagttcccctttgctttaggagtgcagactctgcctcaaacttgtgatgaacccaaagcccacaccagcttccaaatctccctaagtgtcagttacacagggagccgctctgacttctgtccggctcacatggttagatctttcaagcattttcact

SEQ ID NO: 453640 - DNA, 4966 bp, Homo sapiens
aggcgttgtgaggagttgtgggggagtgagggagagaagaggttgaaaagcttattagctgctgtacggtaaaagtgagctcttacgggaatgggaatgtagttttagccctccagggattctatttagcccgccaggaattaaccttgactataaataggccatcaatgacctttccagagaatgttcagagacctcaactttgtttagagatcttgtgtgggtggaacttcctgtttgcacacagagcagcataaagcccagttgctttgggaagtgtttgggaccagatggattgtagggagtagggtacaatacagtctgttctcctccagctccttctttctgcaacatggggaagaacaaactccttcatccaagtctggttcttctcctcttggtcctcctgcccacagacgcctcagtctctggaaaaccgcagtatatggttctggtcccctccctgctccacactgagaccactgagaagggctgtgtccttctgagctacctgaatgagacagtgactgtaagtgcttccttggagtctgtcaggggaaacaggagcctcttcactgacctggaggcggagaatgacgtactccactgtgtcgccttcgctgtcccaaagtcttcatccaatgaggaggtaatgttcctcactgtccaagtgaaaggaccaacccaagaatttaagaagcggaccacagtgatggttaagaacgaggacagtctggtctttgtccagacagacaaatcaatctacaaaccagggcagacagtgaaatttcgtgttgtctccatggatgaaaactttcaccccctgaatgagttgattccactagtatacattcaggatcccaaaggaaatcgcatcgcacaatggcagagtttccagttagagggtggcctcaagcaattttcttttcccctctcatcagagcccttccagggctcctacaaggtggtggtacagaagaaatcaggtggaaggacagagcaccctttcaccgtggaggaatttgttcttcccaagtttgaagtacaagtaacagtgccaaagataatcaccatcttggaagaagagatgaatgtatcagtgtgtggcctatacacatatgggaagcctgtccctggacatgtgactgtgagcatttgcagaaagtatagtgacgcttccgactgccacggtgaagattcacaggctttctgtgagaaattcagtggacagctaaacagccatggctgcttctatcagcaagtaaaaaccaaggtcttccagctgaagaggaaggagtatgaaatgaaacttcacactgaggcccagatccaagaagaaggaacagtggtggaattgactggaaggcagtccagtgaaatcacaagaaccataaccaaactctcatttgtgaaagtggactcacactttcgacagggaattcccttctttgggcaggtgcgcctagtagatgggaaaggcgtccctataccaaataaagtcatattcatcagaggaaatgaagcaaactattactccaatgctaccacggatgagcatggccttgtacagttctctatcaacaccaccaatgttatgggtacctctcttactgttagggtcaattacaaggatcgtagtccctgttacggctaccagtgggtgtcagaagaacacgaagaggcacatcacactgcttatcttgtgttctccccaagcaagagctttgtccaccttgagcccatgtctcatgaactaccctgtggccatactcagacagtccaggcacattatattctgaatggaggcaccctgctggggctgaagaagctctccttctattatctgataatggcaaagggaggcattgtccgaactgggactcatggactgcttgtgaagcaggaagacatgaagggccatttttccatctcaatccctgtgaagtcagacattgctcctgtcgctcggttgctcatctatgctgttttacctaccggggacgtgattggggattctgcaaaatatgatgttgaaaattgtctggccaacaaggtggatttgagcttcagcccatcacaaagtctcccagcctcacacgcccacctgcgagtcacagcggctcctcagtccgtctgcgccctccgtgctgtggaccaaagcgtgctgctcatgaagcctgatgctgagctctcggcgtcctcggtttacaacctgctaccagaaaaggacctcactggcttccctgggcctttgaatgaccaggacgatgaagactgcatcaatcgtcataatgtctatattaatggaatcacatatactccagtatcaagtacaaatgaaaaggatatgtacagcttcctagaggacatgggcttaaaggcattcaccaactcaaagattcgtaaacccaaaatgtgtccacagcttcaacagtatgaaatgcatggacctgaaggtctacgtgtaggtttttatgagtcagatgtaatgggaagaggccatgcacgcctggtgcatgttgaagagcctcacacggagaccgtacgaaagtacttccctgagacatggatctgggatttggtggtggtaaactcagcaggtgtggctgaggtaggagtaacagtccctgacaccatcaccgagtggaaggcaggggccttctgcctgtctgaagatgctggacttggtatctcttccactgcctctctccgagccttccagcccttctttgtggagctcacaatgccttactctgtgattcgtggagaggccttcacactcaaggccacggtcctaaactaccttcccaaatgcatccgggtcagtgtgcagctggaagcctctcccgccttcctagctgtcccagtggagaaggaacaagcgcctcactgcatctgtgcaaacgggcggcaaactgtgtcctgggcagtaaccccaaagtcattaggaaatgtgaatttcactgtgagcgcagaggcactagagtctcaagagctgtgtgggactgaggtgccttcagttcctgaacacggaaggaaagacacagtcatcaagcctctgttggttgaacctgaaggactagagaaggaaacaacattcaactccctactttgtccatcaggtggtgaggtttctgaagaattatccctgaaactgccaccaaatgtggtagaagaatctgcccgagcttctgtctcagttttgggagacatattaggctctgccatgcaaaacacacaaaatcttctccagatgccctatggctgtggagagcagaatatggtcctctttgctcctaacatctatgtactggattatctaaatgaaacacagcagcttactccagagatcaagtccaaggccattggctatctcaacactggttaccagagacagttgaactacaaacactatgatggctcctacagcacctttggggagcgatatggcaggaaccagggcaacacctggctcacagcctttgttctgaagacttttgcccaagctcgagcctacatcttcatcgatgaagcacacattacccaagccctcatatggctctcccagaggcagaaggacaatggctgtttcaggagctctgggtcactgctcaacaatgccataaagggaggagtagaagatgaagtgaccctctccgcctatatcaccatcgcccttctggagattcctctcacagtcactcaccctgttgtccgcaatgccctgttttgcctggagtcagcctggaagacagcacaagaaggggaccatggcagccatgtatataccaaagcactgctggcctatgcttttgccctggcaggtaaccaggacaagaggaaggaagtactcaagtcacttaatgaggaagctgtgaagaaagacaactctgtccattgggagcgccctcagaaacccaaggcaccagtggggcatttttacgaaccccaggctccctctgctgaggtggagatgacatcctatgtgctcctcgcttatctcacggcccagccagccccaacctcggaggacctgacctctgcaaccaacatcgtgaagtggatcacgaagcagcagaatgcccagggcggtttctcctccacccaggacacagtggtggctctccatgctctgtccaaatatggagcagccacatttaccaggactgggaaggctgcacaggtgactatccagtcttcagggacattttccagcaaattccaagtggacaacaacaaccgcctgttactgcagcaggtctcattgccagagctgcctggggaatacagcatgaaagtgacaggagaaggatgtgtctacctccaggtgagactcttgggcaggtgaggacaggacagatgaggacagcagctgttctctctgagaagtcctaactcagaaaacaatgggacagatcagagaaagggttagggacgtggacaggaattctgggaaagggcaaaaaactgattttgtctttgatgttctatagacatccttgaaatacaatattctcccagaaaaggaagagttcccctttgctttaggagtgcagactctgcctcaaacttgtgatgaacccaaagcccacaccagcttccaaatctccctaagtgtcaggtaagaccttctgactctatcacctaatcctaagaataaccaccagtcttctttcgggaactcctctttaagtaaagcagtgcaacagtagatatttgcactattcacaaaaaatgcaatgtattctcttaagttgatataatttctcaatgatggggtttacattgtccatccaggatctactattgtgcaacctcattgtttaaagggtaataatttccctcaataacaactaagtaaatattacccattgcctctgacctgaattccttgttatgtaatgaaatcctatattattcttgctttattgaagatagagatgaagaattattgaaaagtttgaat

SEQ ID NO: 453641 - DNA, 593 bp, Homo sapiens
tgcgggcgtctagaggatccctactctgaaagacatccttgaaatacaatattctcccagaaaaggaagagttcccctttgctttaggagtgcagactctgcctcaaacttgtgatgaacccaaagcccacaccagcttccaaatctccctaagtgtcagttacacagggagccgctctgcctccaacatggcgatcgttgatgtgaagatggtctctggcttcattcccctgaagccaacagtgaaaatgcttgaaagatctaaccatgtgagccggacagaagtcagcagcaaccatgtcttgatttaccttgataaggtgtcaaatcagacactgagcttgttcttcacggttctgcaagatgtcccagtaagagatctgaaaccagccatagtgaaagtctatgattactacgagacggatgagtttgcaattgctgagtacaatgctccttgcagcaaagatcttggaaatgcttgaagaccacaaggctgaaaagtgctttgctggagtcctgttctcagagctccacagaagacacgtgtttttgtatctttaaagacttgatgaataaacactttttctggtcaa

SEQ ID NO: 453642 - DNA, 620 bp, Homo sapiens
agacacaggctcaagatgggaagaagaaagtgacaggagaaggatgtgtctacctccagacatccttgaaatacaatattctcccagaaaaggaagagttcccctttgctttaggagtgcagactctgcctcaaacttgtgatgaacccaaagcccacaccagcttccaaatctccctaagtgtcagttacacagggagccgctctgcctccaacatggcgatcgttgatgtgaagatggtctctggcttcattcccctgaagccaacagtgaaaatgcttgaaagatctaaccatgtgagccggacagaagtcagcagcaaccatgtcttgatttaccttgataaggtgtcaaatcagacactgagcttgttcttcacggttctgcaagatgtcccagtaagagatctgaaaccagccatagtgaaagtctatgattactacgagacggatgagtttgcaattgctgagtacaatgctccttgcagcaaagatcttggaaatgcttgaagaccacaaggctgaaaagtgctttgctggagtcctgttctcagagctccacagaagacacgtgtttttgtatctttaaagacttgatgaataaacactttttctggtcaa

SEQ ID NO: 453643 - DNA, 4065 bp, Homo sapiens
aggcgttgtgaggagttgtgggggagtgagggagagaagaggttgaaaagcttattagctgctgtacggtaaaagtgagctcttacgggaatgggaatgtagttttagccctccagggattctatttagcccgccaggaattaaccttgactataaataggccatcaatgacctttccagagaatgttcagagacctcaactttgtttagagatcttgtgtgggtggaacttcctgtttgcacacagagcagcataaagcccagttgctttgggaagtgtttgggaccagatggattgtagggagtagggtacaatacagtctgttctcctccagctccttctttctgcaacatggggaagaacaaactccttcatccaagtctggttcttctcctcttggtcctcctgcccacagacgcctcagtctctggaaaaccgcagtatatggttctggtcccctccctgctccacactgagaccactgagaagggctgtgtccttctgagctacctgaatgagacagtgactgtaagtgcttccttggagtctgtcaggggaaacaggagcctcttcactgacctggaggcggagaatgacgtactccactgtgtcgccttcgctgtcccaaagtcttcatccaatgaggaggtaatgttcctcactgtccaagtgaaaggaccaacccaagaatttaagaagcggaccacagtgatggttaagaacgaggacagtctggtctttgtccagacagacaaatcaatctacaaaccagggcagacagtgaaatttcgtgttgtctccatggatgaaaactttcaccccctgaatgagttgattccactagtatacattcaggatcccaaaggaaatcgcatcgcacaatggcagagtttccagttagagggtggcctcaagcaattttcttttcccctctcatcagagcccttccagggctcctacaaggtggtggtacagaagaaatcaggtggaaggacagagcaccctttcaccgtggaggaatttgttcttcccaagtttgaagtacaagtaacagtgccaaagataatcaccatcttggaagaagagatgaatgtatcagtgtgtggcctatacacatatgggaagcctgtccctggacatgtgactgtgagcatttgcagaaagtatagtgacgcttccgactgccacggtgaagattcacaggctttctgtgagaaattcagtggacagctaaacagccatggctgcttctatcagcaagtaaaaaccaaggtcttccagctgaagaggaaggagtatgaaatgaaacttcacactgaggcccagatccaagaagaaggaacagtggtggaattgactggaaggcagtccagtgaaatcacaagaaccataaccaaactctcatttgtgaaagtggactcacactttcgacagggaattcccttctttgggcaggtgcgcctagtagatgggaaaggcgtccctataccaaataaagtcatattcatcagaggaaatgaagcaaactattactccaatgctaccacggatgagcatggccttgtacagttctctatcaacaccaccaatgttatgggtacctctcttactgttagggtcaattacaaggatcgtagtccctgttacggctaccagtgggtgtcagaagaacacgaagaggcacatcacactgcttatcttgtgttctccccaagcaagagctttgtccaccttgagcccatgtctcatgaactaccctgtggccatactcagacagtccaggcacattatattctgaatggaggcaccctgctggggctgaagaagctctccttctattatctgataatggcaaagggaggcattgtccgaactgggactcatggactgcttgtgaagcaggaagacatgaagggccatttttccatctcaatccctgtgaagtcagacattgctcctgtcgctcggttgctcatctatgctgttttacctaccggggacgtgattggggattctgcaaaatatgatgttgaaaattgtctggccaacaaggtggatttgagcttcagcccatcacaaagtctcccagcctcacacgcccacctgcgagtcacagcggctcctcagtccgtctgcgccctccgtgctgtggaccaaagcgtgctgctcatgaagcctgatgctgagctctcggcgtcctcggtttacaacctgctaccagaaaaggacctcactggcttccctgggcctttgaatgaccaggacgatgaagactgcatcaatcgtcataatgtctatattaatggaatcacatatactccagtatcaagtacaaatgaaaaggatatgtacagcttcctagaggacatgggcttaaaggcattcaccaactcaaagattcgtaaacccaaaatgtgtccacagcttcaacagtatgaaatgcatggacctgaaggtctacgtgtaggtttttatgagtcagatgtaatgggaagaggccatgcacgcctggtgcatgttgaagagcctcacacggagaccgtacgaaagtacttccctgagacatggatctgggatttggtggtggtaaactcagcaggtgtggctgaggtaggagtaacagtccctgacaccatcaccgagtggaaggcaggggccttctgcctgtctgaagatgctggacttggtatctcttccactgcctctctccgagccttccagcccttctttgtggagctcacaatgccttactctgtgattcgtggagaggccttcacactcaaggccacggtcctaaactaccttcccaaatgcatccgggtcagtgtgcagctggaagcctctcccgccttcctagctgtcccagtggagaaggaacaagcgcctcactgcatctgtgcaaacgggcggcaaactgtgtcctgggcagtaaccccaaagtcattaggaaatgtgaatttcactgtgagcgcagaggcactagagtctcaagagctgtgtgggactgaggtgccttcagttcctgaacacggaaggaaagacacagtcatcaagcctctgttggttgaacctgaaggactagagaaggaaacaacattcaactccctactttgtccatcaggtggtgaggtttctgaagaattatccctgaaactgccaccaaatgtggtagaagaatctgcccgagcttctgtctcagttttgggagacatattaggctctgccatgcaaaacacacaaaatcttctccagatgccctatggctgtggagagcagaatatggtcctctttgctcctaacatctatgtactggattatctaaatgaaacacagcagcttactccagagatcaagtccaaggccattggctatctcaacactggttaccagagacagttgaactacaaacactatgatggctcctacagcacctttggggagcgatatggcaggaaccagggcaacacctggctcacagcctttgttctgaagacttttgcccaagctcgagcctacatcttcatcgatgaagcacacattacccaagccctcatatggctctcccagaggcagaaggacaatggctgtttcaggagctctgggtcactgctcaacaatgccataaagggaggagtagaagatgaagtgaccctctccgcctatatcaccatcgcccttctggagattcctctcacagtcactgtaggtaccaccccattcctctgctgaaggagagttctggatgcaatgaaactgctgacctgctgtctgaaatactatcctattaaaagcaaagcatcagctttctttctatgcaatgccagtgcttcccagatctacagagaatttggtcagcccattaagaaaggtttaaattttcccagtaattcccctaggctatttaccaccaccactcaaaaaagaatcttaaagatgtatcttttgaatgtgagaataacagataaaaataatattatatctattgataagaatgaggaatcgttggaaaaatgcgtttgaaaaacttctgtgctgtgatccgtgtatttgcctgggaatgctaa

SEQ ID NO: 453644 - DNA, 3038 bp, Homo sapiens
cacgagagagagagagagagagagagagagagagagagagagagagagagagagagagagaggtagggtacaatacagtctgttctcctccagctccttctttctgcaacatggggaagaacaaactccttcatccaagtctggttcttctcctcttggtcctcctgcccacagacgcctcagtctctggaaaaccgcagtatatggttctggtcccctccctgctccacactgagaccactgagaagggctgtgtccttctgagctacctgaatgagacagtgactgtaagtgcttccttggagtctgtcaggggaaacaggagcctcttcactgacctggaggcggagaatgacgtactccactgtgtcgccttcgctgtcccaaagtcttcatccaatgaggaggtaatgttcctcactgtccaagtgaaaggaccaacccaagaatttaagaagcggaccacagtgatggttaagaacgaggacagtctggtctttgtccagacagacaaatcaatctacaaaccagggcagacagtgaaatttcgtgttgtctccatggatgaaaactttcaccccctgaatgagttgattccactagtatacattcaggatcccaaaggaaatcgcatcgcacaatggcagagtttccagttagagggtggcctcaagcaattttcttttcccctctcatcagagcccttccagggctcctacaaggtggtggtacagaagaaatcaggtggaaggacagagcaccctttcaccgtggaggaatttgttcttcccaagtttgaagtacaagtaacagtgccaaagataatcaccatcttggaagaagagatgaatgtatcagtgtgtggcctatacacatatgggaagcctgtccctggacatgtgactgtgagcatttgcagaaagtatagtgacgcttccgactgccacggtgaagattcacaggctttctgtgagaaattcagtggacagctaaacagccatggctgcttctatcagcaagtaaaaaccaaggtcttccagctgaagaggaaggagtatgaaatgaaacttcacactgaggcccagatccaagaagaaggaacagtggtggaattgactggaaggcagtccagtgaaatcacaagaaccataaccaaactctcatttgtgaaagtggactcacactttcgacagggaattcccttctttgggcaggtgcgcctagtagatgggaaaggcgtccctataccaaataaagtcatattcatcagaggaaatgaagcaaactattactccaatgctaccacggatgagcatggccttgtacagttctctatcaacaccaccaatgttatgggtacctctcttactgttagggtcaattacaaggatcgtagtccctgttacggctaccagtgggtgtcagaagaacacgaagaggcacatcacactgcttatcttgtgttctccccaagcaagagctttgtccaccttgagcccatgtctcatgaactaccctgtggccatactcagacagtccaggcacattatattctgaatggaggcaccctgctggggctgaagaagctctccttctattatctgataatggcaaagggaggcattgtccgaactgggactcatggactgcttgtgaagcaggaagacatgaagggccatttttccatctcaatccctgtgaagtcagacattgctcctgtcgctcggttgctcatctatgctgttttacctaccggggacgtgattggggattctgcaaaatatgatgttgaaaattgtctggccaacaaggtggatttgagcttcagcccatcacaaagtctcccagcctcacacgcccacctgcgagtcacagcggctcctcagtccgtctgcgccctccgtgctgtggaccaaagcgtgctgctcatgaagcctgatgctgagctctcggcgtcctcggtttacaacctgctaccagaaaaggacctcactggcttccctgggcctttgaatgaccaggacgatgaagactgcatcaatcgtcataatgtctatattaatggaatcacatatactccagtatcaagtacaaatgaaaaggatatgtacagcttcctagaggacatgggcttaaaggcattcaccaactcaaagattcgtaaacccaaaatgtgtccacagcttcaacagtatgaaatgcatggacctgaaggtctacgtgtaggtttttatgagtcagatgtaatgggaagaggccatgcacgcctggtgcatgttgaagagcctcacacggagaccgtacgaaagtacttccctgagacatggatctgggatttggtggtggtaaactcagcaggtgtggctgaggtaggagtaacagtccctgacaccatcaccgagtggaaggcaggggccttctgcctgtctgaagatgctggacttggtatctcttccactgcctctctccgagccttccagcccttctttgtggagctcacaatgccttactctgtgattcgtggagaggccttcacactcaaggccacggtcctaaactaccttcccaaatgcatccgggtcagtgtgcagctggaagcctctcccgccttcctagctgtcccagtggagaaggaacaagcgcctcactgcatctgtgcaaacgggcggcaaactgtgtcctgggcagtaaccccaaagtcattaggaaatgtgaatttcactgtgagcgcagaggcactagagtctcaagagctgtgtgggactgaggtgccttcagttcctgaacacggaaggaaagacacagtcatcaagcctctgttggttgaacctgaaggactagagaaggaaacaacattcaactccctactttgtccatcaggtggtgaggtttctgaagaattatccctgaaactgccaccaaatgtggtagaagaatctgcccgagcttctgtctcagttttgggagacatattaggctctgccatgccacacctcctaacatctatgtactggattatctatgcacagcagcttctt

SEQ ID NO: 453645 - DNA, 2513 bp, Homo sapiens
aggcgttgtgaggagttgtgggggagtgagggagagaagaggttgaaaagcttattagctgctgtacggtaaaagtgagctcttacgggaatgggaatgtagttttagccctccagggattctatttagcccgccaggaattaaccttgactataaataggccatcaatgacctttccagagaatgttcagagacctcaactttgtttagagatcttgtgtgggtggaacttcctgtttgcacacagagcagcataaagcccagttgctttgggaagtgtttgggaccagatggattgtagggagtagggtacaatacagtctgttctcctccagctccttctttctgcaacatggggaagaacaaactccttcatccaagtctggttcttctcctcttggtcctcctgcccacagacgcctcagtctctggaaaaccgcagtatatggttctggtcccctccctgctccacactgagaccactgagaagggctgtgtccttctgagctacctgaatgagacagtgactgtaagtgcttccttggagtctgtcaggggaaacaggagcctcttcactgacctggaggcggagaatgacgtactccactgtgtcgccttcgctgtcccaaagtcttcatccaatgaggaggtaatgttcctcactgtccaagtgaaaggaccaacccaagaatttaagaagcggaccacagtgatggttaagaacgaggacagtctggtctttgtccagacagacaaatcaatctacaaaccagggcagacagtgaaatttcgtgttgtctccatggatgaaaactttcaccccctgaatgagttgattccactagtatacattcaggatcccaaaggaaatcgcatcgcacaatggcagagtttccagttagagggtggcctcaagcaattttcttttcccctctcatcagagcccttccagggctcctacaaggtggtggtacagaagaaatcaggtggaaggacagagcaccctttcaccgtggaggaatttgttcttcccaagtttgaagtacaagtaacagtgccaaagataatcaccatcttggaagaagagatgaatgtatcagtgtgtggcctatacacatatgggaagcctgtccctggacatgtgactgtgagcatttgcagaaagtatagtgacgcttccgactgccacggtgaagattcacaggctttctgtgagaaattcagtggacagctaaacagccatggctgcttctatcagcaagtaaaaaccaaggtcttccagctgaagaggaaggagtatgaaatgaaacttcacactgaggcccagatccaagaagaaggaacagtggtggaattgactggaaggcagtccagtgaaatcacaagaaccataaccaaactctcatttgtgaaagtggactcacactttcgacagggaattcccttctttgggcaggtgcgcctagtagatgggaaaggcgtccctataccaaataaagtcatattcatcagaggaaatgaagcaaactattactccaatgctaccacggatgagcatggccttgtacagttctctatcaacaccaccaatgttatgggtacctctcttactgttagggtcaattacaaggatcgtagtccctgttacggctaccagtgggtgtcagaagaacacgaagaggcacatcacactgcttatcttgtgttctccccaagcaagagctttgtccaccttgagcccatgtctcatgaactaccctgtggccatactcagacagtccaggcacattatattctgaatggaggcaccctgctggggctgaagaagctctccttctattatctgataatggcaaagggaggcattgtccgaactgggactcatggactgcttgtgaagcaggaagacatgaagggccatttttccatctcaatccctgtgaagtcagacattgctcctgtcgctcggttgctcatctatgctgttttacctaccggggacgtgattggggattctgcaaaatatgatgttgaaaattgtctggccaacaaggtggatttgagcttcagcccatcacaaagtctcccagcctcacacgcccacctgcgagtcacagcggctcctcagtccgtctgcgccctccgtgctgtggaccaaagcgtgctgctcatgaagcctgatgctgagctctcggcgtcctcggtttacaacctgctaccagaaaaggacctcactggcttccctgggcctttgaatgaccaggacgatgaagactgcatcaatcgtcataatgtctatattaatggaatcacatatactccagtatcaagtacaaatgaaaaggatatgtacagcttcctagaggacatgggcttaaaggcattcaccaactcaaagattcgtaaacccaaaatgtgtccacagcttcaacagtatgaaatgcatggacctgaaggtctacgtgtaggtttttatggtaaacaaaaaattaataaatatatattgcctaata

SEQ ID NO: 453646 - DNA, 2395 bp, Homo sapiens
  misc_feature (2303)..(2303): n is a, c, g, or t
  misc_feature (2309)..(2309): n is a, c, g, or t
  misc_feature (2316)..(2316): n is a, c, g, or t
  misc_feature (2333)..(2333): n is a, c, g, or t
  misc_feature (2336)..(2337): n is a, c, g, or t
  misc_feature (2342)..(2343): n is a, c, g, or t
  misc_feature (2347)..(2347): n is a, c, g, or t
cacgagagagagagagagagagagagagagagagagagagagagagagagagagagagagaggtagggtacaatacagtctgttctcctccagctccttctttctgcaacatggggaagaacaaactccttcatccaagtctggttcttctcctcttggtcctcctgcccacagacgcctcagtctctggaaaaccgcagtatatggttctggtcccctccctgctccacactgagaccactgagaagggctgtgtccttctgagctacctgaatgagacagtgactgtaagtgcttccttggagtctgtcaggggaaacaggagcctcttcactgacctggaggcggagaatgacgtactccactgtgtcgccttcgctgtcccaaagtcttcatccaatgaggaggtaatgttcctcactgtccaagtgaaaggaccaacccaagaatttaagaagcggaccacagtgatggttaagaacgaggacagtctggtctttgtccagacagacaaatcaatctacaaaccagggcagacagtgaaatttcgtgttgtctccatggatgaaaactttcaccccctgaatgagttgattccactagtatacattcaggatcccaaaggaaatcgcatcgcacaatggcagagtttccagttagagggtggcctcaagcaattttcttttcccctctcatcagagcccttccagggctcctacaaggtggtggtacagaagaaatcaggtggaaggacagagcaccctttcaccgtggaggaatttgttcttcccaagtttgaagtacaagtaacagtgccaaagataatcaccatcttggaagaagagatgaatgtatcagtgtgtggcctatacacatatgggaagcctgtccctggacatgtgactgtgagcatttgcagaaagtatagtgacgcttccgactgccacggtgaagattcacaggctttctgtgagaaattcagtggacagctaaacagccatggctgcttctatcagcaagtaaaaaccaaggtcttccagctgaagaggaaggagtatgaaatgaaacttcacactgaggcccagatccaagaagaaggaacagtggtggaattgactggaaggcagtccagtgaaatcacaagaaccataaccaaactctcatttgtgaaagtggactcacactttcgacagggaattcccttctttgggcaggtgcgcctagtagatgggaaaggcgtccctataccaaataaagtcatattcatcagaggaaatgaagcaaactattactccaatgctaccacggatgagcatggccttgtacagttctctatcaacaccaccaatgttatgggtacctctcttactgttagggtcaattacaaggatcgtagtccctgttacggctaccagtgggtgtcagaagaacacgaagaggcacatcacactgcttatcttgtgttctccccaagcaagagctttgtccaccttgagcccatgtctcatgaactaccctgtggccatactcagacagtccaggcacattatattctgaatggaggcaccctgctggggctgaagaagctctccttctattatctgataatggcaaagggaggcattgtccgaactgggactcatggactgcttgtgaagcaggaagacatgaagggccatttttccatctcaatccctgtgaagtcagacattgctcctgtcgctcggttgctcatctatgctgttttacctaccggggacgtgattggggattctgcaaaatatgatgttgaaaattgtctggccaacaaggtggatttgagcttcagcccatcacaaagtctcccagcctcacacgcccacctgcgagtcacagcggctcctcagtccgtctgcgccctccgtgctgtggaccaaagcgtgctgctcatgaagcctgatgctgagctctcggcgtcctcggtttacaacctgctaccagaaaaggacctcactggcttccctgggcctttgaatgaccaggacgatgaagactgcatcaatcgtcataatgtctatattaatggaatcacatatactccagtatcaagtacaaatgaaaaggatatgtacagcttcctagaggacatgggcttaaaggcattcaccaactcaaagattcgtaaacccaaaatgtagtcagatgtaatgggaagaggccatgcacgcctggtgcatgttgaagagcctcacacggagaccgtacgaaagtacttccctgagacatggatctgggatttggtggtggtaaacacacgtgtggcngaggangagtacnagtcctggcacccattnccnntgggnngggncctttcctgtttgaagatcttgcttgggttcttttctgcccttttcgg

SEQ ID NO: 453647 - DNA, 682 bp, Homo sapiens
cacgagagagagagagagagagagagagagagagagagagagagagagagagagagagagaggtagggtacaatacagtctgttctcctccagctccttctttctgcaacatggggaagaacaaactccttcatccaagtctggttcttctcctcttggtcctcctgcccacagacgcctcagtctctggaaaaccgcagtatatggttctggtcccctccctgctccacactgagaccactgagaagggctgtgtccttctgagctacctgaatgagacagtgactgtaagtgcttccttggagtctgtcaggggaaacaggagcctcttcactgacctggaggcggagaatgacgtactccactgtgtcgccttcgctgtcccaaagtcttcatccaatgaggaggtaatgttcctcactgtccaagtgaaaggaccaacccaagaatttaagaagcggaccacagtgatggttaagaacgaggacagtctggtctttgtccagacagacaaatcaatctacaaaccagggcagacagtgaaatttcgtgttgtctccatggatgaaaactttcaccccctgaatgagttgattccactagtatacattcaggatcccaaaggaaatcgcatcgcacatggcagagtttccagcaggggtgcctagtgggccgagctcga

SEQ ID NO: 453648 - DNA, 1998 bp, Homo sapiens
aggcgttgtgaggagttgtgggggagtgagggagagaagaggttgaaaagcttattagctgctgtacggtaaaagtgagctcttacgggaatgggaatgtagttttagccctccagggattctatttagcccgccaggaattaaccttgactataaataggccatcaatgacctttccagagaatgttcagagacctcaactttgtttagagatcttgtgtgggtggaacttcctgtttgcacacagagcagcataaagcccagttgctttgggaagtgtttgggaccagatggattgtagggagtagggtacaatacagtctgttctcctccagctccttctttctgcaacatggggaagaacaaactccttcatccaagtctggttcttctcctcttggtcctcctgcccacagacgcctcagtctctggaaaaccccgtgagttccacacagagagcgtgaagcatgaacctagagtccttcatttattgcagatttttctttatatcattcctttttctttcctatgatactgtcatcttcttatctctaagattccttccagattttacaaatctagtttactcattacttgcttacttttaatcattcttccccaactctctgaagctctaatatgcaaagccttcctaaggggtgtcagaaatttttagctttttaaaagaataaattttagatattcacattcatattgatctacttgagaccatgctatttatcttttcttatttcctctttctcaagggtccattttctattttataaaaataaagacaattctctcccacaacaaacatggaacaatgccctggagtataaaaatctatagagtgccaaataaaggaacaatttgaaatactggtgttgatattgaaaaagcagggactctaatgtcagaagagaaatcctttggcagatgaggtggtgatgaattctttgtttcaacacaactgaaggaggaactgaaggaaataccaggtgatgagtgatgagaagggattcttgataatagagtactaggtgattttggcatgtaagtgcagaagttgcaagaaggtggtaacaatgatgcaattgttttacctgccatttatttacttttatgtgagccattcttcttagcacttatagctacacaaaacaaaaatagtaacagaattaatgttgtttaattcttgcaatccatggatgcataaattcactgggggaaaaaacagctcatcattctcattaaagatgtgcttcaaaagtattttaattttatatctaatatgtatgaatcatactttgtatttattttgttttgatcagttatatacaagtatttttgaacatagctcagtcagaaggaaatgtttaatatttataaatttatggttacattctatttaaaagaggagttaaagttaaatttacctacccacatatgttacatatatatgtatttatgtatatgtattcatatatgtatatatgtgaacataagtatacatacgtatatgtatagatgcttgacaataaagaagtaagaataattcacaacattttttgaaatataaaaatttaggataaatttctgtatggtaattggcatggaaattcaaattcaaaaaggaaaaaagaagagaaagatattaaatatcagaccattaaaagaattttttaatgtacttttaaatagtgatagtaggtatcttatactacagtgtttattattcatgagaaaattgtaaaagtaatctaagtattaatttaaaatatcatcaaaaataatatcttttgctattacttaaaatcatgataaaaatatgtttacttgaaaatatgtaaggagtgcacagagtccaaaaattattttaggagttctgtgagcaaaaatgtataaaaactacagggttgatcttaaattacatgtcagggtactgagaaagtttctgtactgcacatgagttaccaaggtctaaagtcaatcacc

SEQ ID NO: 453649 - DNA, 87 bp, Homo sapiens
atagtcctagcttctgggtcatagagctgtttagaaagatataatgcagaaataattttcatatgtctgatttgcttatttctctag

SEQ ID NO: 453650 - DNA, 162 bp, Homo sapiens
atatatattttgtccatattgcatcttataaaatctaggatttcttaatcaaatcagaaatcagaagacaagaggccgtgcagatgcttctcaattacgatggggttatatcctgacaaactcattgtaaagtctaaaaaatcttaagtgggaccattgtaa

SEQ ID NO: 453651 - DNA, 364 bp, Homo sapiens
aaaatatcatcaaaaataatatcttttgctattacttaaaatcatgataaaaatatgtttacttgaaaatatgtaaggagtgcacagagtccaaaaattattttaggagttctgtgagcaaaaatgtataaaaactacagggttgatcttaaattacatgtcagggtactgagaaagtttctgtactgcacatgagttaccaaggtctaaagtcaatcaccagaggaccatttttggatggagccattgtctaatcatgagctgaaaggcaaatatttaaaatgcaaacatccatggttaggtaacactcttaaggaccttattagctgcttaccacaactgagactgtgaagtaatggctcac

SEQ ID NO: 453652 - DNA, 480 bp, Homo sapiens
gataaaaataatattatatctattgataagaatgaggaatcgttggaaaaatgcgtttgaaaaacttctgtgctgtgatccgtgtatttgcctgggaatgctaatatgcctgtttacatagcttagttcccttcttgttctgccttcacagcaccctgttgtccgcaatgccctgttttgcctggagtcagcctggaagacagcacaagaaggggaccatggcagccatgtatataccaaagcactgctggcctatgcttttgccctggcaggtaaccaggacaagaggaaggaagtactcaagtcacttaatgaggaagctgtgaagaaaggtgagagcacacctgagatccttctcctggcccatcctctgtatcaagaactgcatggcaaaaatccctcactcctacctcctgtgatccctgtctcctctcttcttttctatatatcatatatattttgtccatattgcatcttata

SEQ ID NO: 453653 - DNA, 406 bp, Homo sapiens
ccttcataaaacgctgggtaaatatttgtcaaaaacatcaaattactcacactgcacattattatagaaaaacacatttattggagagggccgctgactctgtcaaacctcagagagtccataggattgcttatgggtaatgatttggaatagatttggtttcccactgtactgattaggtttccttgggcactatgctacccagaactaagggaaagaatactctctgctcatggagacccaaatctgtcttaattttttttctttccaatgtcacagatcttggaaatgcttgaagaccacaaggctgaaaagtgctttgctggagtcctgttctcagagctccacagaagacacgtgtttttgtatctttaaagacttgatgaataaacactttttctggtca

SEQ ID NO: 453654 - DNA, 594 bp, Homo sapiens
taattgcatcagagctaaaaaattttgtgcaaatttaattctaagatttccagaaaatgggcataaggacctaatacaaccaaggactgcacagattgcctgtaagagatccctcactggttagcaatcctgagttaaatacagattcagtcaggcccactatacacaatagtagtagaatttaaaattataaagcagccctcagtgaaatagcattttagagaagagaacttaagaacaatctcaaactgcatgttaaatttataactatattgtctgtaaaagattatgctacaattctgatatactacaattaaaaacagttggaagaaaaggacttatattcccatctcaatccttgattatactctccattattggtatttctattgagtgtttttaagtcatggcagtagaatcattcctagggattctctccctagaaaggatgtatttaactgcttactttctgttcttcacttacactcctctccagctcagcaggtgtggctgaggtaggagtaacagtccctgacaccatcaccgagtggaaggcaggggccttctgcctgtctgaagatgctggacttggta

SEQ ID NO: 453655 - DNA, 474 bp, Homo sapiens
tggcttcctctcattctctttgtgccccagtgaagggccatttttccatctcaatccctgtgaagtcagacattgctcctgtcgctcggttgctcatctatgctgttttacctaccggggacgtgattggggattctgcaaaatatgatgttgaaaattgtctggccaacaaggtgtgtgttttagatcataaaatcttcaacatgtaaaactagaagttactattgttatcatttgttttacacatgtgaacattagggccaaaagggttaaacaaattccccagagacattcagcaaggtagtggcagagtcacactaagaagcagaatcacttgattccttatacaaaactctcaaacttctcctagcagtgcctcttaccaattacacagttcagagtatgttattcccttcttctatgatgaaacgttgggaaatatgtaagcaagtttttaagactactaaggagcca

SEQ ID NO: 453656 - DNA, 408 bp, Homo sapiens
gtatatggttctggtcccctccctgctccacactgagaccactgagaagggctgtgtccttctgagctacctgaatgagacagtgactgtaagtgcttccttggagtctgtcaggggaaacaggagcctcttcactgacctggaggcggagaatgacgtactccactgtgtcgccttcgctgtgagtgtggctgtttgacttaatatacttggttcttttagtcagggtcatagggatctagtattctgtcagatgaggctttgggaggttggtaagaactgcaggaaggaatccaaatgtagcaaactaagtatagaaattaaggagcaatgcatgactctccagccatgggagacaaatatttacaggcaaactaaaagtcagcttaataatcacatagaaaccct

SEQ ID NO: 453657 - DNA, 594 bp, Homo sapiens
caatatctcagaaacttgtcattaaaggagaagccttcaaactcccatagagctagatggctataactcatctcctctactcaccctttactactaccccatttgacctttttgtagataacttagggtttccatagatatcttttattagctccaatgctccaggtgcttttgtaagttataattaatttactcatataggatcccaaaggaaatcgcatcgcacaatggcagagtttccagttagagggtggcctcaagcaattttcttttcccctctcatcagagcccttccagggctcctacaaggtggtggtacagaagaaatcaggtggaaggacagagcaccctttcaccgtggaggaatttggtatggatcatgaaaagtcatcaagcattatttttcttcatatttaaactcttaggtcctggaatttaagttcatttggagtctttccatttcccatgggtgacattgggcttggagtagaattaattacacctaagtccaatgaggacatcagtgatctgtgaataggacttcacatagcttcgttattttctgtagcaatatttaataccaacccccaaaat

SEQ ID NO: 453658 - DNA, 763 bp, Homo sapiens
gaagaagcctacagacaggacaacttcaaaaaggaaagatcttcttcccctggatgttccccaggcaaagttcctataatcttggttccttaatagcttgtcttaccagcctacaggcctactttgggtttgggggctcatgaaaaatatttctgtttcagtgaaatttcgtgttgtctccatggatgaaaactttcaccccctgaatgagttggtgagttttctattatctacataaaatgattgtctgtataaacaggctgggaacctgttttttgtgctgagggaagaccagggagaggaagaatctggtatcattaacagtaacttctggcattacaacagcacaagatcctaatctaaaacatcattccaggtaaagaaagtaggtaattctttctgtcttggtgctggtactcagtcagttgtcacacaattaaatttacttttcggatggttcttaattaggacaattagaaagatacattcaatagcagacacagaaaaatcctcaaagaacctaagctcaaaaaacattttaaagatttagattttttctatacacatctaccaaaatcttcactataaaggaaagtcagggtaattaatttgttcctcaagactaactcttggtatctgtgataagaaacagttctttctattgtaatgcagacatcaacccaaagtcttcatttttctctcccaaattaacttcttcacattttcttatctcaaaaagaggcaactcttctcttctagctcc

SEQ ID NO: 453659 - DNA, 688 bp, Homo sapiens
gggggaggccttctccaggaacttttcgccgcatgccaggcctgataacatctttgaatacgacgggtatcgtcctgccgtccagagtggggacgttcactgtgcagccacacagagccttgaaaagcaaaaggacagcattagatggaagctggctcaagaggctcagctcttgcccagaggccatctgccatagataagacccatcaggcctctgcagctaagacctggcccccaaatctccctaagtgtcagttacacagggagccgctctgcctccaacatggcgatcgttgatgtgaagatggtctctggcttcattcccctgaagccaacagtgaaaatgcttgaaagatctaaccatgtgagccggacagaagtcagcagcaaccatgtcttgatttaccttgataaggtgtcaaatcagacactgagcttgttcttcacggttctgcaagatgtcccagtaagagatctgaaaccagccatagtgaaagtctatgattactacgagacggatgagtttgcaattgctgagtacaatgctccttgcagcaaagatcttggaaatgcttgaagaccacaaggctgaaaagtgctttgctggagtcctgttctcagagctccacagaagacacgtgtttttgtatctttaaagacttgatgaataaacactttttctggtcaa

SEQ ID NO: 453660 - DNA, 1706 bp, Homo sapiens
cacgagagagagagagagagagagagagagagagagagagagagagagagagagagagagaggtagggtacaatacagtctgttctcctccagctccttctttctgcaacatggggaagaacaaactccttcatccaagtctggttcttctcctcttggtcctcctgcccacagacgcctcagtctctggaaaacctattgcagatttttctttatatcattcctttttctttcctatgatactgtcatcttcttatctctaagattccttccagattttacaaatctagtttactcattacttgcttacttttaatcattcttccccaactctctgaagctctaatatgcaaagccttcctaaggggtgtcagaaatttttagctttttaaaagaataaattttagatattcacattcatattgatctacttgagaccatgctatttatcttttcttatttcctctttctcaagggtccattttctattttataaaaataaagacaattctctcccacaacaaacatggaacaatgccctggagtataaaaatctatagagtgccaaataaaggaacaatttgaaatactggtgttgatattgaaaaagcagggactctaatgtcagaagagaaatcctttggcagatgaggtggtgatgaattctttgtttcaacacaactgaaggaggaactgaaggaaataccaggtgatgagtgatgagaagggattcttgataatagagtactaggtgattttggcatgtaagtgcagaagttgcaagaaggtggtaacaatgatgcaattgttttacctgccatttatttacttttatgtgagccattcttcttagcacttatagctacacaaaacaaaaatagtaacagaattaatgttgtttaattcttgcaatccatggatgcataaattcactgggggaaaaaacagctcatcattctcattaaagatgtgcttcaaaagtattttaattttatatctaatatgtatgaatcatactttgtatttattttgttttgatcagttatatacaagtatttttgaacatagctcagtcagaaggaaatgtttaatatttataaatttatggttacattctatttaaaagaggagttaaagttaaatttacctacccacatatgttacatatatatgtatttatgtatatgtattcatatatgtatatatgtgaacataagtatacatacgtatatgtatagatgcttgacaataaagaagtaagaataattcacaacattttttgaaatataaaaatttaggataaatttctgtatggtaattggcatggaaattcaaattcaaaaaggaaaaaagaagagaaagatattaaatatcagaccattaaaagaattttttaatgtacttttaaatagtgatagtaggtatcttatactacagtgtttattattcatgagaaaattgtaaaagtaatctaagtattaatttaaaatatcatcaaaaataatatcttttgctattacttaaaatcatgataaaaatatgtttacttgaaaatatgtaaggagtgcacagagtccaaaaattattttaggagttctgtgagcaaaaatgtataaaaactacagggttgatcttaaattacatgtcagggtactgagaaagtttctgtactgcacatgagttaccaaggtctaaagtcaatcacc

SEQ ID NO: 453661 - DNA, 4888 bp, Homo sapiens
aggcgttgtgaggagttgtgggggagtgagggagagaagaggttgaaaagcttattagctgctgtacggtaaaagtgagctcttacgggaatgggaatgtagttttagccctccagggattctatttagcccgccaggaattaaccttgactataaataggccatcaatgacctttccagagaatgttcagagacctcaactttgtttagagatcttgtgtgggtggaacttcctgtttgcacacagagcagcataaagcccagttgctttgggaagtgtttgggaccagatggattgtagggagtagggtacaatacagtctgttctcctccagctccttctttctgcaacatggggaagaacaaactccttcatccaagtctggttcttctcctcttggtcctcctgcccacagacgcctcagtctctggaaaaccgcagtatatggttctggtcccctccctgctccacactgagaccactgagaagggctgtgtccttctgagctacctgaatgagacagtgactgtaagtgcttccttggagtctgtcaggggaaacaggagcctcttcactgacctggaggcggagaatgacgtactccactgtgtcgccttcgctgtcccaaagtcttcatccaatgaggaggtaatgttcctcactgtccaagtgaaaggaccaacccaagaatttaagaagcggaccacagtgatggttaagaacgaggacagtctggtctttgtccagacagacaaatcaatctacaaaccagggcagacagtgaaatttcgtgttgtctccatggatgaaaactttcaccccctgaatgagttgattccactagtatacattcaggatcccaaaggaaatcgcatcgcacaatggcagagtttccagttagagggtggcctcaagcaattttcttttcccctctcatcagagcccttccagggctcctacaaggtggtggtacagaagaaatcaggtggaaggacagagcaccctttcaccgtggaggaatttgttcttcccaagtttgaagtacaagtaacagtgccaaagataatcaccatcttggaagaagagatgaatgtatcagtgtgtggcctatacacatatgggaagcctgtccctggacatgtgactgtgagcatttgcagaaagtatagtgacgcttccgactgccacggtgaagattcacaggctttctgtgagaaattcagtggacagctaaacagccatggctgcttctatcagcaagtaaaaaccaaggtcttccagctgaagaggaaggagtatgaaatgaaacttcacactgaggcccagatccaagaagaaggaacagtggtggaattgactggaaggcagtccagtgaaatcacaagaaccataaccaaactctcatttgtgaaagtggactcacactttcgacagggaattcccttctttgggcaggtgcgcctagtagatgggaaaggcgtccctataccaaataaagtcatattcatcagaggaaatgaagcaaactattactccaatgctaccacggatgagcatggccttgtacagttctctatcaacaccaccaatgttatgggtacctctcttactgttagggtcaattacaaggatcgtagtccctgttacggctaccagtgggtgtcagaagaacacgaagaggcacatcacactgcttatcttgtgttctccccaagcaagagctttgtccaccttgagcccatgtctcatgaactaccctgtggccatactcagacagtccaggcacattatattctgaatggaggcaccctgctggggctgaagaagctctccttctattatctgataatggcaaagggaggcattgtccgaactgggactcatggactgcttgtgaagcaggaagacatgaagggccatttttccatctcaatccctgtgaagtcagacattgctcctgtcgctcggttgctcatctatgctgttttacctaccggggacgtgattggggattctgcaaaatatgatgttgaaaattgtctggccaacaaggtggatttgagcttcagcccatcacaaagtctcccagcctcacacgcccacctgcgagtcacagcggctcctcagtccgtctgcgccctccgtgctgtggaccaaagcgtgctgctcatgaagcctgatgctgagctctcggcgtcctcggtttacaacctgctaccagaaaaggacctcactggcttccctgggcctttgaatgaccaggacgatgaagactgcatcaatcgtcataatgtctatattaatggaatcacatatactccagtatcaagtacaaatgaaaaggatatgtacagcttcctagaggacatgggcttaaaggcattcaccaactcaaagattcgtaaacccaaaatgtgtccacagcttcaacagtatgaaatgcatggacctgaaggtctacgtgtaggtttttatgagtcagatgtaatgggaagaggccatgcacgcctggtgcatgttgaagagcctcacacggagaccgtacgaaagtacttccctgagacatggatctgggatttggtggtggtaaactcagcaggtgtggctgaggtaggagtaacagtccctgacaccatcaccgagtggaaggcaggggccttctgcctgtctgaagatgctggacttggtatctcttccactgcctctctccgagccttccagcccttctttgtggagctcacaatgccttactctgtgattcgtggagaggccttcacactcaaggccacggtcctaaactaccttcccaaatgcatccgggtcagtgtgcagctggaagcctctcccgccttcctagctgtcccagtggagaaggaacaagcgcctcactgcatctgtgcaaacgggcggcaaactgtgtcctgggcagtaaccccaaagtcattaggaaatgtgaatttcactgtgagcgcagaggcactagagtctcaagagctgtgtgggactgaggtgccttcagttcctgaacacggaaggaaagacacagtcatcaagcctctgttggttgaacctgaaggactagagaaggaaacaacattcaactccctactttgtccatcaggtggtgaggtttctgaagaattatccctgaaactgccaccaaatgtggtagaagaatctgcccgagcttctgtctcagttttgggagacatattaggctctgccatgcaaaacacacaaaatcttctccagatgccctatggctgtggagagcagaatatggtcctctttgctcctaacatctatgtactggattatctaaatgaaacacagcagcttactccagagatcaagtccaaggccattggctatctcaacactggttaccagagacagttgaactacaaacactatgatggctcctacagcacctttggggagcgatatggcaggaaccagggcaacacctggctcacagcctttgttctgaagacttttgcccaagctcgagcctacatcttcatcgatgaagcacacattacccaagccctcatatggctctcccagaggcagaaggacaatggctgtttcaggagctctgggtcactgctcaacaatgccataaagggaggagtagaagatgaagtgaccctctccgcctatatcaccatcgcccttctggagattcctctcacagtcactcaccctgttgtccgcaatgccctgttttgcctggagtcagcctggaagacagcacaagaaggggaccatggcagccatgtatataccaaagcactgctggcctatgcttttgccctggcaggtaaccaggacaagaggaaggaagtactcaagtcacttaatgaggaagctgtgaagaaagacaactctgtccattgggagcgccctcagaaacccaaggcaccagtggggcatttttacgaaccccaggctccctctgctgaggtggagatgacatcctatgtgctcctcgcttatctcacggcccagccagccccaacctcggaggacctgacctctgcaaccaacatcgtgaagtggatcacgaagcagcagaatgcccagggcggtttctcctccacccaggacacagtggtggctctccatgctctgtccaaatatggagcagccacatttaccaggactgggaaggctgcacaggtgactatccagtcttcagggacattttccagcaaattccaagtggacaacaacaaccgcctgttactgcagcaggtctcattgccagagctgcctggggaatacagcatgaaagtgacaggagaaggatgtgtctacctccagacatccttgaaatacaatattctcccagaaaaggaagagttcccctttgctttaggagtgcagactctgcctcaaacttgtgatgaacccaaagcccacaccagcttccaaatctccctaagtgtcagttacacagggagccgctctgcctccaacatggcgatcgttgatgtgaagatggtctctggcttcattcccctgaagccaacagtgaaaatgcttgaaagatctaaccatgtgagccggacagaagtcagcagcaaccatgtcttgatttaccttgataaggtgtcaaatcagacactgagcttgttcttcacggttctgcaagatgtcccagtaagagatctgaaaccagccatagtgaaagtctatgattactacgagacggatgagtttgcaattgctgagtacaatgctccttgcagcaaagatcttggaaatgcttgaagaccacaaggctgaaaagtgctttgctggagtcctgttctcagagctccacagaagacacgtgtttttgtatctttaaagacttgatgaataaacactttttctggtcaa

SEQ ID NO: 453662 - DNA, 4834 bp, Homo sapiens
aggcgttgtgaggagttgtgggggagtgagggagagaagaggttgaaaagcttattagctgctgtacggtaaaagtgagctcttacgggaatgggaatgtagttttagccctccagggattctatttagcccgccaggaattaaccttgactataaataggccatcaatgacctttccagagaatgttcagagacctcaactttgtttagagatcttgtgtgggtggaacttcctgtttgcacacagagcagcataaagcccagttgctttgggaagtgtttgggaccagatggattgtagggagtagggtacaatacagtctgttctcctccagctccttctttctgcaacatggggaagaacaaactccttcatccaagtctggttcttctcctcttggtcctcctgcccacagacgcctcagtctctggaaaaccgcagtatatggttctggtcccctccctgctccacactgagaccactgagaagggctgtgtccttctgagctacctgaatgagacagtgactgtaagtgcttccttggagtctgtcaggggaaacaggagcctcttcactgacctggaggcggagaatgacgtactccactgtgtcgccttcgctgtcccaaagtcttcatccaatgaggaggtaatgttcctcactgtccaagtgaaaggaccaacccaagaatttaagaagcggaccacagtgatggttaagaacgaggacagtctggtctttgtccagacagacaaatcaatctacaaaccagggcagacagtgaaatttcgtgttgtctccatggatgaaaactttcaccccctgaatgagttgattccactagtatacattcaggatcccaaaggaaatcgcatcgcacaatggcagagtttccagttagagggtggcctcaagcaattttcttttcccctctcatcagagcccttccagggctcctacaaggtggtggtacagaagaaatcaggtggaaggacagagcaccctttcaccgtggaggaatttgttcttcccaagtttgaagtacaagtaacagtgccaaagataatcaccatcttggaagaagagatgaatgtatcagtgtgtggcctatacacatatgggaagcctgtccctggacatgtgactgtgagcatttgcagaaagtatagtgacgcttccgactgccacggtgaagattcacaggctttctgtgagaaattcagtggacagctaaacagccatggctgcttctatcagcaagtaaaaaccaaggtcttccagctgaagaggaaggagtatgaaatgaaacttcacactgaggcccagatccaagaagaaggaacagtggtggaattgactggaaggcagtccagtgaaatcacaagaaccataaccaaactctcatttgtgaaagtggactcacactttcgacagggaattcccttctttgggcaggtgcgcctagtagatgggaaaggcgtccctataccaaataaagtcatattcatcagaggaaatgaagcaaactattactccaatgctaccacggatgagcatggccttgtacagttctctatcaacaccaccaatgttatgggtacctctcttactgttagggtcaattacaaggatcgtagtccctgttacggctaccagtgggtgtcagaagaacacgaagaggcacatcacactgcttatcttgtgttctccccaagcaagagctttgtccaccttgagcccatgtctcatgaactaccctgtggccatactcagacagtccaggcacattatattctgaatggaggcaccctgctggggctgaagaagctctccttctattatctgataatggcaaagggaggcattgtccgaactgggactcatggactgcttgtgaagcaggaagacatgaagggccatttttccatctcaatccctgtgaagtcagacattgctcctgtcgctcggttgctcatctatgctgttttacctaccggggacgtgattggggattctgcaaaatatgatgttgaaaattgtctggccaacaaggtggatttgagcttcagcccatcacaaagtctcccagcctcacacgcccacctgcgagtcacagcggctcctcagtccgtctgcgccctccgtgctgtggaccaaagcgtgctgctcatgaagcctgatgctgagctctcggcgtcctcggtttacaacctgctaccagaaaaggacctcactggcttccctgggcctttgaatgaccaggacgatgaagactgcatcaatcgtcataatgtctatattaatggaatcacatatactccagtatcaagtacaaatgaaaaggatatgtacagcttcctagaggacatgggcttaaaggcattcaccaactcaaagattcgtaaacccaaaatgtgtccacagcttcaacagtatgaaatgcatggacctgaaggtctacgtgtaggtttttatgagtcagatgtaatgggaagaggccatgcacgcctggtgcatgttgaagagcctcacacggagaccgtacgaaagtacttccctgagacatggatctgggatttggtggtggtaaactcagcaggtgtggctgaggtaggagtaacagtccctgacaccatcaccgagtggaaggcaggggccttctgcctgtctgaagatgctggacttggtatctcttccactgcctctctccgagccttccagcccttctttgtggagctcacaatgccttactctgtgattcgtggagaggccttcacactcaaggccacggtcctaaactaccttcccaaatgcatccgggtcagtgtgcagctggaagcctctcccgccttcctagctgtcccagtggagaaggaacaagcgcctcactgcatctgtgcaaacgggcggcaaactgtgtcctgggcagtaaccccaaagtcattaggaaatgtgaatttcactgtgagcgcagaggcactagagtctcaagagctgtgtgggactgaggtgccttcagttcctgaacacggaaggaaagacacagtcatcaagcctctgttggttgaacctgaaggactagagaaggaaacaacattcaactccctactttgtccatcaggtggtgaggtttctgaagaattatccctgaaactgccaccaaatgtggtagaagaatctgcccgagcttctgtctcagttttgggagacatattaggctctgccatgcaaaacacacctcctaacatctatgtactggattatctaaatgaaacacagcagcttactccagagatcaagtccaaggccattggctatctcaacactggttaccagagacagttgaactacaaacactatgatggctcctacagcacctttggggagcgatatggcaggaaccagggcaacacctggctcacagcctttgttctgaagacttttgcccaagctcgagcctacatcttcatcgatgaagcacacattacccaagccctcatatggctctcccagaggcagaaggacaatggctgtttcaggagctctgggtcactgctcaacaatgccataaagggaggagtagaagatgaagtgaccctctccgcctatatcaccatcgcccttctggagattcctctcacagtcactcaccctgttgtccgcaatgccctgttttgcctggagtcagcctggaagacagcacaagaaggggaccatggcagccatgtatataccaaagcactgctggcctatgcttttgccctggcaggtaaccaggacaagaggaaggaagtactcaagtcacttaatgaggaagctgtgaagaaagacaactctgtccattgggagcgccctcagaaacccaaggcaccagtggggcatttttacgaaccccaggctccctctgctgaggtggagatgacatcctatgtgctcctcgcttatctcacggcccagccagccccaacctcggaggacctgacctctgcaaccaacatcgtgaagtggatcacgaagcagcagaatgcccagggcggtttctcctccacccaggacacagtggtggctctccatgctctgtccaaatatggagcagccacatttaccaggactgggaaggctgcacaggtgactatccagtcttcagggacattttccagcaaattccaagtggacaacaacaaccgcctgttactgcagcaggtctcattgccagagctgcctggggaatacagcatgaaagtgacaggagaaggatgtgtctacctccagacatccttgaaatacaatattctcccagaaaaggaagagttcccctttgctttaggagtgcagactctgcctcaaacttgtgatgaacccaaagcccacaccagcttccaaatctccctaagtgtcagttacacagggagccgctctgcctccaacatggcgatcgttgatgtgaagatggtctctggcttcattcccctgaagccaacagtgaaaatgcttgaaagatctaaccatgtgagccggacagaagtcagcagcaaccatgtcttgatttaccttgataaggtgtcaaatcagacactgagcttgttcttcacggttctgcaagatgtcccagtaagagatctgaaaccagccatagtgaaagtctatgattactacgagacggatgagtttgcaattgctgagtacaatgctccttgcagcaaagatcttggaaatgcttgaagaccacaaggctgaaaagtgctttgctggagtcctgttctcagagctccacagaagacacgtgtttttgtatctttaaagacttgatgaataaacactttttctggtcaa

SEQ ID NO: 453663 - DNA, 3066 bp, Homo sapiens
tgagattattcagctattcgttcctggtgaatcgaacaccgcagacctcgcaggcaaagggcttctcgcctgtgtgggtcctcatgtggcgaggcagtttgcctgccccaggaagatatagtgtcagacattgctcctgtcgctcggttgctcatctatgctgttttacctaccggggacgtgattggggattctgcaaaatatgatgttgaaaattgtctggccaacaaggtggatttgagcttcagcccatcacaaagtctcccagcctcacacgcccacctgcgagtcacagcggctcctcagtccgtctgcgccctccgtgctgtggaccaaagcgtgctgctcatgaagcctgatgctgagctctcggcgtcctcggtttacaacctgctaccagaaaaggacctcactggcttccctgggcctttgaatgaccaggacgatgaagactgcatcaatcgtcataatgtctatattaatggaatcacatatactccagtatcaagtacaaatgaaaaggatatgtacagcttcctagaggacatgggcttaaaggcattcaccaactcaaagattcgtaaacccaaaatgtgtccacagcttcaacagtatgaaatgcatggacctgaaggtctacgtgtaggtttttatgagtcagatgtaatgggaagaggccatgcacgcctggtgcatgttgaagagcctcacacggagaccgtacgaaagtacttccctgagacatggatctgggatttggtggtggtaaactcagcaggtgtggctgaggtaggagtaacagtccctgacaccatcaccgagtggaaggcaggggccttctgcctgtctgaagatgctggacttggtatctcttccactgcctctctccgagccttccagcccttctttgtggagctcacaatgccttactctgtgattcgtggagaggccttcacactcaaggccacggtcctaaactaccttcccaaatgcatccgggtcagtgtgcagctggaagcctctcccgccttcctagctgtcccagtggagaaggaacaagcgcctcactgcatctgtgcaaacgggcggcaaactgtgtcctgggcagtaaccccaaagtcattaggaaatgtgaatttcactgtgagcgcagaggcactagagtctcaagagctgtgtgggactgaggtgccttcagttcctgaacacggaaggaaagacacagtcatcaagcctctgttggttgaacctgaaggactagagaaggaaacaacattcaactccctactttgtccatcaggtggtgaggtttctgaagaattatccctgaaactgccaccaaatgtggtagaagaatctgcccgagcttctgtctcagttttgggagacatattaggctctgccatgcaaaacacacaaaatcttctccagatgccctatggctgtggagagcagaatatggtcctctttgctcctaacatctatgtactggattatctaaatgaaacacagcagcttactccagagatcaagtccaaggccattggctatctcaacactggttaccagagacagttgaactacaaacactatgatggctcctacagcacctttggggagcgatatggcaggaaccagggcaacacctggctcacagcctttgttctgaagacttttgcccaagctcgagcctacatcttcatcgatgaagcacacattacccaagccctcatatggctctcccagaggcagaaggacaatggctgtttcaggagctctgggtcactgctcaacaatgccataaagggaggagtagaagatgaagtgaccctctccgcctatatcaccatcgcccttctggagattcctctcacagtcactcaccctgttgtccgcaatgccctgttttgcctggagtcagcctggaagacagcacaagaaggggaccatggcagccatgtatataccaaagcactgctggcctatgcttttgccctggcaggtaaccaggacaagaggaaggaagtactcaagtcacttaatgaggaagctgtgaagaaagacaactctgtccattgggagcgccctcagaaacccaaggcaccagtggggcatttttacgaaccccaggctccctctgctgaggtggagatgacatcctatgtgctcctcgcttatctcacggcccagccagccccaacctcggaggacctgacctctgcaaccaacatcgtgaagtggatcacgaagcagcagaatgcccagggcggtttctcctccacccaggacacagtggtggctctccatgctctgtccaaatatggagcagccacatttaccaggactgggaaggctgcacaggtgactatccagtcttcagggacattttccagcaaattccaagtggacaacaacaaccgcctgttactgcagcaggtctcattgccagagctgcctggggaatacagcatgaaagtgacaggagaaggatgtgtctacctccagacatccttgaaatacaatattctcccagaaaaggaagagttcccctttgctttaggagtgcagactctgcctcaaacttgtgatgaacccaaagcccacaccagcttccaaatctccctaagtgtcagttacacagggagccgctctgcctccaacatggcgatcgttgatgtgaagatggtctctggcttcattcccctgaagccaacagtgaaaatgcttgaaagatctaaccatgtgagccggacagaagtcagcagcaaccatgtcttgatttaccttgataaggtgtcaaatcagacactgagcttgttcttcacggttctgcaagatgtcccagtaagagatctgaaaccagccatagtgaaagtctatgattactacgagacggatgagtttgcaattgctgagtacaatgctccttgcagcaaagatcttggaaatgcttgaagaccacaaggctgaaaagtgctttgctggagtcctgttctcagagctccacagaagacacgtgtttttgtatctttaaagacttgatgaataaacactttttctggtcaa

SEQ ID NO: 453664 - DNA, 2425 bp, Homo sapiens
tagcaggaccccgagttgaaatgtgtttgggaggggccatgcacgcctggtgcatgttgaagagcctcacacggagaccgtacgaaagtacttccctgagacatggatctgggatttggtggtggtaaactcagcaggtgtggctgaggtaggagtaacagtccctgacaccatcaccgagtggaaggcaggggccttctgcctgtctgaagatgctggacttggtatctcttccactgcctctctccgagccttccagcccttctttgtggagctcacaatgccttactctgtgattcgtggagaggccttcacactcaaggccacggtcctaaactaccttcccaaatgcatccgggtcagtgtgcagctggaagcctctcccgccttcctagctgtcccagtggagaaggaacaagcgcctcactgcatctgtgcaaacgggcggcaaactgtgtcctgggcagtaaccccaaagtcattaggaaatgtgaatttcactgtgagcgcagaggcactagagtctcaagagctgtgtgggactgaggtgccttcagttcctgaacacggaaggaaagacacagtcatcaagcctctgttggttgaacctgaaggactagagaaggaaacaacattcaactccctactttgtccatcaggtggtgaggtttctgaagaattatccctgaaactgccaccaaatgtggtagaagaatctgcccgagcttctgtctcagttttgggagacatattaggctctgccatgcaaaacacacaaaatcttctccagatgccctatggctgtggagagcagaatatggtcctctttgctcctaacatctatgtactggattatctaaatgaaacacagcagcttactccagagatcaagtccaaggccattggctatctcaacactggttaccagagacagttgaactacaaacactatgatggctcctacagcacctttggggagcgatatggcaggaaccagggcaacacctggctcacagcctttgttctgaagacttttgcccaagctcgagcctacatcttcatcgatgaagcacacattacccaagccctcatatggctctcccagaggcagaaggacaatggctgtttcaggagctctgggtcactgctcaacaatgccataaagggaggagtagaagatgaagtgaccctctccgcctatatcaccatcgcccttctggagattcctctcacagtcactcaccctgttgtccgcaatgccctgttttgcctggagtcagcctggaagacagcacaagaaggggaccatggcagccatgtatataccaaagcactgctggcctatgcttttgccctggcaggtaaccaggacaagaggaaggaagtactcaagtcacttaatgaggaagctgtgaagaaagacaactctgtccattgggagcgccctcagaaacccaaggcaccagtggggcatttttacgaaccccaggctccctctgctgaggtggagatgacatcctatgtgctcctcgcttatctcacggcccagccagccccaacctcggaggacctgacctctgcaaccaacatcgtgaagtggatcacgaagcagcagaatgcccagggcggtttctcctccacccaggacacagtggtggctctccatgctctgtccaaatatggagcagccacatttaccaggactgggaaggctgcacaggtgactatccagtcttcagggacattttccagcaaattccaagtggacaacaacaaccgcctgttactgcagcaggtctcattgccagagctgcctggggaatacagcatgaaagtgacaggagaaggatgtgtctacctccagacatccttgaaatacaatattctcccagaaaaggaagagttcccctttgctttaggagtgcagactctgcctcaaacttgtgatgaacccaaagcccacaccagcttccaaatctccctaagtgtcagttacacagggagccgctctgcctccaacatggcgatcgttgatgtgaagatggtctctggcttcattcccctgaagccaacagtgaaaatgcttgaaagatctaaccatgtgagccggacagaagtcagcagcaaccatgtcttgatttaccttgataaggtgtcaaatcagacactgagcttgttcttcacggttctgcaagatgtcccagtaagagatctgaaaccagccatagtgaaagtctatgattactacgagacggatgagtttgcaattgctgagtacaatgctccttgcagcaaagatcttggaaatgcttgaagaccacaaggctgaaaagtgctttgctggagtcctgttctcagagctccacagaagacacgtgtttttgtatctttaaagacttgatgaataaacactttttctggtcaa

SEQ ID NO: 453665 - DNA, 5364 bp, Homo sapiens
  misc_feature (5169)..(5169): n is a, c, g, or t
aggcgttgtgaggagttgtgggggagtgagggagagaagaggttgaaaagcttattagctgctgtacggtaaaagtgagctcttacgggaatgggaatgtagttttagccctccagggattctatttagcccgccaggaattaaccttgactataaataggccatcaatgacctttccagagaatgttcagagacctcaactttgtttagagatcttgtgtgggtggaacttcctgtttgcacacagagcagcataaagcccagttgctttgggaagtgtttgggaccagatggattgtagggagtagggtacaatacagtctgttctcctccagctccttctttctgcaacatggggaagaacaaactccttcatccaagtctggttcttctcctcttggtcctcctgcccacagacgcctcagtctctggaaaaccgcagtatatggttctggtcccctccctgctccacactgagaccactgagaagggctgtgtccttctgagctacctgaatgagacagtgactgtaagtgcttccttggagtctgtcaggggaaacaggagcctcttcactgacctggaggcggagaatgacgtactccactgtgtcgccttcgctgtcccaaagtcttcatccaatgaggaggtaatgttcctcactgtccaagtgaaaggaccaacccaagaatttaagaagcggaccacagtgatggttaagaacgaggacagtctggtctttgtccagacagacaaatcaatctacaaaccagggcagacagtgaaatttcgtgttgtctccatggatgaaaactttcaccccctgaatgagttgattccactagtatacattcaggatcccaaaggaaatcgcatcgcacaatggcagagtttccagttagagggtggcctcaagcaattttcttttcccctctcatcagagcccttccagggctcctacaaggtggtggtacagaagaaatcaggtggaaggacagagcaccctttcaccgtggaggaatttgttcttcccaagtttgaagtacaagtaacagtgccaaagataatcaccatcttggaagaagagatgaatgtatcagtgtgtggcctatacacatatgggaagcctgtccctggacatgtgactgtgagcatttgcagaaagtatagtgacgcttccgactgccacggtgaagattcacaggctttctgtgagaaattcagtggacagctaaacagccatggctgcttctatcagcaagtaaaaaccaaggtcttccagctgaagaggaaggagtatgaaatgaaacttcacactgaggcccagatccaagaagaaggaacagtggtggaattgactggaaggcagtccagtgaaatcacaagaaccataaccaaactctcatttgtgaaagtggactcacactttcgacagggaattcccttctttgggcaggtgcgcctagtagatgggaaaggcgtccctataccaaataaagtcatattcatcagaggaaatgaagcaaactattactccaatgctaccacggatgagcatggccttgtacagttctctatcaacaccaccaatgttatgggtacctctcttactgttagggtcaattacaaggatcgtagtccctgttacggctaccagtgggtgtcagaagaacacgaagaggcacatcacactgcttatcttgtgttctccccaagcaagagctttgtccaccttgagcccatgtctcatgaactaccctgtggccatactcagacagtccaggcacattatattctgaatggaggcaccctgctggggctgaagaagctctccttctattatctgataatggcaaagggaggcattgtccgaactgggactcatggactgcttgtgaagcaggaagacatgaagggccatttttccatctcaatccctgtgaagtcagacattgctcctgtcgctcggttgctcatctatgctgttttacctaccggggacgtgattggggattctgcaaaatatgatgttgaaaattgtctggccaacaaggtggatttgagcttcagcccatcacaaagtctcccagcctcacacgcccacctgcgagtcacagcggctcctcagtccgtctgcgccctccgtgctgtggaccaaagcgtgctgctcatgaagcctgatgctgagctctcggcgtcctcggtttacaacctgctaccagaaaaggacctcactggcttccctgggcctttgaatgaccaggacgatgaagactgcatcaatcgtcataatgtctatattaatggaatcacatatactccagtatcaagtacaaatgaaaaggatatgtacagcttcctagaggacatgggcttaaaggcattcaccaactcaaagattcgtaaacccaaaatgtgtccacagcttcaacagtatgaaatgcatggacctgaaggtctacgtgtaggtttttatgagtcagatgtaatgggaagaggccatgcacgcctggtgcatgttgaagagcctcacacggagaccgtacgaaagtacttccctgagacatggatctgggatttggtggtggtaaactcagcaggtgtggctgaggtaggagtaacagtccctgacaccatcaccgagtggaaggcaggggccttctgcctgtctgaagatgctggacttggtatctcttccactgcctctctccgagccttccagcccttctttgtggagctcacaatgccttactctgtgattcgtggagaggccttcacactcaaggccacggtcctaaactaccttcccaaatgcatccgggtcagtgtgcagctggaagcctctcccgccttcctagctgtcccagtggagaaggaacaagcgcctcactgcatctgtgcaaacgggcggcaaactgtgtcctgggcagtaaccccaaagtcattaggaaatgtgaatttcactgtgagcgcagaggcactagagtctcaagagctgtgtgggactgaggtgccttcagttcctgaacacggaaggaaagacacagtcatcaagcctctgttggttgaacctgaaggactagagaaggaaacaacattcaactccctactttgtccatcaggtggtgaggtttctgaagaattatccctgaaactgccaccaaatgtggtagaagaatctgcccgagcttctgtctcagttttgggagacatattaggctctgccatgcaaaacacacaaaatcttctccagatgccctatggctgtggagagcagaatatggtcctctttgctcctaacatctatgtactggattatctaaatgaaacacagcagcttactccagagatcaagtccaaggccattggctatctcaacactggttaccagagacagttgaactacaaacactatgatggctcctacagcacctttggggagcgatatggcaggaaccagggcaacacctggctcacagcctttgttctgaagacttttgcccaagctcgagcctacatcttcatcgatgaagcacacattacccaagccctcatatggctctcccagaggcagaaggacaatggctgtttcaggagctctgggtcactgctcaacaatgccataaagggaggagtagaagatgaagtgaccctctccgcctatatcaccatcgcccttctggagattcctctcacagtcactcaccctgttgtccgcaatgccctgttttgcctggagtcagcctggaagacagcacaagaaggggaccatggcagccatgtatataccaaagcactgctggcctatgcttttgccctggcaggtaaccaggacaagaggaaggaagtactcaagtcacttaatgaggaagctgtgaagaaagacaactctgtccattgggagcgccctcagaaacccaaggcaccagtggggcatttttacgaaccccaggctccctctgctgaggtggagatgacatcctatgtgctcctcgcttatctcacggcccagccagccccaacctcggaggacctgacctctgcaaccaacatcgtgaagtggatcacgaagcagcagaatgcccagggcggtttctcctccacccaggacacagtggtggctctccatgctctgtccaaatatggagcagccacatttaccaggactgggaaggctgcacaggtgactatccagtcttcagggacattttccagcaaattccaagtggacaacaacaaccgcctgttactgcagcaggtctcattgccagagctgcctggggaatacagcatgaaagtgacaggagaaggatgtgtctacctccagacatccttgaaatacaatattctcccagaaaaggaagagttcccctttgctttaggagtgcagactctgcctcaaacttgtgatgaacccaaagcccacaccagcttccaaatctccctaagtgtcagttacacagggagccgctctgcctccaacatggcgatcgttgatgtgaagatggtctctggcttcattcccctgaagccaacagtgaaaatgcttgaaagatctaaccatgtgagccggacagaagtcagcagcaaccatgtcttgatttaccttgataaggtgtcaaatcagacactgagcttgttcttcacggttctgcaagatgtcccagtaagagatctgaaaccagccatagtgaaagtctatgattactacgagacggatgagtttgcaattgctgagtacaatgctccttgcagcaaagatcttggaaatgcttgaagaccacaaggctgaaaagtgctttgctggagtcctgttctcagagctccacagaagacacgtgtttttgtatctttaaagacttgatgaataaacactttttctggtcaaaaaaaaaaaaaaaaaacaacaaaaaaaaaaaatcttttggggcgcgccctggggcctcggaaaaaggttttttaaaccccactccggttgggcgccgcgcgcccccgttgtggttactgacaccctggggcacaaaggggtcccccgggggaacaccggggcaggacgagggtgctggggtttctcccccccaaaaaaaaacgcgccggggggcaacccggagggtttgtaacacactccgaaagggaggtgggggggacctgcgggggccttaaccgggnggccaggggagccgaaataaatgccgcgcgcgcaggtgtgaacagcagacgcaaagccagagacacaagaacaagctagccgagccaacagcgacaagagacacgatagcgaaccgaacaacacaaaaccacataaagacaacgcacacacacggaacgcagcgagtacacacgaagagaacatgactgagacaa

SEQ ID NO: 453666 - DNA, 1457 bp, Homo sapiens
  misc_feature (5)..(5): n is a, c, g, or t
  misc_feature (18)..(18): n is a, c, g, or t
  misc_feature (56)..(56): n is a, c, g, or t
gcgancggggtggggggnggcggcggggggggggggaccggggggcggcggtaggngcggcacggggcgagcaagctcgagcctacatcttcatcgatgaagcacacattacccaagccctcatatggctctcccagaggcagaaggacaatggctgtttcaggagctctgggtcactgctcaacaatgccataaagggaggagtagaagatgaagtgaccctctccgcctatatcaccatcgcccttctggagattcctctcacagtcactcaccctgttgtccgcaatgccctgttttgcctggagtcagcctggaagacagcacaagaaggggaccatggcagccatgtatataccaaagcactgctggcctatgcttttgccctggcaggtaaccaggacaagaggaaggaagtactcaagtcacttaatgaggaagctgtgaagaaagacaactctgtccattgggagcgccctcagaaacccaaggcaccagtggggcatttttacgaaccccaggctccctctgctgaggtggagatgacatcctatgtgctcctcgcttatctcacggcccagccagccccaacctcggaggacctgacctctgcaaccaacatcgtgaagtggatcacgaagcagcagaatgcccagggcggtttctcctccacccaggacacagtggtggctctccatgctctgtccaaatatggagcagccacatttaccaggactgggaaggctgcacaggtgactatccagtcttcagggacattttccagcaaattccaagtggacaacaacaaccgcctgttactgcagcaggtctcattgccagagctgcctggggaatacagcatgaaagtgacaggagaaggatgtgtctacctccagacatccttgaaatacaatattctcccagaaaaggaagagttcccctttgctttaggagtgcagactctgcctcaaacttgtgatgaacccaaagcccacaccagcttccaaatctccctaagtgtcagttacacagggagccgctctgcctccaacatggcgatcgttgatgtgaagatggtctctggcttcattcccctgaagccaacagtgaaaatgcttgaaagatctaaccatgtgagccggacagaagtcagcagcaaccatgtcttgatttaccttgataaggtgtcaaatcagacactgagcttgttcttcacggttctgcaagatgtcccagtaagagatctgaaaccagccatagtgaaagtctatgattactacgagacggatgagtttgcaattgctgagtacaatgctccttgcagcaaagatcttggaaatgcttgaagaccacaaggctgaaaagtgctttgctggagtcctgttctcagagctccacagaagacacgtgtttttgtatctttaaagacttgatgaataaacactttttctggtcaa

SEQ ID NO: 453667 - DNA, 5180 bp, Homo sapiens
aggcgttgtgaggagttgtgggggagtgagggagagaagaggttgaaaagcttattagctgctgtacggtaaaagtgagctcttacgggaatgggaatgtagttttagccctccagggattctatttagcccgccaggaattaaccttgactataaataggccatcaatgacctttccagagaatgttcagagacctcaactttgtttagagatcttgtgtgggtggaacttcctgtttgcacacagagcagcataaagcccagttgctttgggaagtgtttgggaccagatggattgtagggagtagggtacaatacagtctgttctcctccagctccttctttctgcaacatggggaagaacaaactccttcatccaagtctggttcttctcctcttggtcctcctgcccacagacgcctcagtctctggaaaaccgcagtatatggttctggtcccctccctgctccacactgagaccactgagaagggctgtgtccttctgagctacctgaatgagacagtgactgtaagtgcttccttggagtctgtcaggggaaacaggagcctcttcactgacctggaggcggagaatgacgtactccactgtgtcgccttcgctgtcccaaagtcttcatccaatgaggaggtaatgttcctcactgtccaagtgaaaggaccaacccaagaatttaagaagcggaccacagtgatggttaagaacgaggacagtctggtctttgtccagacagacaaatcaatctacaaaccagggcagacagtgaaatttcgtgttgtctccatggatgaaaactttcaccccctgaatgagttgattccactagtatacattcaggatcccaaaggaaatcgcatcgcacaatggcagagtttccagttagagggtggcctcaagcaattttcttttcccctctcatcagagcccttccagggctcctacaaggtggtggtacagaagaaatcaggtggaaggacagagcaccctttcaccgtggaggaatttgttcttcccaagtttgaagtacaagtaacagtgccaaagataatcaccatcttggaagaagagatgaatgtatcagtgtgtggcctatacacatatgggaagcctgtccctggacatgtgactgtgagcatttgcagaaagtatagtgacgcttccgactgccacggtgaagattcacaggctttctgtgagaaattcagtggacagctaaacagccatggctgcttctatcagcaagtaaaaaccaaggtcttccagctgaagaggaaggagtatgaaatgaaacttcacactgaggcccagatccaagaagaaggaacagtggtggaattgactggaaggcagtccagtgaaatcacaagaaccataaccaaactctcatttgtgaaagtggactcacactttcgacagggaattcccttctttgggcaggtgcgcctagtagatgggaaaggcgtccctataccaaataaagtcatattcatcagaggaaatgaagcaaactattactccaatgctaccacggatgagcatggccttgtacagttctctatcaacaccaccaatgttatgggtacctctcttactgttagggtcaattacaaggatcgtagtccctgttacggctaccagtgggtgtcagaagaacacgaagaggcacatcacactgcttatcttgtgttctccccaagcaagagctttgtccaccttgagcccatgtctcatgaactaccctgtggccatactcagacagtccaggcacattatattctgaatggaggcaccctgctggggctgaagaagctctccttctattatctgataatggcaaagggaggcattgtccgaactgggactcatggactgcttgtgaagcaggaagacatgaagggccatttttccatctcaatccctgtgaagtcagacattgctcctgtcgctcggttgctcatctatgctgttttacctaccggggacgtgattggggattctgcaaaatatgatgttgaaaattgtctggccaacaaggtggatttgagcttcagcccatcacaaagtctcccagcctcacacgcccacctgcgagtcacagcggctcctcagtccgtctgcgccctccgtgctgtggaccaaagcgtgctgctcatgaagcctgatgctgagctctcggcgtcctcggtttacaacctgctaccagaaaaggacctcactggcttccctgggcctttgaatgaccaggacgatgaagactgcatcaatcgtcataatgtctatattaatggaatcacatatactccagtatcaagtacaaatgaaaaggatatgtacagcttcctagaggacatgggcttaaaggcattcaccaactcaaagattcgtaaacccaaaatgtgtccacagcttcaacagtatgaaatgcatggacctgaaggtctacgtgtaggtttttatgagtcagatgtaatgggaagaggccatgcacgcctggtgcatgttgaagagcctcacacggagaccgtacgaaagtacttccctgagacatggatctgggatttggtggtggtaaactcagcaggtgtggctgaggtaggagtaacagtccctgacaccatcaccgagtggaaggcaggggccttctgcctgtctgaagatgctggacttggtatctcttccactgcctctctccgagccttccagcccttctttgtggagctcacaatgccttactctgtgattcgtggagaggccttcacactcaaggccacggtcctaaactaccttcccaaatgcatccgggtcagtgtgcagctggaagcctctcccgccttcctagctgtcccagtggagaaggaacaagcgcctcactgcatctgtgcaaacgggcggcaaactgtgtcctgggcagtaaccccaaagtcattaggaaatgtgaatttcactgtgagcgcagaggcactagagtctcaagagctgtgtgggactgaggtgccttcagttcctgaacacggaaggaaagacacagtcatcaagcctctgttggttgaacctgaaggactagagaaggaaacaacattcaactccctactttgtccatcaggtggtgaggtttctgaagaattatccctgaaactgccaccaaatgtggtagaagaatctgcccgagcttctgtctcagttttgggagacatattaggctctgccatgcaaaacacacaaaatcttctccagatgccctatggctgtggagagcagaatatggtcctctttgctcctaacatctatgtactggattatctaaatgaaacacagcagcttactccagagatcaagtccaaggccattggctatctcaacactggttaccagagacagttgaactacaaacactatgatggctcctacagcacctttggggagcgatatggcaggaaccagggcaacacctggctcacagcctttgttctgaagacttttgcccaagctcgagcctacatcttcatcgatgaagcacacattacccaagccctcatatggctctcccagaggcagaaggacaatggctgtttcaggagctctgggtcactgctcaacaatgccataaagggaggagtagaagatgaagtgaccctctccgcctatatcaccatcgcccttctggagattcctctcacagtcactcaccctgttgtccgcaatgccctgttttgcctggagtcagcctggaagacagcacaagaaggggaccatggcagccatgtatataccaaagcactgctggcctatgcttttgccctggcaggtaaccaggacaagaggaaggaagtactcaagtcacttaatgaggaagctgtgaagaaagacaactctgtccattgggagcgccctcagaaacccaaggcaccagtggggcatttttacgaaccccaggctccctctgctgaggtggagatgacatcctatgtgctcctcgcttatctcacggcccagccagccccaacctcggaggacctgacctctgcaaccaacatcgtgaagtggatcacgaagcagcagaatgcccagggcggtttctcctccacccaggacacagtggtggctctccatgctctgtccaaatatggagcagccacatttaccaggactgggaaggctgcacaggtgactatccagtcttcagggacattttccagcaaattccaagtggacaacaacaaccgcctgttactgcagcaggtctcattgccagagctgcctggggaatacagcatgaaagtgacaggagaaggatgtgtctacctccagacatccttgaaatacaatattctcccagaaaaggaagagttcccctttgctttaggagtgcagactctgcctcaaacttgtgatgaacccaaagcccacaccagcttccaaatctccctaagtgtcagttacacagggagccgctctgcctccaacatggcgatcgttgatgtgaagatggtctctggcttcattcccctgaagccaacagtgaaaatgcttgaaagatctaaccatgtgagccggacagaagtcagcagcaaccatgtcttgatttaccttgataaggtgtcaaatcagacactgagcttgttcttcacggttctgcaagatgtcccagtaagagatctgaaaccagccatagtgaaagtctatgattactacgagacggatgagtttgcaattgctgagtacaatgctccttgcagcaaagatcttggaaatgcttgaagaccacaaggctgaaaagtgctttgctggagtcctgttctcagagctccacagaagacacgtgtttttgtatctttaaagacttgatgaataaacactttttctggtcaaatgtctttccctgtttcctgttcattcaataaatatcattgtacatttccatatgattcccaatagaataccaagattaaacttaaaggaatcaagtgctgaaggacttcagaatacaaaaaaatgatacagtgatgtcggtctgagtaggcttcatgtaaggactgtggggaaagaagaaagtattgggttatgtactaggaaagtgtaaagtgtgtttggttatgggaataccctatgaaaaacccaaagggtgaatttttatgagaaaataaaagactgacttcccaga

SEQ ID NO: 453668 - DNA, 4899 bp, Homo sapiens
aggcgttgtgaggagttgtgggggagtgagggagagaagaggttgaaaagcttattagctgctgtacggtaaaagtgagctcttacgggaatgggaatgtagttttagccctccagggattctatttagcccgccaggaattaaccttgactataaataggccatcaatgacctttccagagaatgttcagagacctcaactttgtttagagatcttgtgtgggtggaacttcctgtttgcacacagagcagcataaagcccagttgctttgggaagtgtttgggaccagatggattgtagggagtagggtacaatacagtctgttctcctccagctccttctttctgcaacatggggaagaacaaactccttcatccaagtctggttcttctcctcttggtcctcctgcccacagacgcctcagtctctggaaaaccgcagtatatggttctggtcccctccctgctccacactgagaccactgagaagggctgtgtccttctgagctacctgaatgagacagtgactgtaagtgcttccttggagtctgtcaggggaaacaggagcctcttcactgacctggaggcggagaatgacgtactccactgtgtcgccttcgctgtcccaaagtcttcatccaatgaggaggtaatgttcctcactgtccaagtgaaaggaccaacccaagaatttaagaagcggaccacagtgatggttaagaacgaggacagtctggtctttgtccagacagacaaatcaatctacaaaccagggcagacagtgaaatttcgtgttgtctccatggatgaaaactttcaccccctgaatgagttgattccactagtatacattcaggatcccaaaggaaatcgcatcgcacaatggcagagtttccagttagagggtggcctcaagcaattttcttttcccctctcatcagagcccttccagggctcctacaaggtggtggtacagaagaaatcaggtggaaggacagagcaccctttcaccgtggaggaatttgttcttcccaagtttgaagtacaagtaacagtgccaaagataatcaccatcttggaagaagagatgaatgtatcagtgtgtggcctatacacatatgggaagcctgtccctggacatgtgactgtgagcatttgcagaaagtatagtgacgcttccgactgccacggtgaagattcacaggctttctgtgagaaattcagtggacagctaaacagccatggctgcttctatcagcaagtaaaaaccaaggtcttccagctgaagaggaaggagtatgaaatgaaacttcacactgaggcccagatccaagaagaaggaacagtggtggaattgactggaaggcagtccagtgaaatcacaagaaccataaccaaactctcatttgtgaaagtggactcacactttcgacagggaattcccttctttgggcaggtgcgcctagtagatgggaaaggcgtccctataccaaataaagtcatattcatcagaggaaatgaagcaaactattactccaatgctaccacggatgagcatggccttgtacagttctctatcaacaccaccaatgttatgggtacctctcttactgttagggtcaattacaaggatcgtagtccctgttacggctaccagtgggtgtcagaagaacacgaagaggcacatcacactgcttatcttgtgttctccccaagcaagagctttgtccaccttgagcccatgtctcatgaactaccctgtggccatactcagacagtccaggcacattatattctgaatggaggcaccctgctggggctgaagaagctctccttctattatctgataatggcaaagggaggcattgtccgaactgggactcatggactgcttgtgaagcaggaagacatgaagggccatttttccatctcaatccctgtgaagtcagacattgctcctgtcgctcggttgctcatctatgctgttttacctaccggggacgtgattggggattctgcaaaatatgatgttgaaaattgtctggccaacaaggtggatttgagcttcagcccatcacaaagtctcccagcctcacacgcccacctgcgagtcacagcggctcctcagtccgtctgcgccctccgtgctgtggaccaaagcgtgctgctcatgaagcctgatgctgagctctcggcgtcctcggtttacaacctgctaccagaaaaggacctcactggcttccctgggcctttgaatgaccaggacgatgaagactgcatcaatcgtcataatgtctatattaatggaatcacatatactccagtatcaagtacaaatgaaaaggatatgtacagcttcctagaggacatgggcttaaaggcattcaccaactcaaagattcgtaaacccaaaatgtgtccacagcttcaacagtatgaaatgcatggacctgaaggtctacgtgtaggtttttatgagtcagatgtaatgggaagaggccatgcacgcctggtgcatgttgaagagcctcacacggagaccgtacgaaagtacttccctgagacatggatctgggatttggtggtggtaaactcagcaggtgtggctgaggtaggagtaacagtccctgacaccatcaccgagtggaaggcaggggccttctgcctgtctgaagatgctggacttggtatctcttccactgcctctctccgagccttccagcccttctttgtggagctcacaatgccttactctgtgattcgtggagaggccttcacactcaaggccacggtcctaaactaccttcccaaatgcatccgggtcagtgtgcagctggaagcctctcccgccttcctagctgtcccagtggagaaggaacaagcgcctcactgcatctgtgcaaacgggcggcaaactgtgtcctgggcagtaaccccaaagtcattaggaaatgtgaatttcactgtgagcgcagaggcactagagtctcaagagctgtgtgggactgaggtgccttcagttcctgaacacggaaggaaagacacagtcatcaagcctctgttggttgaacctgaaggactagagaaggaaacaacattcaactccctactttgtccatcaggtggtgaggtttctgaagaattatccctgaaactgccaccaaatgtggtagaagaatctgcccgagcttctgtctcagttttgggagacatattaggctctgccatgcaaaacacacaaaatcttctccagatgccctatggctgtggagagcagaatatggtcctctttgctcctaacatctatgtactggattatctaaatgaaacacagcagcttactccagagatcaagtccaaggccattggctatctcaacactggttaccagagacagttgaactacaaacactatgatggctcctacagcacctttggggagcgatatggcaggaaccagggcaacacctggctcacagcctttgttctgaagacttttgcccaagctcgagcctacatcttcatcgatgaagcacacattacccaagccctcatatggctctcccagaggcagaaggacaatggctgtttcaggagctctgggtcactgctcaacaatgccataaagggaggagtagaagatgaagtgaccctctccgcctatatcaccatcgcccttctggagattcctctcacagtcactcaccctgttgtccgcaatgccctgttttgcctggagtcagcctggaagacagcacaagaaggggaccatggcagccatgtatataccaaagcactgctggcctatgcttttgccctggcaggtaaccaggacaagaggaaggaagtactcaagtcacttaatgaggaagctgtgaagaaagacaactctgtccattgggagcgccctcagaaacccaaggcaccagtggggcatttttacgaaccccaggctccctctgctgaggtggagatgacatcctatgtgctcctcgcttatctcacggcccagccagccccaacctcggaggacctgacctctgcaaccaacatcgtgaagtggatcacgaagcagcagaatgcccagggcggtttctcctccacccaggacacagtggtggctctccatgctctgtccaaatatggagcagccacatttaccaggactgggaaggctgcacaggtgactatccagtcttcagggacattttccagcaaattccaagtggacaacaacaaccgcctgttactgcagcaggtctcattgccagagctgcctggggaatacagcatgaaagtgacaggagaaggatgtgtctacctccagacatccttgaaatacaatattctcccagaaaaggaagagttcccctttgctttaggagtgcagactctgcctcaaacttgtgatgaacccaaagcccacaccagcttccaaatctccctaagtgtcagttacacagggagccgctctgcctccaacatggcgatcgttgatgtgaagatggtctctggcttcattcccctgaagccaacagtgaaaatgcttgaaagatctaaccatgtgagccggacagaagtcagcagcaaccatgtcttgatttaccttgataaggtgtcaaatcagacactgagcttgttcttcacggttctgcaagatgtcccagtaagagatctgaaaccagccatagtgaaagtctatgattactacgagacggatgagtttgcaattgctgagtacaatgctccttgcagcaaagatcttggaaatgcttgaagaccacaaggctgaaaagtgctttgctggagtcctgttctcagagctccacagaagacacgtcataatataaatctaaataactgatgaataaaaaaaaacacggacaaaaagccaaatga

SEQ ID NO: 453669 - DNA, 4738 bp, Homo sapiens
aggcgttgtgaggagttgtgggggagtgagggagagaagaggttgaaaagcttattagctgctgtacggtaaaagtgagctcttacgggaatgggaatgtagttttagccctccagggattctatttagcccgccaggaattaaccttgactataaataggccatcaatgacctttccagagaatgttcagagacctcaactttgtttagagatcttgtgtgggtggaacttcctgtttgcacacagagcagcataaagcccagttgctttgggaagtgtttgggaccagatggattgtagggagtagggtacaatacagtctgttctcctccagctccttctttctgcaacatggggaagaacaaactccttcatccaagtctggttcttctcctcttggtcctcctgcccacagacgcctcagtctctggaaaaccgcagtatatggttctggtcccctccctgctccacactgagaccactgagaagggctgtgtccttctgagctacctgaatgagacagtgactgtaagtgcttccttggagtctgtcaggggaaacaggagcctcttcactgacctggaggcggagaatgacgtactccactgtgtcgccttcgctgtcccaaagtcttcatccaatgaggaggtaatgttcctcactgtccaagtgaaaggaccaacccaagaatttaagaagcggaccacagtgatggttaagaacgaggacagtctggtctttgtccagacagacaaatcaatctacaaaccagggcagacagtgaaatttcgtgttgtctccatggatgaaaactttcaccccctgaatgagttgattccactagtatacattcaggatcccaaaggaaatcgcatcgcacaatggcagagtttccagttagagggtggcctcaagcaattttcttttcccctctcatcagagcccttccagggctcctacaaggtggtggtacagaagaaatcaggtggaaggacagagcaccctttcaccgtggaggaatttgttcttcccaagtttgaagtacaagtaacagtgccaaagataatcaccatcttggaagaagagatgaatgtatcagtgtgtggcctatacacatatgggaagcctgtccctggacatgtgactgtgagcatttgcagaaagtatagtgacgcttccgactgccacggtgaagattcacaggctttctgtgagaaattcagtggacagctaaacagccatggctgcttctatcagcaagtaaaaaccaaggtcttccagctgaagaggaaggagtatgaaatgaaacttcacactgaggcccagatccaagaagaaggaacagtggtggaattgactggaaggcagtccagtgaaatcacaagaaccataaccaaactctcatttgtgaaagtggactcacactttcgacagggaattcccttctttgggcaggtgcgcctagtagatgggaaaggcgtccctataccaaataaagtcatattcatcagaggaaatgaagcaaactattactccaatgctaccacggatgagcatggccttgtacagttctctatcaacaccaccaatgttatgggtacctctcttactgttagggtcaattacaaggatcgtagtccctgttacggctaccagtgggtgtcagaagaacacgaagaggcacatcacactgcttatcttgtgttctccccaagcaagagctttgtccaccttgagcccatgtctcatgaactaccctgtggccatactcagacagtccaggcacattatattctgaatggaggcaccctgctggggctgaagaagctctccttctattatctgataatggcaaagggaggcattgtccgaactgggactcatggactgcttgtgaagcaggaagacatgaagggccatttttccatctcaatccctgtgaagtcagacattgctcctgtcgctcggttgctcatctatgctgttttacctaccggggacgtgattggggattctgcaaaatatgatgttgaaaattgtctggccaacaaggtggatttgagcttcagcccatcacaaagtctcccagcctcacacgcccacctgcgagtcacagcggctcctcagtccgtctgcgccctccgtgctgtggaccaaagcgtgctgctcatgaagcctgatgctgagctctcggcgtcctcggtttacaacctgctaccagaaaaggacctcactggcttccctgggcctttgaatgaccaggacgatgaagactgcatcaatcgtcataatgtctatattaatggaatcacatatactccagtatcaagtacaaatgaaaaggatatgtacagcttcctagaggacatgggcttaaaggcattcaccaactcaaagattcgtaaacccaaaatgtgtccacagcttcaacagtatgaaatgcatggacctgaaggtctacgtgtaggtttttatgagtcagatgtaatgggaagaggccatgcacgcctggtgcatgttgaagagcctcacacggagaccgtacgaaagtacttccctgagacatggatctgggatttggtggtggtaaactcagcaggtgtggctgaggtaggagtaacagtccctgacaccatcaccgagtggaaggcaggggccttctgcctgtctgaagatgctggacttggtatctcttccactgcctctctccgagccttccagcccttctttgtggagctcacaatgccttactctgtgattcgtggagaggccttcacactcaaggccacggtcctaaactaccttcccaaatgcatccgggtcagtgtgcagctggaagcctctcccgccttcctagctgtcccagtggagaaggaacaagcgcctcactgcatctgtgcaaacgggcggcaaactgtgtcctgggcagtaaccccaaagtcattaggaaatgtgaatttcactgtgagcgcagaggcactagagtctcaagagctgtgtgggactgaggtgccttcagttcctgaacacggaaggaaagacacagtcatcaagcctctgttggttgaacctgaaggactagagaaggaaacaacattcaactccctactttgtccatcaggtggtgaggtttctgaagaattatccctgaaactgccaccaaatgtggtagaagaatctgcccgagcttctgtctcagttttgggagacatattaggctctgccatgcaaaacacacaaaatcttctccagatgccctatggctgtggagagcagaatatggtcctctttgctcctaacatctatgtactggattatctaaatgaaacacagcagcttactccagagatcaagtccaaggccattggctatctcaacactggttaccagagacagttgaactacaaacactatgatggctcctacagcacctttggggagcgatatggcaggaaccagggcaacacctggctcacagcctttgttctgaagacttttgcccaagctcgagcctacatcttcatcgatgaagcacacattacccaagccctcatatggctctcccagaggcagaaggacaatggctgtttcaggagctctgggtcactgctcaacaatgccataaagggaggagtagaagatgaagtgaccctctccgcctatatcaccatcgcccttctggagattcctctcacagtcactcaccctgttgtccgcaatgccctgttttgcctggagtcagcctggaagacagcacaagaaggggaccatggcagccatgtatataccaaagcactgctggcctatgcttttgccctggcaggtaaccaggacaagaggaaggaagtactcaagtcacttaatgaggaagctgtgaagaaagacaactctgtccattgggagcgccctcagaaacccaaggcaccagtggggcatttttacgaaccccaggctccctctgctgaggtggagatgacatcctatgtgctcctcgcttatctcacggcccagccagccccaacctcggaggacctgacctctgcaaccaacatcgtgaagtggatcacgaagcagcagaatgcccagggcggtttctcctccacccaggacacagtggtggctctccatgctctgtccaaatatggagcagccacatttaccaggactgggaaggctgcacaggtgactatccagtcttcagggacattttccagcaaattccaagtggacaacaacaaccgcctgttactgcagcaggtctcattgccagagctgcctggggaatacagcatgaaagtgacaggagaaggatgtgtctacctccagacatccttgaaatacaatattctcccagaaaaggaagagttcccctttgctttaggagtgcagactctgcctcaaacttgtgatgaacccaaagcccacaccagcttccaaatctccctaagtgtcagttacacagggagccgctctgcctccaacatggcgatcgttgatgtgaagatggtctctggcttcattcccctgaagccaacagtgaaaatgcttgaaagatctaaccatgtgagccggacagaagtcagcagcaaccatgtcttgatttaccttgataaggtgtcaaatcagacactgagcttgttcttcacggttctgcaagatgtcccagtaagagatctgaaaccagccatagtgaaagtctatgattactacgagacgggtgagtgagagtgattttca

SEQ ID NO: 453670 - DNA, 4801 bp, Homo sapiens
aggcgttgtgaggagttgtgggggagtgagggagagaagaggttgaaaagcttattagctgctgtacggtaaaagtgagctcttacgggaatgggaatgtagttttagccctccagggattctatttagcccgccaggaattaaccttgactataaataggccatcaatgacctttccagagaatgttcagagacctcaactttgtttagagatcttgtgtgggtggaacttcctgtttgcacacagagcagcataaagcccagttgctttgggaagtgtttgggaccagatggattgtagggagtagggtacaatacagtctgttctcctccagctccttctttctgcaacatggggaagaacaaactccttcatccaagtctggttcttctcctcttggtcctcctgcccacagacgcctcagtctctggaaaaccgcagtatatggttctggtcccctccctgctccacactgagaccactgagaagggctgtgtccttctgagctacctgaatgagacagtgactgtaagtgcttccttggagtctgtcaggggaaacaggagcctcttcactgacctggaggcggagaatgacgtactccactgtgtcgccttcgctgtcccaaagtcttcatccaatgaggaggtaatgttcctcactgtccaagtgaaaggaccaacccaagaatttaagaagcggaccacagtgatggttaagaacgaggacagtctggtctttgtccagacagacaaatcaatctacaaaccagggcagacagtgaaatttcgtgttgtctccatggatgaaaactttcaccccctgaatgagttgattccactagtatacattcaggatcccaaaggaaatcgcatcgcacaatggcagagtttccagttagagggtggcctcaagcaattttcttttcccctctcatcagagcccttccagggctcctacaaggtggtggtacagaagaaatcaggtggaaggacagagcaccctttcaccgtggaggaatttgttcttcccaagtttgaagtacaagtaacagtgccaaagataatcaccatcttggaagaagagatgaatgtatcagtgtgtggcctatacacatatgggaagcctgtccctggacatgtgactgtgagcatttgcagaaagtatagtgacgcttccgactgccacggtgaagattcacaggctttctgtgagaaattcagtggacagctaaacagccatggctgcttctatcagcaagtaaaaaccaaggtcttccagctgaagaggaaggagtatgaaatgaaacttcacactgaggcccagatccaagaagaaggaacagtggtggaattgactggaaggcagtccagtgaaatcacaagaaccataaccaaactctcatttgtgaaagtggactcacactttcgacagggaattcccttctttgggcaggtgcgcctagtagatgggaaaggcgtccctataccaaataaagtcatattcatcagaggaaatgaagcaaactattactccaatgctaccacggatgagcatggccttgtacagttctctatcaacaccaccaatgttatgggtacctctcttactgttagggtcaattacaaggatcgtagtccctgttacggctaccagtgggtgtcagaagaacacgaagaggcacatcacactgcttatcttgtgttctccccaagcaagagctttgtccaccttgagcccatgtctcatgaactaccctgtggccatactcagacagtccaggcacattatattctgaatggaggcaccctgctggggctgaagaagctctccttctattatctgataatggcaaagggaggcattgtccgaactgggactcatggactgcttgtgaagcaggaagacatgaagggccatttttccatctcaatccctgtgaagtcagacattgctcctgtcgctcggttgctcatctatgctgttttacctaccggggacgtgattggggattctgcaaaatatgatgttgaaaattgtctggccaacaaggtggatttgagcttcagcccatcacaaagtctcccagcctcacacgcccacctgcgagtcacagcggctcctcagtccgtctgcgccctccgtgctgtggaccaaagcgtgctgctcatgaagcctgatgctgagctctcggcgtcctcggtttacaacctgctaccagaaaaggacctcactggcttccctgggcctttgaatgaccaggacgatgaagactgcatcaatcgtcataatgtctatattaatggaatcacatatactccagtatcaagtacaaatgaaaaggatatgtacagcttcctagaggacatgggcttaaaggcattcaccaactcaaagattcgtaaacccaaaatgtgtccacagcttcaacagtatgaaatgcatggacctgaaggtctacgtgtaggtttttatgagtcagatgtaatgggaagaggccatgcacgcctggtgcatgttgaagagcctcacacggagaccgtacgaaagtacttccctgagacatggatctgggatttggtggtggtaaactcagcaggtgtggctgaggtaggagtaacagtccctgacaccatcaccgagtggaaggcaggggccttctgcctgtctgaagatgctggacttggtatctcttccactgcctctctccgagccttccagcccttctttgtggagctcacaatgccttactctgtgattcgtggagaggccttcacactcaaggccacggtcctaaactaccttcccaaatgcatccgggtcagtgtgcagctggaagcctctcccgccttcctagctgtcccagtggagaaggaacaagcgcctcactgcatctgtgcaaacgggcggcaaactgtgtcctgggcagtaaccccaaagtcattaggaaatgtgaatttcactgtgagcgcagaggcactagagtctcaagagctgtgtgggactgaggtgccttcagttcctgaacacggaaggaaagacacagtcatcaagcctctgttggttgaacctgaaggactagagaaggaaacaacattcaactccctactttgtccatcaggtggtgaggtttctgaagaattatccctgaaactgccaccaaatgtggtagaagaatctgcccgagcttctgtctcagttttgggagacatattaggctctgccatgcaaaacacacaaaatcttctccagatgccctatggctgtggagagcagaatatggtcctctttgctcctaacatctatgtactggattatctaaatgaaacacagcagcttactccagagatcaagtccaaggccattggctatctcaacactggttaccagagacagttgaactacaaacactatgatggctcctacagcacctttggggagcgatatggcaggaaccagggcaacacctggctcacagcctttgttctgaagacttttgcccaagctcgagcctacatcttcatcgatgaagcacacattacccaagccctcatatggctctcccagaggcagaaggacaatggctgtttcaggagctctgggtcactgctcaacaatgccataaagggaggagtagaagatgaagtgaccctctccgcctatatcaccatcgcccttctggagattcctctcacagtcactcaccctgttgtccgcaatgccctgttttgcctggagtcagcctggaagacagcacaagaaggggaccatggcagccatgtatataccaaagcactgctggcctatgcttttgccctggcaggtaaccaggacaagaggaaggaagtactcaagtcacttaatgaggaagctgtgaagaaagacaactctgtccattgggagcgccctcagaaacccaaggcaccagtggggcatttttacgaaccccaggctccctctgctgaggtggagatgacatcctatgtgctcctcgcttatctcacggcccagccagccccaacctcggaggacctgacctctgcaaccaacatcgtgaagtggatcacgaagcagcagaatgcccagggcggtttctcctccacccaggacacagtggtggctctccatgctctgtccaaatatggagcagccacatttaccaggactgggaaggctgcacaggtgactatccagtcttcagggacattttccagcaaattccaagtggacaacaacaaccgcctgttactgcagcaggtctcattgccagagctgcctggggaatacagcatgaaagtgacaggagaaggatgtgtctacctccagacatccttgaaatacaatattctcccagaaaaggaagagttcccctttgctttaggagtgcagactctgcctcaaacttgtgatgaacccaaagcccacaccagcttccaaatctccctaagtgtcagttacacagggagccgctctgcctccaacatggcgatcgttgatgtgaagatggtctctggcttcattcccctgaagccaacagtgaaaatgcttgaaagatctaaccatgtgagccggacagaagtcagcagcaaccatgtcttgatttaccttgataaggtgtcaaatcagacactgagcttgttcttcacggttctgcaagatgtcccagtaagagatctgaaaccagccatccttgaaatacatattctcccagaaaaggaagagttcccctttgctttaggagtgcagactctgcctcaaacttgtgatgaacccaaccacaccagccaaccgtggactagt

SEQ ID NO: 453671 - DNA, 4819 bp, Homo sapiens
aggcgttgtgaggagttgtgggggagtgagggagagaagaggttgaaaagcttattagctgctgtacggtaaaagtgagctcttacgggaatgggaatgtagttttagccctccagggattctatttagcccgccaggaattaaccttgactataaataggccatcaatgacctttccagagaatgttcagagacctcaactttgtttagagatcttgtgtgggtggaacttcctgtttgcacacagagcagcataaagcccagttgctttgggaagtgtttgggaccagatggattgtagggagtagggtacaatacagtctgttctcctccagctccttctttctgcaacatggggaagaacaaactccttcatccaagtctggttcttctcctcttggtcctcctgcccacagacgcctcagtctctggaaaaccgcagtatatggttctggtcccctccctgctccacactgagaccactgagaagggctgtgtccttctgagctacctgaatgagacagtgactgtaagtgcttccttggagtctgtcaggggaaacaggagcctcttcactgacctggaggcggagaatgacgtactccactgtgtcgccttcgctgtcccaaagtcttcatccaatgaggaggtaatgttcctcactgtccaagtgaaaggaccaacccaagaatttaagaagcggaccacagtgatggttaagaacgaggacagtctggtctttgtccagacagacaaatcaatctacaaaccagggcagacagtgaaatttcgtgttgtctccatggatgaaaactttcaccccctgaatgagttgattccactagtatacattcaggatcccaaaggaaatcgcatcgcacaatggcagagtttccagttagagggtggcctcaagcaattttcttttcccctctcatcagagcccttccagggctcctacaaggtggtggtacagaagaaatcaggtggaaggacagagcaccctttcaccgtggaggaatttgttcttcccaagtttgaagtacaagtaacagtgccaaagataatcaccatcttggaagaagagatgaatgtatcagtgtgtggcctatacacatatgggaagcctgtccctggacatgtgactgtgagcatttgcagaaagtatagtgacgcttccgactgccacggtgaagattcacaggctttctgtgagaaattcagtggacagctaaacagccatggctgcttctatcagcaagtaaaaaccaaggtcttccagctgaagaggaaggagtatgaaatgaaacttcacactgaggcccagatccaagaagaaggaacagtggtggaattgactggaaggcagtccagtgaaatcacaagaaccataaccaaactctcatttgtgaaagtggactcacactttcgacagggaattcccttctttgggcaggtgcgcctagtagatgggaaaggcgtccctataccaaataaagtcatattcatcagaggaaatgaagcaaactattactccaatgctaccacggatgagcatggccttgtacagttctctatcaacaccaccaatgttatgggtacctctcttactgttagggtcaattacaaggatcgtagtccctgttacggctaccagtgggtgtcagaagaacacgaagaggcacatcacactgcttatcttgtgttctccccaagcaagagctttgtccaccttgagcccatgtctcatgaactaccctgtggccatactcagacagtccaggcacattatattctgaatggaggcaccctgctggggctgaagaagctctccttctattatctgataatggcaaagggaggcattgtccgaactgggactcatggactgcttgtgaagcaggaagacatgaagggccatttttccatctcaatccctgtgaagtcagacattgctcctgtcgctcggttgctcatctatgctgttttacctaccggggacgtgattggggattctgcaaaatatgatgttgaaaattgtctggccaacaaggtggatttgagcttcagcccatcacaaagtctcccagcctcacacgcccacctgcgagtcacagcggctcctcagtccgtctgcgccctccgtgctgtggaccaaagcgtgctgctcatgaagcctgatgctgagctctcggcgtcctcggtttacaacctgctaccagaaaaggacctcactggcttccctgggcctttgaatgaccaggacgatgaagactgcatcaatcgtcataatgtctatattaatggaatcacatatactccagtatcaagtacaaatgaaaaggatatgtacagcttcctagaggacatgggcttaaaggcattcaccaactcaaagattcgtaaacccaaaatgtgtccacagcttcaacagtatgaaatgcatggacctgaaggtctacgtgtaggtttttatgagtcagatgtaatgggaagaggccatgcacgcctggtgcatgttgaagagcctcacacggagaccgtacgaaagtacttccctgagacatggatctgggatttggtggtggtaaactcagcaggtgtggctgaggtaggagtaacagtccctgacaccatcaccgagtggaaggcaggggccttctgcctgtctgaagatgctggacttggtatctcttccactgcctctctccgagccttccagcccttctttgtggagctcacaatgccttactctgtgattcgtggagaggccttcacactcaaggccacggtcctaaactaccttcccaaatgcatccgggtcagtgtgcagctggaagcctctcccgccttcctagctgtcccagtggagaaggaacaagcgcctcactgcatctgtgcaaacgggcggcaaactgtgtcctgggcagtaaccccaaagtcattaggaaatgtgaatttcactgtgagcgcagaggcactagagtctcaagagctgtgtgggactgaggtgccttcagttcctgaacacggaaggaaagacacagtcatcaagcctctgttggttgaacctgaaggactagagaaggaaacaacattcaactccctactttgtccatcaggtggtgaggtttctgaagaattatccctgaaactgccaccaaatgtggtagaagaatctgcccgagcttctgtctcagttttgggagacatattaggctctgccatgcaaaacacacaaaatcttctccagatgccctatggctgtggagagcagaatatggtcctctttgctcctaacatctatgtactggattatctaaatgaaacacagcagcttactccagagatcaagtccaaggccattggctatctcaacactggttaccagagacagttgaactacaaacactatgatggctcctacagcacctttggggagcgatatggcaggaaccagggcaacacctggctcacagcctttgttctgaagacttttgcccaagctcgagcctacatcttcatcgatgaagcacacattacccaagccctcatatggctctcccagaggcagaaggacaatggctgtttcaggagctctgggtcactgctcaacaatgccataaagggaggagtagaagatgaagtgaccctctccgcctatatcaccatcgcccttctggagattcctctcacagtcactcaccctgttgtccgcaatgccctgttttgcctggagtcagcctggaagacagcacaagaaggggaccatggcagccatgtatataccaaagcactgctggcctatgcttttgccctggcaggtaaccaggacaagaggaaggaagtactcaagtcacttaatgaggaagctgtgaagaaagacaactctgtccattgggagcgccctcagaaacccaaggcaccagtggggcatttttacgaaccccaggctccctctgctgaggtggagatgacatcctatgtgctcctcgcttatctcacggcccagccagccccaacctcggaggacctgacctctgcaaccaacatcgtgaagtggatcacgaagcagcagaatgcccagggcggtttctcctccacccaggacacagtggtggctctccatgctctgtccaaatatggagcagccacatttaccaggactgggaaggctgcacaggtgactatccagtcttcagggacattttccagcaaattccaagtggacaacaacaaccgcctgttactgcagcaggtctcattgccagagctgcctggggaatacagcatgaaagtgacaggagaaggatgtgtctacctccagacatccttgaaatacaatattctcccagaaaaggaagagttcccctttgctttaggagtgcagactctgcctcaaacttgtgatgaacccaaagcccacaccagcttccaaatctccctaagtgtcagttacacagggagccgctctgcctccaacatggcgatcgttgatgtgaagatggtctctggcttcattcccctgaagccaacagtgaaaatggtgtcaaatcagacactgagcttgttcttcacggttctgcaagatgtcccagtaagagatctgaaaccagccatagtgaaagtctatgattactacgagacggatgagtttgcaattgctgagtacaatgctccttgcagcaaagatcttggaaatgcttgaagaccacaaggctgaaaagtgctttgctggagtcctgttctcagagctccacagaagacacgtgtttttgtatctttaaagacttgatgaataaacactttttctggtcaa

SEQ ID NO: 453672 - DNA, 4796 bp, Homo sapiens
aggcgttgtgaggagttgtgggggagtgagggagagaagaggttgaaaagcttattagctgctgtacggtaaaagtgagctcttacgggaatgggaatgtagttttagccctccagggattctatttagcccgccaggaattaaccttgactataaataggccatcaatgacctttccagagaatgttcagagacctcaactttgtttagagatcttgtgtgggtggaacttcctgtttgcacacagagcagcataaagcccagttgctttgggaagtgtttgggaccagatggattgtagggagtagggtacaatacagtctgttctcctccagctccttctttctgcaacatggggaagaacaaactccttcatccaagtctggttcttctcctcttggtcctcctgcccacagacgcctcagtctctggaaaaccgcagtatatggttctggtcccctccctgctccacactgagaccactgagaagggctgtgtccttctgagctacctgaatgagacagtgactgtaagtgcttccttggagtctgtcaggggaaacaggagcctcttcactgacctggaggcggagaatgacgtactccactgtgtcgccttcgctgtcccaaagtcttcatccaatgaggaggtaatgttcctcactgtccaagtgaaaggaccaacccaagaatttaagaagcggaccacagtgatggttaagaacgaggacagtctggtctttgtccagacagacaaatcaatctacaaaccagggcagacagtgaaatttcgtgttgtctccatggatgaaaactttcaccccctgaatgagttgattccactagtatacattcaggatcccaaaggaaatcgcatcgcacaatggcagagtttccagttagagggtggcctcaagcaattttcttttcccctctcatcagagcccttccagggctcctacaaggtggtggtacagaagaaatcaggtggaaggacagagcaccctttcaccgtggaggaatttgttcttcccaagtttgaagtacaagtaacagtgccaaagataatcaccatcttggaagaagagatgaatgtatcagtgtgtggcctatacacatatgggaagcctgtccctggacatgtgactgtgagcatttgcagaaagtatagtgacgcttccgactgccacggtgaagattcacaggctttctgtgagaaattcagtggacagctaaacagccatggctgcttctatcagcaagtaaaaaccaaggtcttccagctgaagaggaaggagtatgaaatgaaacttcacactgaggcccagatccaagaagaaggaacagtggtggaattgactggaaggcagtccagtgaaatcacaagaaccataaccaaactctcatttgtgaaagtggactcacactttcgacagggaattcccttctttgggcaggtgcgcctagtagatgggaaaggcgtccctataccaaataaagtcatattcatcagaggaaatgaagcaaactattactccaatgctaccacggatgagcatggccttgtacagttctctatcaacaccaccaatgttatgggtacctctcttactgttagggtcaattacaaggatcgtagtccctgttacggctaccagtgggtgtcagaagaacacgaagaggcacatcacactgcttatcttgtgttctccccaagcaagagctttgtccaccttgagcccatgtctcatgaactaccctgtggccatactcagacagtccaggcacattatattctgaatggaggcaccctgctggggctgaagaagctctccttctattatctgataatggcaaagggaggcattgtccgaactgggactcatggactgcttgtgaagcaggaagacatgaagggccatttttccatctcaatccctgtgaagtcagacattgctcctgtcgctcggttgctcatctatgctgttttacctaccggggacgtgattggggattctgcaaaatatgatgttgaaaattgtctggccaacaaggtggatttgagcttcagcccatcacaaagtctcccagcctcacacgcccacctgcgagtcacagcggctcctcagtccgtctgcgccctccgtgctgtggaccaaagcgtgctgctcatgaagcctgatgctgagctctcggcgtcctcggtttacaacctgctaccagaaaaggacctcactggcttccctgggcctttgaatgaccaggacgatgaagactgcatcaatcgtcataatgtctatattaatggaatcacatatactccagtatcaagtacaaatgaaaaggatatgtacagcttcctagaggacatgggcttaaaggcattcaccaactcaaagattcgtaaacccaaaatgtgtccacagcttcaacagtatgaaatgcatggacctgaaggtctacgtgtaggtttttatgagtcagatgtaatgggaagaggccatgcacgcctggtgcatgttgaagagcctcacacggagaccgtacgaaagtacttccctgagacatggatctgggatttggtggtggtaaactcagcaggtgtggctgaggtaggagtaacagtccctgacaccatcaccgagtggaaggcaggggccttctgcctgtctgaagatgctggacttggtatctcttccactgcctctctccgagccttccagcccttctttgtggagctcacaatgccttactctgtgattcgtggagaggccttcacactcaaggccacggtcctaaactaccttcccaaatgcatccgggtcagtgtgcagctggaagcctctcccgccttcctagctgtcccagtggagaaggaacaagcgcctcactgcatctgtgcaaacgggcggcaaactgtgtcctgggcagtaaccccaaagtcattaggaaatgtgaatttcactgtgagcgcagaggcactagagtctcaagagctgtgtgggactgaggtgccttcagttcctgaacacggaaggaaagacacagtcatcaagcctctgttggttgaacctgaaggactagagaaggaaacaacattcaactccctactttgtccatcaggtggtgaggtttctgaagaattatccctgaaactgccaccaaatgtggtagaagaatctgcccgagcttctgtctcagttttgggagacatattaggctctgccatgcaaaacacacaaaatcttctccagatgccctatggctgtggagagcagaatatggtcctctttgctcctaacatctatgtactggattatctaaatgaaacacagcagcttactccagagatcaagtccaaggccattggctatctcaacactggttaccagagacagttgaactacaaacactatgatggctcctacagcacctttggggagcgatatggcaggaaccagggcaacacctggctcacagcctttgttctgaagacttttgcccaagctcgagcctacatcttcatcgatgaagcacacattacccaagccctcatatggctctcccagaggcagaaggacaatggctgtttcaggagctctgggtcactgctcaacaatgccataaagggaggagtagaagatgaagtgaccctctccgcctatatcaccatcgcccttctggagattcctctcacagtcactcaccctgttgtccgcaatgccctgttttgcctggagtcagcctggaagacagcacaagaaggggaccatggcagccatgtatataccaaagcactgctggcctatgcttttgccctggcaggtaaccaggacaagaggaaggaagtactcaagtcacttaatgaggaagctgtgaagaaagacaactctgtccattgggagcgccctcagaaacccaaggcaccagtggggcatttttacgaaccccaggctccctctgctgaggtggagatgacatcctatgtgctcctcgcttatctcacggcccagccagccccaacctcggaggacctgacctctgcaaccaacatcgtgaagtggatcacgaagcagcagaatgcccagggcggtttctcctccacccaggacacagtggtggctctccatgctctgtccaaatatggagcagccacatttaccaggactgggaaggctgcacaggtgactatccagtcttcagggacattttccagcaaattccaagtggacaacaacaaccgcctgttactgcagcaggtctcattgccagagctgcctggggaatacagcatgaaagtgacaggagaaggatgtgtctacctccagaaaaccctaatcctttcctctccctggagtcctcagttacacagggagccgctctgcctccaacatggcgatcgttgatgtgaagatggtctctggcttcattcccctgaagccaacagtgaaaatgcttgaaagatctaaccatgtgagccggacagaagtcagcagcaaccatgtcttgatttaccttgataaggtgtcaaatcagacactgagcttgttcttcacggttctgcaagatgtcccagtaagagatctgaaaccagccatagtgaaagtctatgattactacgagacggatgagtttgcaattgctgagtacaatgctccttgcagcaaagatcttggaaatgcttgaagaccacaaggctgaaaagtgctttgctggagtcctgttctcagagctccacagaagacacgtgtttttgtatctttaaagacttgatgaataaacactttttctggtcaa

SEQ ID NO: 453673 - DNA, 4912 bp, Homo sapiens
aggcgttgtgaggagttgtgggggagtgagggagagaagaggttgaaaagcttattagctgctgtacggtaaaagtgagctcttacgggaatgggaatgtagttttagccctccagggattctatttagcccgccaggaattaaccttgactataaataggccatcaatgacctttccagagaatgttcagagacctcaactttgtttagagatcttgtgtgggtggaacttcctgtttgcacacagagcagcataaagcccagttgctttgggaagtgtttgggaccagatggattgtagggagtagggtacaatacagtctgttctcctccagctccttctttctgcaacatggggaagaacaaactccttcatccaagtctggttcttctcctcttggtcctcctgcccacagacgcctcagtctctggaaaaccgcagtatatggttctggtcccctccctgctccacactgagaccactgagaagggctgtgtccttctgagctacctgaatgagacagtgactgtaagtgcttccttggagtctgtcaggggaaacaggagcctcttcactgacctggaggcggagaatgacgtactccactgtgtcgccttcgctgtcccaaagtcttcatccaatgaggaggtaatgttcctcactgtccaagtgaaaggaccaacccaagaatttaagaagcggaccacagtgatggttaagaacgaggacagtctggtctttgtccagacagacaaatcaatctacaaaccagggcagacagtgaaatttcgtgttgtctccatggatgaaaactttcaccccctgaatgagttgattccactagtatacattcaggatcccaaaggaaatcgcatcgcacaatggcagagtttccagttagagggtggcctcaagcaattttcttttcccctctcatcagagcccttccagggctcctacaaggtggtggtacagaagaaatcaggtggaaggacagagcaccctttcaccgtggaggaatttgttcttcccaagtttgaagtacaagtaacagtgccaaagataatcaccatcttggaagaagagatgaatgtatcagtgtgtggcctatacacatatgggaagcctgtccctggacatgtgactgtgagcatttgcagaaagtatagtgacgcttccgactgccacggtgaagattcacaggctttctgtgagaaattcagtggacagctaaacagccatggctgcttctatcagcaagtaaaaaccaaggtcttccagctgaagaggaaggagtatgaaatgaaacttcacactgaggcccagatccaagaagaaggaacagtggtggaattgactggaaggcagtccagtgaaatcacaagaaccataaccaaactctcatttgtgaaagtggactcacactttcgacagggaattcccttctttgggcaggtgcgcctagtagatgggaaaggcgtccctataccaaataaagtcatattcatcagaggaaatgaagcaaactattactccaatgctaccacggatgagcatggccttgtacagttctctatcaacaccaccaatgttatgggtacctctcttactgttagggtcaattacaaggatcgtagtccctgttacggctaccagtgggtgtcagaagaacacgaagaggcacatcacactgcttatcttgtgttctccccaagcaagagctttgtccaccttgagcccatgtctcatgaactaccctgtggccatactcagacagtccaggcacattatattctgaatggaggcaccctgctggggctgaagaagctctccttctattatctgataatggcaaagggaggcattgtccgaactgggactcatggactgcttgtgaagcaggaagacatgaagggccatttttccatctcaatccctgtgaagtcagacattgctcctgtcgctcggttgctcatctatgctgttttacctaccggggacgtgattggggattctgcaaaatatgatgttgaaaattgtctggccaacaaggtggatttgagcttcagcccatcacaaagtctcccagcctcacacgcccacctgcgagtcacagcggctcctcagtccgtctgcgccctccgtgctgtggaccaaagcgtgctgctcatgaagcctgatgctgagctctcggcgtcctcggtttacaacctgctaccagaaaaggacctcactggcttccctgggcctttgaatgaccaggacgatgaagactgcatcaatcgtcataatgtctatattaatggaatcacatatactccagtatcaagtacaaatgaaaaggatatgtacagcttcctagaggacatgggcttaaaggcattcaccaactcaaagattcgtaaacccaaaatgtgtccacagcttcaacagtatgaaatgcatggacctgaaggtctacgtgtaggtttttatgagtcagatgtaatgggaagaggccatgcacgcctggtgcatgttgaagagcctcacacggagaccgtacgaaagtacttccctgagacatggatctgggatttggtggtggtaaactcagcaggtgtggctgaggtaggagtaacagtccctgacaccatcaccgagtggaaggcaggggccttctgcctgtctgaagatgctggacttggtatctcttccactgcctctctccgagccttccagcccttctttgtggagctcacaatgccttactctgtgattcgtggagaggccttcacactcaaggccacggtcctaaactaccttcccaaatgcatccgggtcagtgtgcagctggaagcctctcccgccttcctagctgtcccagtggagaaggaacaagcgcctcactgcatctgtgcaaacgggcggcaaactgtgtcctgggcagtaaccccaaagtcattaggaaatgtgaatttcactgtgagcgcagaggcactagagtctcaagagctgtgtgggactgaggtgccttcagttcctgaacacggaaggaaagacacagtcatcaagcctctgttggttgaacctgaaggactagagaaggaaacaacattcaactccctactttgtccatcaggtggtgaggtttctgaagaattatccctgaaactgccaccaaatgtggtagaagaatctgcccgagcttctgtctcagttttgggagacatattaggctctgccatgcaaaacacacaaaatcttctccagatgccctatggctgtggagagcagaatatggtcctctttgctcctaacatctatgtactggattatctaaatgaaacacagcagcttactccagagatcaagtccaaggccattggctatctcaacactggttaccagagacagttgaactacaaacactatgatggctcctacagcacctttggggagcgatatggcaggaaccagggcaacacctggctcacagcctttgttctgaagacttttgcccaagctcgagcctacatcttcatcgatgaagcacacattacccaagccctcatatggctctcccagaggcagaaggacaatggctgtttcaggagctctgggtcactgctcaacaatgccataaagggaggagtagaagatgaagtgaccctctccgcctatatcaccatcgcccttctggagattcctctcacagtcactcaccctgttgtccgcaatgccctgttttgcctggagtcagcctggaagacagcacaagaaggggaccatggcagccatgtatataccaaagcactgctggcctatgcttttgccctggcaggtaaccaggacaagaggaaggaagtactcaagtcacttaatgaggaagctgtgaagaaagacaactctgtccattgggagcgccctcagaaacccaaggcaccagtggggcatttttacgaaccccaggctccctctgctgaggtggagatgacatcctatgtgctcctcgcttatctcacggcccagccagccccaacctcggaggacctgacctctgcaaccaacatcgtgaagtggatcacgaagcagcagaatgcccagggcggtttctcctccacccaggacacagtggtggctctccatgctctgtccaaatatggagcagccacatttaccaggactgggaaggctgcacaggtgactatccagtcttcagggacattttccagcaaattccaagtggacaacaacaaccgcctgttactgcagcaggtctcattgccagagctgcctggggaatacagcatgaaagtgacaggagaaggatgtgtctacctccaggtgagactcttgggcaggtgaggacaggacagatgaggacagcagctgttctctctgagaagtcctaactcagaaaacaatgggacagatcagagaaagggttagggacgtggacaggaattctgggaaagggcaaaaaactgattttgtctttgatgttctatagacatccttgaaatacaatattctcccagatgaacccaaagcccacaccagcttccaaatctccctaagtgtcaggtaagaccttctgactctatcacctaatcctaagaataaccaccagtcttctttcgggaactcctctttaagtaaagcagtgcaacagtagatatttgcactattcacaaaaaatgcaatgtattctcttaagttgatataatttctcaatgatggggtttacattgtccatccaggatctactattgtgcaacctcattgtttaaagggtaataatttccctcaataacaactaagtaaatattacccattgcctctgacctgaattccttgttatgtaatgaaatcctatattattcttgctttattgaagatagagatgaagaattattgaaaagtttgaat

SEQ ID NO: 453674 - DNA, 3657 bp, Homo sapiens
aggcgttgtgaggagttgtgggggagtgagggagagaagaggttgaaaagcttattagctgctgtacggtaaaagtgagctcttacgggaatgggaatgtagttttagccctccagggattctatttagcccgccaggaattaaccttgactataaataggccatcaatgacctttccagagaatgttcagagacctcaactttgtttagagatcttgtgtgggtggaacttcctgtttgcacacagagcagcataaagcccagttgctttgggaagtgtttgggaccagatggattgtagggagtagggtacaatacagtctgttctcctccagctccttctttctgcaacatggggaagaacaaactccttcatccaagtctggttcttctcctcttggtcctcctgcccacagacgcctcagtctctggaaaaccgcagtatatggttctggtcccctccctgctccacactgagaccactgagaagggctgtgtccttctgagctacctgaatgagacagtgactgtaagtgcttccttggagtctgtcaggggaaacaggagcctcttcactgacctggaggcggagaatgacgtactccactgtgtcgccttcgctgtcccaaagtcttcatccaatgaggaggtaatgttcctcactgtccaagtgaaaggaccaacccaagaatttaagaagcggaccacagtgatggttaagaacgaggacagtctggtctttgtccagacagacaaatcaatctacaaaccagggcagacagtgaaatttcgtgttgtctccatggatgaaaactttcaccccctgaatgagttgattccactagtatacattcaggatcccaaaggaaatcgcatcgcacaatggcagagtttccagttagagggtggcctcaagcaattttcttttcccctctcatcagagcccttccagggctcctacaaggtggtggtacagaagaaatcaggtggaaggacagagcaccctttcaccgtggaggaatttgttcttcccaagtttgaagtacaagtaacagtgccaaagataatcaccatcttggaagaagagatgaatgtatcagtgtgtggcctatacacatatgggaagcctgtccctggacatgtgactgtgagcatttgcagaaagtatagtgacgcttccgactgccacggtgaagattcacaggctttctgtgagaaattcagtggacagctaaacagccatggctgcttctatcagcaagtaaaaaccaaggtcttccagctgaagaggaaggagtatgaaatgaaacttcacactgaggcccagatccaagaagaaggaacagtggtggaattgactggaaggcagtccagtgaaatcacaagaaccataaccaaactctcatttgtgaaagtggactcacactttcgacagggaattcccttctttgggcaggtgcgcctagtagatgggaaaggcgtccctataccaaataaagtcatattcatcagaggaaatgaagcaaactattactccaatgctaccacggatgagcatggccttgtacagttctctatcaacaccaccaatgttatgggtacctctcttactgttagggtcaattacaaggatcgtagtccctgttacggctaccagtgggtgtcagaagaacacgaagaggcacatcacactgcttatcttgtgttctccccaagcaagagctttgtccaccttgagcccatgtctcatgaactaccctgtggccatactcagacagtccaggcacattatattctgaatggaggcaccctgctggggctgaagaagctctccttctattatctgataatggcaaagggaggcattgtccgaactgggactcatggactgcttgtgaagcaggaagacatgaagggccatttttccatctcaatccctgtgaagtcagacattgctcctgtcgctcggttgctcatctatgctgttttacctaccggggacgtgattggggattctgcaaaatatgatgttgaaaattgtctggccaacaaggtggatttgagcttcagcccatcacaaagtctcccagcctcacacgcccacctgcgagtcacagcggctcctcagtccgtctgcgccctccgtgctgtggaccaaagcgtgctgctcatgaagcctgatgctgagctctcggcgtcctcggtttacaacctgctaccagaaaaggacctcactggcttccctgggcctttgaatgaccaggacgatgaagactgcatcaatcgtcataatgtctatattaatggaatcacatatactccagtatcaagtacaaatgaaaaggatatgtacagcttcctagaggacatgggcttaaaggcattcaccaactcaaagattcgtaaacccaaaatgtgtccacagcttcaacagtatgaaatgcatggacctgaaggtctacgtgtaggtttttatgagtcagatgtaatgggaagaggccatgcacgcctggtgcatgttgaagagcctcacacggagaccgtacgaaagtacttccctgagacatggatctgggatttggtggtggtaaactcagcaggtgtggctgaggtaggagtaacagtccctgacaccatcaccgagtggaaggcaggggccttctgcctgtctgaagatgctggacttggtatctcttccactgcctctctccgagccttccagcccttctttgtggagctcacaatgccttactctgtgattcgtggagaggccttcacactcaaggccacggtcctaaactaccttcccaaatgcatccgggtcagtgtgcagctggaagcctctcccgccttcctagctgtcccagtggagaaggaacaagcgcctcactgcatctgtgcaaacgggcggcaaactgtgtcctgggcagtaaccccaaagtcattaggaaatgtgaatttcactgtgagcgcagaggcactagagtctcaagagctgtgtgggactgaggtgccttcagttcctgaacacggaaggaaagacacagtcatcaagcctctgttggttgaacctgaaggactagagaaggaaacaacattcaactccctactttgtccatcaggtggtgaggtttctgaagaattatccctgaaactgccaccaaatgtggtagaagaatctgcccgagcttctgtctcagttttgggagacatattaggctctgccatgcaaaacacacaaaatcttctccagatgccctatggctgtggagagcagaatatggtcctctttgctcctaacatctatgtactggattatctaaatgaaacacagcagcttactccagagatcaagtccaaggccattggctatctcaacactggttaccagagacagttgaactacaaacactatgatggctcctacagcacctttggggagcgatatggcaggaaccagggcaacacctggctcacagcctttgttctgaagacttttgcccaagctcgagcctacatcttcatcttctactcctccctttatggcattgttgagcagtgacccagagctcctgaaacagccattgtccttctgcctctgggagagccatatgagggcttggttaatgtgtgcttcatcggatgaagatgtcgagc

SEQ ID NO: 453675 - DNA, 2968 bp, Homo sapiens
aggcgttgtgaggagttgtgggggagtgagggagagaagaggttgaaaagcttattagctgctgtacggtaaaagtgagctcttacgggaatgggaatgtagttttagccctccagggattctatttagcccgccaggaattaaccttgactataaataggccatcaatgacctttccagagaatgttcagagacctcaactttgtttagagatcttgtgtgggtggaacttcctgtttgcacacagagcagcataaagcccagttgctttgggaagtgtttgggaccagatggattgtagggagtagggtacaatacagtctgttctcctccagctccttctttctgcaacatggggaagaacaaactccttcatccaagtctggttcttctcctcttggtcctcctgcccacagacgcctcagtctctggaaaaccgcagtatatggttctggtcccctccctgctccacactgagaccactgagaagggctgtgtccttctgagctacctgaatgagacagtgactgtaagtgcttccttggagtctgtcaggggaaacaggagcctcttcactgacctggaggcggagaatgacgtactccactgtgtcgccttcgctgtcccaaagtcttcatccaatgaggaggtaatgttcctcactgtccaagtgaaaggaccaacccaagaatttaagaagcggaccacagtgatggttaagaacgaggacagtctggtctttgtccagacagacaaatcaatctacaaaccagggcagacagtgaaatttcgtgttgtctccatggatgaaaactttcaccccctgaatgagttgattccactagtatacattcaggatcccaaaggaaatcgcatcgcacaatggcagagtttccagttagagggtggcctcaagcaattttcttttcccctctcatcagagcccttccagggctcctacaaggtggtggtacagaagaaatcaggtggaaggacagagcaccctttcaccgtggaggaatttgttcttcccaagtttgaagtacaagtaacagtgccaaagataatcaccatcttggaagaagagatgaatgtatcagtgtgtggcctatacacatatgggaagcctgtccctggacatgtgactgtgagcatttgcagaaagtatagtgacgcttccgactgccacggtgaagattcacaggctttctgtgagaaattcagtggacagctaaacagccatggctgcttctatcagcaagtaaaaaccaaggtcttccagctgaagaggaaggagtatgaaatgaaacttcacactgaggcccagatccaagaagaaggaacagtggtggaattgactggaaggcagtccagtgaaatcacaagaaccataaccaaactctcatttgtgaaagtggactcacactttcgacagggaattcccttctttgggcaggtgcgcctagtagatgggaaaggcgtccctataccaaataaagtcatattcatcagaggaaatgaagcaaactattactccaatgctaccacggatgagcatggccttgtacagttctctatcaacaccaccaatgttatgggtacctctcttactgttagggtcaattacaaggatcgtagtccctgttacggctaccagtgggtgtcagaagaacacgaagaggcacatcacactgcttatcttgtgttctccccaagcaagagctttgtccaccttgagcccatgtctcatgaactaccctgtggccatactcagacagtccaggcacattatattctgaatggaggcaccctgctggggctgaagaagctctccttctattatctgataatggcaaagggaggcattgtccgaactgggactcatggactgcttgtgaagcaggaagacatgaagggccatttttccatctcaatccctgtgaagtcagacattgctcctgtcgctcggttgctcatctatgctgttttacctaccggggacgtgattggggattctgcaaaatatgatgttgaaaattgtctggccaacaaggtggatttgagcttcagcccatcacaaagtctcccagcctcacacgcccacctgcgagtcacagcggctcctcagtccgtctgcgccctccgtgctgtggaccaaagcgtgctgctcatgaagcctgatgctgagctctcggcgtcctcggtttacaacctgctaccagaaaaggacctcactggcttccctgggcctttgaatgaccaggacgatgaagactgcatcaatcgtcataatgtctatattaatggaatcacatatactccagtatcaagtacaaatgaaaaggatatgtacagcttcctagaggacatgggcttaaaggcattcaccaactcaaagattcgtaaacccaaaatgtgtccacagcttcaacagtatgaaatgcatggacctgaaggtctacgtgtaggtttttatgagtcagatgtaatgggaagaggccatgcacgcctggtgcatgttgaagagcctcacacggagaccgtacgaaagtacttccctgagacatggatctgggatttggtggtggtaaactcagcaggtgtggctgaggtaggagtaacagtccctgacaccatcaccgagtggaaggcaggggccttctgcctgtctgaagatgctggacttggtatctcttccactgcctctctccgagccttccagcccttctttgtggagctcacaatgccttactctgtgattcgtggagaggccttcacactcaaggccacggtcctaaactaccttcccaaatgcatccgggtcagtgtgcagctggaagcctctcccgccttcctagctgtcccagtggagaaggaacaagcgcctcactgcatctgtgcaaacgggcggcaaactgtgtcctgggcagtaaccccaaagtcattaggtgagcaaaaaactgctaga

SEQ ID NO: 453676 - DNA, 2392 bp, Homo sapiens
  misc_feature (2300)..(2300): n is a, c, g, or t
  misc_feature (2306)..(2306): n is a, c, g, or t
  misc_feature (2313)..(2313): n is a, c, g, or t
  misc_feature (2330)..(2330): n is a, c, g, or t
  misc_feature (2333)..(2334): n is a, c, g, or t
  misc_feature (2339)..(2340): n is a, c, g, or t
  misc_feature (2344)..(2344): n is a, c, g, or t
cacgagagagagagagagagagagagagagagagagagagagagagagagagagagagagaggtagggtacaatacagtctgttctcctccagctccttctttctgcaacatggggaagaacaaactccttcatccaagtctggttcttctcctcttggtcctcctgcccacagacgcctcagtctctggaaaaccgcagtatatggttctggtcccctccctgctccacactgagaccactgagaagggctgtgtccttctgagctacctgaatgagacagtgactgtaagtgcttccttggagtctgtcaggggaaacaggagcctcttcactgacctggaggcggagaatgacgtactccactgtgtcgccttcgctgtcccaaagtcttcatccaatgaggaggtaatgttcctcactgtccaagtgaaaggaccaacccaagaatttaagaagcggaccacagtgatggttaagaacgaggacagtctggtctttgtccagacagacaaatcaatctacaaaccagggcagacagtgaaatttcgtgttgtctccatggatgaaaactttcaccccctgaatgagttgattccactagtatacattcaggatcccaaaggaaatcgcatcgcacaatggcagagtttccagttagagggtggcctcaagcaattttcttttcccctctcatcagagcccttccagggctcctacaaggtggtggtacagaagaaatcaggtggaaggacagagcaccctttcaccgtggaggaatttgttcttcccaagtttgaagtacaagtaacagtgccaaagataatcaccatcttggaagaagagatgaatgtatcagtgtgtggcctatacacatatgggaagcctgtccctggacatgtgactgtgagcatttgcagaaagtatagtgacgcttccgactgccacggtgaagattcacaggctttctgtgagaaattcagtggacagctaaacagccatggctgcttctatcagcaagtaaaaaccaaggtcttccagctgaagaggaaggagtatgaaatgaaacttcacactgaggcccagatccaagaagaaggaacagtggtggaattgactggaaggcagtccagtgaaatcacaagaaccataaccaaactctcatttgtgaaagtggactcacactttcgacagggaattcccttctttgggcaggtgcgcctagtagatgggaaaggcgtccctataccaaataaagtcatattcatcagaggaaatgaagcaaactattactccaatgctaccacggatgagcatggccttgtacagttctctatcaacaccaccaatgttatgggtacctctcttactgttagggtcaattacaaggatcgtagtccctgttacggctaccagtgggtgtcagaagaacacgaagaggcacatcacactgcttatcttgtgttctccccaagcaagagctttgtccaccttgagcccatgtctcatgaactaccctgtggccatactcagacagtccaggcacattatattctgaatggaggcaccctgctggggctgaagaagctctccttctattatctgataatggcaaagggaggcattgtccgaactgggactcatggactgcttgtgaagcaggaagacatgaagggccatttttccatctcaatccctgtgaagtcagacattgctcctgtcgctcggttgctcatctatgctgttttacctaccggggacgtgattggggattctgcaaaatatgatgttgaaaattgtctggccaacaaggtggatttgagcttcagcccatcacaaagtctcccagcctcacacgcccacctgcgagtcacagcggctcctcagtccgtctgcgccctccgtgctgtggaccaaagcgtgctgctcatgaagcctgatgctgagctctcggcgtcctcggtttacaacctgctaccagaaaaggacctcactggcttccctgggcctttgaatgaccaggacgatgaagactgcatcaatcgtcataatgtctatattaatggaatcacatatactccagtatcaagtacaaatgaaaaggatatgtacagcttcctagaggacatgggcttaaaggcattcaccaactcaaagattcgtaaacccaaaatgtgtccacagcttcaacagtatgaaatgcatggacctgaaggtctacgtgtaggtttttatgagtcagatgtaatgggaagaggccatgcacgcctggtgcatgttgaagagcccacacgtgtggcngaggangagtacnagtcctggcacccattnccnntgggnngggncctttcctgtttgaagatcttgcttgggttcttttctgcccttttcgg

SEQ ID NO: 453677 - DNA, 709 bp, Homo sapiens
  misc_feature (709)..(709): n is a, c, g, or t
cacgagagagagagagagagagagagagagagagagagagagagagagagagagagagagaggtagggtacaatacagtctgttctcctccagctccttctttctgcaacatggggaagaacaaactccttcatccaagtctggttcttctcctcttggtcctcctgcccacagacgcctcagtctctggaaaaccgcagtatatggttctggtcccctccctgctccacactgagaccactgagaagggctgtgtccttctgagctacctgaatgagacagtgactgtaagtgcttccttggagtctgtcaggggaaacaggagcctcttcactgacctggaggcggagaatgacgtactccactgtgtcgccttcgctgtcccaaagtcttcatccaatgaggaggtaatgttcctcactgtccaagtgaaaggaccaacccaagaatttaagaagcggaccacagtgatggttaagaacgaggacagtctggtctttgtccagacagacaaatcaatctacaaaccagggcagacagtgaaatttcgtgttgtctccatggatgaaaactttcaccccctgaatgagttgattccactagtatacattcaggatcccaaaggaaatcgcatcgcacatggcagagtttccagttagagggataaggctcccggagggtaaggctcccgcaggatcctctagatcan

SEQ ID NO: 453678 - DNA, 414 bp, Homo sapiens
aaaagctattgtggaataggatcttctacaaggatttaaatataatcctacagaagaggtatcaattatacaggggaatgtcttgtctttgcatggggctcatagagatgtgtgcagacttgcttattgtggttagtgtgtatcaggaacacacacacaggtgttctgaccagctcaggcttgccacagtgagcaactctgtggctagcaaaagagaagtttatttgtgcccagccaaggtggaacacctaacattatgcccctcctgatgtgacttaagaattttacctatttagttttcttgcacaaagtgttaaactggaatttaatcatgaggaaattattagacaaatcctgaatgtagtcattctataagatgattgacttgggcttctcaaaaagtcagtgtcatga

SEQ ID NO: 453679 - DNA, 4569 bp, Homo sapiens
cggaacccggtcgaaagggtcctctctggcgtccttctgcttccgtgggtttctggataggctgcgttttgttctcaggggatgcaagttcttcctttcagggttgaagcgtgagagaggttggtttttgaaacgggagtgtttcaggttattgaggtccaaaaagaaataaagtttttgtttacgtctgtatggcttgtaagatatctcccggggccaattcagcatctctacctggccatcctaacaaggtgatttgtgaaagggtgagacttcagagcctgttccctctcctcccaagtgatcagaacactaccgttcaagaggatgctcacttcaaagctttcttccagagtgaagatagtccaagtcctaagagacagcgcctctctcattcagtctttgattatacatcagcatcaccagctccctcaccaccaatgcgaccatgggagatgacatcaaataggcagcccccttcagttcgaccaagccaacatcacttctcaggggaacgatgcaacacacctgcacgcaacagaagaagtcctcctgtcaggcgccagagaggaagaagggatcgtctgtctcgacataattccattagtcaagatgaaaactatcaccatctcccttacgcacagcagcaagcaatagaggagcctcgagccttccaccctccgaatgtatctccccgtctgctacatcctgctgctcatccaccccagcagaatgcagtcatggttgacatacatgatcagctccatcaaggaacagtccctgtttcttacacagtaacaacagtggcaccacatgggattccactctgcacaggccagcacatccctgcttgtagtacacagcaggtcccaggatgctctgtggttttcagtggacagcacctccctgtctgtagtgtgcctcctccaatgcttcaggcatgttcagttcagcacttaccagtaccatatgctgcattcccaccccttatttctagtgatccatttcttatacatcctcctcacctttctccccatcatcctcctcatttgccaccaccaggccagtttgtccctttccaaacacagcaatcacgatcgcctctgcaaaggatagaaaatgaagtggaactcttaggagaacatcttccagtaggaggttttacttaccctccatcagcccaccccccaacattacctccatcagctcccttgcagttcttaacacatgatcctttgcatcaggaggtgtcctttggagtaccttatcctccatttatgcctcggaggcttacaggacgtagtagataccgatcccagcagccaataccacctcccccttatcatcccagcttactgccatatgtgttatcaatgcttccagtgccacctgcagtgggcccaactttcagctttgaattagatgtagaagatggagaagtagaaaattacgaggccctgttaaacctggcagagcgactgggagaggcaaagcctcgtggactgactaaagcagatattgaacaacttccttcttatcggttcaatcctaacaaccaccagtcagaacagactttgtgtgtagtatgcatgtgtgattttgagtcaaggcagctacttagagtcttaccctgtaaccacgagttccatgccaagtgtgttgacaaatggcttaaggcaaatcgtacttgcccaatttgccgagctgatgcttcagaagtgcatcgggattcagaatgaccaacctaagaagcacaaatttagtttgggtgttcctcatcacatgtatatacggactatccattgaacttaatctgtgtggcttccagccctccctttaccaaaagggtcaatggacctttctttgcactgtgtgacttaatcaactataaaagcttacaattagtcttcacagttatgggattgttatactaaccgtgtgattggaactccaaagactttttctttagcttaattttgtgtgtgcactaacattccctggtttttgtgtgatcattccgagtgttgctgcaagattacagtggacgtgatcttttagcatgtgcttttataaaaagtggtagctacagatgatatagcaatctaccttatatagagccttcagaaactgtgagtggaaatgaatgcgcagcgtatgactgttggtgataagtgtatctgtgtgagtgtgtgcaactacttgtgtgagggcatggtagctaacgtgtgtatgagatcctatataccagcatgtaccaagaatgtgtgtgtagttttaattatgctgcaatgtataatctggtgtgttatttaaacagcactagtactgtacactggtttttttcccttgtgtttgctgttgcacactgattgctgagggtgcatcaattacaagcattgaatactccatccccttccctcccagtgaatggaatgagaaaagccttcttcctttgcttcaggcagctgtcaccttctctttattggtggtcctaagtgggtcacttaagaaaaaaaagtgtaacaaattctcactccatgaacctggtttttttttattctgttgtggaaatttttaaatctccaacttgctgtttccaaaaagaaggtgcaatatcatatatcatcagttagcaatattagcatttcaatcagtgatttgaatgttgatacttttttttcctttacatttccagtaagtttcttacagaaagtacctgtgattttttttaatgtttagatttgtagtctagtctattctgaagatatttgattaatatatttctaagaagaccactagtcccatgaagtctcaccttgttgacttccaccagaacaaaacctgttaattcagcttgacttctcatatgtgttctgtgttcaagctcctgtgggcaactcaattgttttaagaaaactctatttctgttcatattaattcacttgccagactccaattctgaaagttgtctagttcttccttcatcacacgtgcttctcatcgaaaccctggtttcaggatggatcaagtgctgttacagctcatgttccttagacctgatttgttttgatattttactgcctttccttttaatttttgtttgaatgagaaaagtttaatacaacaggtgtccagaatacttgcagtataaatgaagatttggtttttgtataaaaaaataatgctgttaaacaggagttgaccttcatttagttgatgtaatacatagctgtatggggttttttttagtaagttctttgagcataattcactttaaagtcatttttccagcaatgtttaaattactttctcattcttttagtgtattcaacattgtctgcctcttcctgcagttgatgtaattgctttgtttgcaatagcacaagctgcattattccagtcaggactgtgataacttgctgccagccccactcaactttcagttggctctgtgtcagttttccactcagtgttaactacttgttactgccatgctgcttgccctcccttgaagtgtctataagctcatcacagcctagagttaagtaaagtcaattcacagaagcacaattttgccctttgcgagacattgttgcctctatctagtcctacaagtagggttttgcatactgtgtttgcccctagggttgtcagtgcatcagaaatacttctaaatagtggtaaaaatgcacatggttaatgcacatgttacttttaaatcattaggatatccctcacctgttcctgatgaataaaaagtgtgttaaagaccaaaattcttggcataataatcagctacatacaaatcacatatagtttaatcttttttaatgaaaaaaaaatcatgtttaaaatggcaaaagcccatcttatacacttttatatagctgcaaaaaacatcttaactcagctgtgggttttttgtgggttcttgtttgttttttggcatgaattgtcatctttggtgtttttttaacccccagcccctcaaaaaaataaggcctccaggtatcaagatctcatattaggattttctgtccttaattttttgagcaaaatctggaaaatgtgaaagcatatttagattttatatactatctgaaatgtgatttgttaagattcttaaatttgggcctcttagaataattttgaatgagatctaccgactcacttgtgagaatatttttcacagattatctttgggccttttcattagaaagctgtttgtttgtccccctgttggtacatttggttacctcattttgccgtttcagattgtgaaagctcacaggggtgttttttggaatcatttgctgagtcattttctcaaatcatattccattgtatcagttaacatatagttttaaatgtatgtattataaatatctgtaaccaaatcatttgaaggcttgataaatttttaacaaagtttgtacattttttatgaaagttactagtaatgctttactaagtagtgcaatgaatttttatttttaatccctgtgcccaattttggagttgagagggttgttggtaataaatgtatgatgtacacttaaaaaaaaaaat

SEQ ID NO: 453680 - DNA, 4473 bp, Homo sapiens
cgcccccttccccctcggggtggaaacaaagggggttcggcgcgcggtgcggagcctgggggaaaagggaggagcgctccggtggtctggcgcgctgggctcgctagatatctcccggggccaattcagcatctctacctggccatcctaacaaggtgatttgtgaaagggtgagacttcagagcctgttccctctcctcccaagtgatcagaacactaccgttcaagaggatgctcacttcaaagctttcttccagagtgaagatagtccaagtcctaagagacagcgcctctctcattcagtctttgattatacatcagcatcaccagctccctcaccaccaatgcgaccatgggagatgacatcaaataggcagcccccttcagttcgaccaagccaacatcacttctcaggggaacgatgcaacacacctgcacgcaacagaagaagtcctcctgtcaggcgccagagaggaagaagggatcgtctgtctcgacataattccattagtcaagatgaaaactatcaccatctcccttacgcacagcagcaagcaatagaggagcctcgagccttccaccctccgaatgtatctccccgtctgctacatcctgctgctcatccaccccagcagaatgcagtcatggttgacatacatgatcagctccatcaaggaacagtccctgtttcttacacagtaacaacagtggcaccacatgggattccactctgcacaggccagcacatccctgcttgtagtacacagcaggtcccaggatgctctgtggttttcagtggacagcacctccctgtctgtagtgtgcctcctccaatgcttcaggcatgttcagttcagcacttaccagtaccatatgctgcattcccaccccttatttctagtgatccatttcttatacatcctcctcacctttctccccatcatcctcctcatttgccaccaccaggccagtttgtccctttccaaacacagcaatcacgatcgcctctgcaaaggatagaaaatgaagtggaactcttaggagaacatcttccagtaggaggttttacttaccctccatcagcccaccccccaacattacctccatcagctcccttgcagttcttaacacatgatcctttgcatcaggaggtgtcctttggagtaccttatcctccatttatgcctcggaggcttacaggacgtagtagataccgatcccagcagccaataccacctcccccttatcatcccagcttactgccatatgtgttatcaatgcttccagtgccacctgcagtgggcccaactttcagctttgaattagatgtagaagatggagaagtagaaaattacgaggccctgttaaacctggcagagcgactgggagaggcaaagcctcgtggactgactaaagcagatattgaacaacttccttcttatcggttcaatcctaacaaccaccagtcagaacagactttgtgtgtagtatgcatgtgtgattttgagtcaaggcagctacttagagtcttaccctgtaaccacgagttccatgccaagtgtgttgacaaatggcttaaggcaaatcgtacttgcccaatttgccgagctgatgcttcagaagtgcatcgggattcagaatgaccaacctaagaagcacaaatttagtttgggtgttcctcatcacatgtatatacggactatccattgaacttaatctgtgtggcttccagccctccctttaccaaaagggtcaatggacctttctttgcactgtgtgacttaatcaactataaaagcttacaattagtcttcacagttatgggattgttatactaaccgtgtgattggaactccaaagactttttctttagcttaattttgtgtgtgcactaacattccctggtttttgtgtgatcattccgagtgttgctgcaagattacagtggacgtgatcttttagcatgtgcttttataaaaagtggtagctacagatgatatagcaatctaccttatatagagccttcagaaactgtgagtggaaatgaatgcgcagcgtatgactgttggtgataagtgtatctgtgtgagtgtgtgcaactacttgtgtgagggcatggtagctaacgtgtgtatgagatcctatataccagcatgtaccaagaatgtgtgtgtagttttaattatgctgcaatgtataatctggtgtgttatttaaacagcactagtactgtacactggtttttttcccttgtgtttgctgttgcacactgattgctgagggtgcatcaattacaagcattgaatactccatccccttccctcccagtgaatggaatgagaaaagccttcttcctttgcttcaggcagctgtcaccttctctttattggtggtcctaagtgggtcacttaagaaaaaaaagtgtaacaaattctcactccatgaacctggtttttttttattctgttgtggaaatttttaaatctccaacttgctgtttccaaaaagaaggtgcaatatcatatatcatcagttagcaatattagcatttcaatcagtgatttgaatgttgatacttttttttcctttacatttccagtaagtttcttacagaaagtacctgtgattttttttaatgtttagatttgtagtctagtctattctgaagatatttgattaatatatttctaagaagaccactagtcccatgaagtctcaccttgttgacttccaccagaacaaaacctgttaattcagcttgacttctcatatgtgttctgtgttcaagctcctgtgggcaactcaattgttttaagaaaactctatttctgttcatattaattcacttgccagactccaattctgaaagttgtctagttcttccttcatcacacgtgcttctcatcgaaaccctggtttcaggatggatcaagtgctgttacagctcatgttccttagacctgatttgttttgatattttactgcctttccttttaatttttgtttgaatgagaaaagtttaatacaacaggtgtccagaatacttgcagtataaatgaagatttggtttttgtataaaaaaataatgctgttaaacaggagttgaccttcatttagttgatgtaatacatagctgtatggggttttttttagtaagttctttgagcataattcactttaaagtcatttttccagcaatgtttaaattactttctcattcttttagtgtattcaacattgtctgcctcttcctgcagttgatgtaattgctttgtttgcaatagcacaagctgcattattccagtcaggactgtgataacttgctgccagccccactcaactttcagttggctctgtgtcagttttccactcagtgttaactacttgttactgccatgctgcttgccctcccttgaagtgtctataagctcatcacagcctagagttaagtaaagtcaattcacagaagcacaattttgccctttgcgagacattgttgcctctatctagtcctacaagtagggttttgcatactgtgtttgcccctagggttgtcagtgcatcagaaatacttctaaatagtggtaaaaatgcacatggttaatgcacatgttacttttaaatcattaggatatccctcacctgttcctgatgaataaaaagtgtgttaaagaccaaaattcttggcataataatcagctacatacaaatcacatatagtttaatcttttttaatgaaaaaaaaatcatgtttaaaatggcaaaagcccatcttatacacttttatatagctgcaaaaaacatcttaactcagctgtgggttttttgtgggttcttgtttgttttttggcatgaattgtcatctttggtgtttttttaacccccagcccctcaaaaaaataaggcctccaggtatcaagatctcatattaggattttctgtccttaattttttgagcaaaatctggaaaatgtgaaagcatatttagattttatatactatctgaaatgtgatttgttaagattcttaaatttgggcctcttagaataattttgaatgagatctaccgactcacttgtgagaatatttttcacagattatctttgggccttttcattagaaagctgtttgtttgtccccctgttggtacatttggttacctcattttgccgtttcagattgtgaaagctcacaggggtgttttttggaatcatttgctgagtcattttctcaaatcatattccattgtatcagttaacatatagttttaaatgtatgtattataaatatctgtaaccaaatcatttgaaggcttgataaatttttaacaaagtttgtacattttttatgaaagttactagtaatgctttactaagtagtgcaatgaatttttatttttaatccctgtgcccaattttggagttgagagggttgttggtaataaatgtatgatgtacacttaaaaaaaaaaat

SEQ ID NO: 453681 - DNA, 4323 bp, Homo sapiens
cgcccccttccccctcggggtggaaacaaagggggttcggcgcgcggtgcggagcctgggggaaaagggaggagcgctccggtggtctggcgcgctgggctcgctagagtgaagatagtccaagtcctaagagacagcgcctctctcattcagtctttgattatacatcagcatcaccagctccctcaccaccaatgcgaccatgggagatgacatcaaataggcagcccccttcagttcgaccaagccaacatcacttctcaggggaacgatgcaacacacctgcacgcaacagaagaagtcctcctgtcaggcgccagagaggaagaagggatcgtctgtctcgacataattccattagtcaagatgaaaactatcaccatctcccttacgcacagcagcaagcaatagaggagcctcgagccttccaccctccgaatgtatctccccgtctgctacatcctgctgctcatccaccccagcagaatgcagtcatggttgacatacatgatcagctccatcaaggaacagtccctgtttcttacacagtaacaacagtggcaccacatgggattccactctgcacaggccagcacatccctgcttgtagtacacagcaggtcccaggatgctctgtggttttcagtggacagcacctccctgtctgtagtgtgcctcctccaatgcttcaggcatgttcagttcagcacttaccagtaccatatgctgcattcccaccccttatttctagtgatccatttcttatacatcctcctcacctttctccccatcatcctcctcatttgccaccaccaggccagtttgtccctttccaaacacagcaatcacgatcgcctctgcaaaggatagaaaatgaagtggaactcttaggagaacatcttccagtaggaggttttacttaccctccatcagcccaccccccaacattacctccatcagctcccttgcagttcttaacacatgatcctttgcatcaggaggtgtcctttggagtaccttatcctccatttatgcctcggaggcttacaggacgtagtagataccgatcccagcagccaataccacctcccccttatcatcccagcttactgccatatgtgttatcaatgcttccagtgccacctgcagtgggcccaactttcagctttgaattagatgtagaagatggagaagtagaaaattacgaggccctgttaaacctggcagagcgactgggagaggcaaagcctcgtggactgactaaagcagatattgaacaacttccttcttatcggttcaatcctaacaaccaccagtcagaacagactttgtgtgtagtatgcatgtgtgattttgagtcaaggcagctacttagagtcttaccctgtaaccacgagttccatgccaagtgtgttgacaaatggcttaaggcaaatcgtacttgcccaatttgccgagctgatgcttcagaagtgcatcgggattcagaatgaccaacctaagaagcacaaatttagtttgggtgttcctcatcacatgtatatacggactatccattgaacttaatctgtgtggcttccagccctccctttaccaaaagggtcaatggacctttctttgcactgtgtgacttaatcaactataaaagcttacaattagtcttcacagttatgggattgttatactaaccgtgtgattggaactccaaagactttttctttagcttaattttgtgtgtgcactaacattccctggtttttgtgtgatcattccgagtgttgctgcaagattacagtggacgtgatcttttagcatgtgcttttataaaaagtggtagctacagatgatatagcaatctaccttatatagagccttcagaaactgtgagtggaaatgaatgcgcagcgtatgactgttggtgataagtgtatctgtgtgagtgtgtgcaactacttgtgtgagggcatggtagctaacgtgtgtatgagatcctatataccagcatgtaccaagaatgtgtgtgtagttttaattatgctgcaatgtataatctggtgtgttatttaaacagcactagtactgtacactggtttttttcccttgtgtttgctgttgcacactgattgctgagggtgcatcaattacaagcattgaatactccatccccttccctcccagtgaatggaatgagaaaagccttcttcctttgcttcaggcagctgtcaccttctctttattggtggtcctaagtgggtcacttaagaaaaaaaagtgtaacaaattctcactccatgaacctggtttttttttattctgttgtggaaatttttaaatctccaacttgctgtttccaaaaagaaggtgcaatatcatatatcatcagttagcaatattagcatttcaatcagtgatttgaatgttgatacttttttttcctttacatttccagtaagtttcttacagaaagtacctgtgattttttttaatgtttagatttgtagtctagtctattctgaagatatttgattaatatatttctaagaagaccactagtcccatgaagtctcaccttgttgacttccaccagaacaaaacctgttaattcagcttgacttctcatatgtgttctgtgttcaagctcctgtgggcaactcaattgttttaagaaaactctatttctgttcatattaattcacttgccagactccaattctgaaagttgtctagttcttccttcatcacacgtgcttctcatcgaaaccctggtttcaggatggatcaagtgctgttacagctcatgttccttagacctgatttgttttgatattttactgcctttccttttaatttttgtttgaatgagaaaagtttaatacaacaggtgtccagaatacttgcagtataaatgaagatttggtttttgtataaaaaaataatgctgttaaacaggagttgaccttcatttagttgatgtaatacatagctgtatggggttttttttagtaagttctttgagcataattcactttaaagtcatttttccagcaatgtttaaattactttctcattcttttagtgtattcaacattgtctgcctcttcctgcagttgatgtaattgctttgtttgcaatagcacaagctgcattattccagtcaggactgtgataacttgctgccagccccactcaactttcagttggctctgtgtcagttttccactcagtgttaactacttgttactgccatgctgcttgccctcccttgaagtgtctataagctcatcacagcctagagttaagtaaagtcaattcacagaagcacaattttgccctttgcgagacattgttgcctctatctagtcctacaagtagggttttgcatactgtgtttgcccctagggttgtcagtgcatcagaaatacttctaaatagtggtaaaaatgcacatggttaatgcacatgttacttttaaatcattaggatatccctcacctgttcctgatgaataaaaagtgtgttaaagaccaaaattcttggcataataatcagctacatacaaatcacatatagtttaatcttttttaatgaaaaaaaaatcatgtttaaaatggcaaaagcccatcttatacacttttatatagctgcaaaaaacatcttaactcagctgtgggttttttgtgggttcttgtttgttttttggcatgaattgtcatctttggtgtttttttaacccccagcccctcaaaaaaataaggcctccaggtatcaagatctcatattaggattttctgtccttaattttttgagcaaaatctggaaaatgtgaaagcatatttagattttatatactatctgaaatgtgatttgttaagattcttaaatttgggcctcttagaataattttgaatgagatctaccgactcacttgtgagaatatttttcacagattatctttgggccttttcattagaaagctgtttgtttgtccccctgttggtacatttggttacctcattttgccgtttcagattgtgaaagctcacaggggtgttttttggaatcatttgctgagtcattttctcaaatcatattccattgtatcagttaacatatagttttaaatgtatgtattataaatatctgtaaccaaatcatttgaaggcttgataaatttttaacaaagtttgtacattttttatgaaagttactagtaatgctttactaagtagtgcaatgaatttttatttttaatccctgtgcccaattttggagttgagagggttgttggtaataaatgtatgatgtacacttaaaaaaaaaaat

SEQ ID NO: 453682 - DNA, 5100 bp, Homo sapiens
cggaacccggtcgaaagggtcctctctggcgtccttctgcttccgtgggtttctggataggctgcgttttgttctcaggggatgcaagttcttcctttcagggttgaagcgtgagagaggttggtttttgaaacgggagtgtttcaggttattgaggtccaaaaagaaataaagtttttgtttacgtctgtatggcttgtaagatatctcccggggccaattcagcatctctacctggccatcctaacaaggtgatttgtgaaagggtgagacttcagagcctgttccctctcctcccaagtgatcagaacactaccgttcaagaggatgctcacttcaaagctttcttccagagtgaagatagtccaagtcctaagagacagcgcctctctcattcagtctttgattatacatcagcatcaccagctccctcaccaccaatgcgaccatgggagatgacatcaaataggcagcccccttcagttcgaccaagccaacatcacttctcaggggaacgatgcaacacacctgcacgcaacagaagaagtcctcctgtcaggcgccagagaggaagaagggatcgtctgtctcgacataattccattagtcaagatgaaaactatcaccatctcccttacgcacagcagcaagcaatagaggagcctcgagccttccaccctccgaatgtatctccccgtctgctacatcctgctgctcatccaccccagcagaatgcagtcatggttgacatacatgatcagctccatcaaggaacagtccctgtttcttacacagtaacaacagtggcaccacatgggattccactctgcacaggccagcacatccctgcttgtagtacacagcaggtcccaggatgctctgtggttttcagtggacagcacctccctgtctgtagtgtgcctcctccaatgcttcaggcatgttcagttcagcacttaccagtaccatatgctgcattcccaccccttatttctagtgatccatttcttatacatcctcctcacctttctccccatcatcctcctcatttgccaccaccaggccagtttgtccctttccaaacacagcaatcacgatcgcctctgcaaaggatagaaaatgaagtggaactcttaggagaacatcttccagtaggaggttttacttaccctccatcagcccaccccccaacattacctccatcagctcccttgcagttcttaacacatgatcctttgcatcaggaggtgtcctttggagtaccttatcctccatttatgcctcggaggcttacaggacgtagtagataccgatcccagcagccaataccacctcccccttatcatcccagcttactgccatatgtgttatcaatgcttccagtgccacctgcagtgggcccaactttcagctttgaattagatgtagaagatggagaagtagaaaattacgaggccctgttaaacctggcagagcgactgggagaggcaaagcctcgtggactgactaaagcagatattgaacaacttccttcttatcggttcaatcctaacaaccaccagtcagaacagactttgtgtgtagtatgcatgtgtgattttgagtcaaggcagctacttagagtcttaccctgtaaccacgagttccatgccaagtgtgttgacaaatggcttaaggcaaatcgtacttgcccaatttgccgagctgatgcttcagaagtgcatcgggattcagaatgaccaacctaagaagcacaaatttagtttgggtgttcctcatcacatgtatatacggactatccattgaacttaatctgtgtggcttccagccctccctttaccaaaagggtcaatggacctttctttgcactgtgtgacttaatcaactataaaagcttacaattagtcttcacagttatgggattgttatactaaccgtgtgattggaactccaaagactttttctttagcttaattttgtgtgtgcactaacattccctggtttttgtgtgatcattccgagtgttgctgcaagattacagtggacgtgatcttttagcatgtgcttttataaaaagtggtagctacagatgatatagcaatctaccttatatagagccttcagaaactgtgagtggaaatgaatgcgcagcgtatgactgttggtgataagtgtatctgtgtgagtgtgtgcaactacttgtgtgagggcatggtagctaacgtgtgtatgagatcctatataccagcatgtaccaagaatgtgtgtgtagttttaattatgctgcaatgtataatctggtgtgttatttaaacagcactagtactgtacactggtttttttcccttgtgtttgctgttgcacactgattgctgagggtgcatcaattacaagcattgaatactccatccccttccctcccagtgaatggaatgagaaaagccttcttcctttgcttcaggcagctgtcaccttctctttattggtggtcctaagtgggtcacttaagaaaaaaaagtgtaacaaattctcactccatgaacctggtttttttttattctgttgtggaaatttttaaatctccaacttgctgtttccaaaaagaaggtgcaatatcatatatcatcagttagcaatattagcatttcaatcagtgatttgaatgttgatacttttttttcctttacatttccagtaagtttcttacagaaagtacctgtgattttttttaatgtttagatttgtagtctagtctattctgaagatatttgattaatatatttctaagaagaccactagtcccatgaagtctcaccttgttgacttccaccagaacaaaacctgttaattcagcttgacttctcatatgtgttctgtgttcaagctcctgtgggcaactcaattgttttaagaaaactctatttctgttcatattaattcacttgccagactccaattctgaaagttgtctagttcttccttcatcacacgtgcttctcatcgaaaccctggtttcaggatggatcaagtgctgttacagctcatgttccttagacctgatttgttttgatattttactgcctttccttttaatttttgtttgaatgagaaaagtttaatacaacaggtgtccagaatacttgcagtataaatgaagatttggtttttgtataaaaaaataatgctgttaaacaggagttgaccttcatttagttgatgtaatacatagctgtatggggttttttttagtaagttctttgagcataattcactttaaagtcatttttccagcaatgtttaaattactttctcattcttttagtgtattcaacattgtctgcctcttcctgcagttgatgtaattgctttgtttgcaatagcacaagctgcattattccagtcaggactgtgataacttgctgccagccccactcaactttcagttggctctgtgtcagttttccactcagtgttaactacttgttactgccatgctgcttgccctcccttgaagtgtctataagctcatcacagcctagagttaagtaaagtcaattcacagaagcacaattttgccctttgcgagacattgttgcctctatctagtcctacaagtagggttttgcatactgtgtttgcccctagggttgtcagtgcatcagaaatacttctaaatagtggtaaaaatgcacatggttaatgcacatgttacttttaaatcattaggatatccctcacctgttcctgatgaataaaaagtgtgttaaagaccaaaattcttggcataataatcagctacatacaaatcacatatagtttaatcttttttaatgaaaaaaaaatcatgtttaaaatggcaaaagcccatcttatacacttttatatagctgcaaaaaatttatatctgtacagatctaacactacgacactcagtattcattttattgaagcatgcaagtaaagcactttttctaatttatatagaggtatctaattaacacagcacattgtactaatgactaggagtagcagctttttcttctctccctctatgaattcttataatgtccctttttctgtaagtttttgagaggcaattggcaatttaggaggcagcagggtctgttttggtcaaatcttgaatttcgttgttgcactctagtgactgatctttgggaatgtcttgtctttgcatggggctcatagagatgtgtgcagacttgcttattgtggttagtgtgtatcaggaacacacacacaggtgttctgaccagctcaggcttgccacagtgagcaactctgtggctagcaaaagagaagtttatttgtgcccagccattggtcaccttgggtgatgcaccagatagcaggcagatgttggttcattggccttcgtcctctttcctcctaaaataatattggctttaccatcttaactcagctgtgggttttttgtgggttcttgtttgttttttggcatgaattgtcatctttggtgtttttttaacccccagcccctcaaaaaaataaggcctccaggtatcaagatctcatattaggattttctgtccttaattttttgagcaaaatctggaaaatgtgaaagcatatttagattttatatactatctgaaatgtgatttgttaagattcttaaatttgggcctcttagaataattttgaatgagatctaccgactcacttgtgagaatatttttcacagattatctttgggccttttcattagaaagctgtttgtttgtccccctgttggtacatttggttacctcattttgccgtttcagattgtgaaagctcacaggggtgttttttggaatcatttgctgagtcattttctcaaatcatattccattgtatcagttaacatatagttttaaatgtatgtattataaatatctgtaaccaaatcatttgaaggcttgataaatttttaacaaagtttgtacattttttatgaaagttactagtaatgctttactaagtagtgcaatgaatttttatttttaatccctgtgcccaattttggagttgagagggttgttggtaataaatgtatgatgtacacttaaaaaaaaaaat

SEQ ID NO: 453683 - DNA, 4930 bp, Homo sapiens
cgcccccttccccctcggggtggaaacaaagggggttcggcgcgcggtgcggagcctgggggaaaagggaggagcgctccggtggtctggcgcgctgggctcgctaggtttgtgctggcgaggggacggggtgggacgggcgacccggacccaagaagtgggaggaccgcgcgtgtcgcggcctagcggcgaggggagtcgcctgcgcgcgcagcggaggccagtgcgccggcgcatagggagcccgggtctgtgatcgccgaggcggggtgaggcggggtgcggcggggcgcggcggggcggggaggggcgtggccgggccgggcccctagtgcggtgttgcgggacggggccgaggcccggtcggttggggcgtgggggcggagaggatggagcctccgaggcgttaggcgactctgtcatctctgggcgtgcagccgtcgtttcctggcgcggcccgtgtgatggtgccgggaggaaggaagcgcagtgacagtgcctaagttggagccggggttccgggggtgaggaggcccgcggacggcggatctggcgagctggccgcgggctgggcgagcagtcacaataggaggcggcggcccagcgaggatccgcgggagctgcccggcagggcggagcctcccctcgcagatatctcccggggccaattcagcatctctacctggccatcctaacaaggtgatttgtgaaaggagtgaagatagtccaagtcctaagagacagcgcctctctcattcagtctttgattatacatcagcatcaccagctccctcaccaccaatgcgaccatgggagatgacatcaaataggcagcccccttcagttcgaccaagccaacatcacttctcaggggaacgatgcaacacacctgcacgcaacagaagaagtcctcctgtcaggcgccagagaggaagaagggatcgtctgtctcgacataattccattagtcaagatgaaaactatcaccatctcccttacgcacagcagcaagcaatagaggagcctcgagccttccaccctccgaatgtatctccccgtctgctacatcctgctgctcatccaccccagcagaatgcagtcatggttgacatacatgatcagctccatcaaggaacagtccctgtttcttacacagtaacaacagtggcaccacatgggattccactctgcacaggccagcacatccctgcttgtagtacacagcaggtcccaggatgctctgtggttttcagtggacagcacctccctgtctgtagtgtgcctcctccaatgcttcaggcatgttcagttcagcacttaccagtaccatatgctgcattcccaccccttatttctagtgatccatttcttatacatcctcctcacctttctccccatcatcctcctcatttgccaccaccaggccagtttgtccctttccaaacacagcaatcacgatcgcctctgcaaaggatagaaaatgaagtggaactcttaggagaacatcttccagtaggaggttttacttaccctccatcagcccaccccccaacattacctccatcagctcccttgcagttcttaacacatgatcctttgcatcaggaggtgtcctttggagtaccttatcctccatttatgcctcggaggcttacaggacgtagtagataccgatcccagcagccaataccacctcccccttatcatcccagcttactgccatatgtgttatcaatgcttccagtgccacctgcagtgggcccaactttcagctttgaattagatgtagaagatggagaagtagaaaattacgaggccctgttaaacctggcagagcgactgggagaggcaaagcctcgtggactgactaaagcagatattgaacaacttccttcttatcggttcaatcctaacaaccaccagtcagaacagactttgtgtgtagtatgcatgtgtgattttgagtcaaggcagctacttagagtcttaccctgtaaccacgagttccatgccaagtgtgttgacaaatggcttaaggcaaatcgtacttgcccaatttgccgagctgatgcttcagaagtgcatcgggattcagaatgaccaacctaagaagcacaaatttagtttgggtgttcctcatcacatgtatatacggactatccattgaacttaatctgtgtggcttccagccctccctttaccaaaagggtcaatggacctttctttgcactgtgtgacttaatcaactataaaagcttacaattagtcttcacagttatgggattgttatactaaccgtgtgattggaactccaaagactttttctttagcttaattttgtgtgtgcactaacattccctggtttttgtgtgatcattccgagtgttgctgcaagattacagtggacgtgatcttttagcatgtgcttttataaaaagtggtagctacagatgatatagcaatctaccttatatagagccttcagaaactgtgagtggaaatgaatgcgcagcgtatgactgttggtgataagtgtatctgtgtgagtgtgtgcaactacttgtgtgagggcatggtagctaacgtgtgtatgagatcctatataccagcatgtaccaagaatgtgtgtgtagttttaattatgctgcaatgtataatctggtgtgttatttaaacagcactagtactgtacactggtttttttcccttgtgtttgctgttgcacactgattgctgagggtgcatcaattacaagcattgaatactccatccccttccctcccagtgaatggaatgagaaaagccttcttcctttgcttcaggcagctgtcaccttctctttattggtggtcctaagtgggtcacttaagaaaaaaaagtgtaacaaattctcactccatgaacctggtttttttttattctgttgtggaaatttttaaatctccaacttgctgtttccaaaaagaaggtgcaatatcatatatcatcagttagcaatattagcatttcaatcagtgatttgaatgttgatacttttttttcctttacatttccagtaagtttcttacagaaagtacctgtgattttttttaatgtttagatttgtagtctagtctattctgaagatatttgattaatatatttctaagaagaccactagtcccatgaagtctcaccttgttgacttccaccagaacaaaacctgttaattcagcttgacttctcatatgtgttctgtgttcaagctcctgtgggcaactcaattgttttaagaaaactctatttctgttcatattaattcacttgccagactccaattctgaaagttgtctagttcttccttcatcacacgtgcttctcatcgaaaccctggtttcaggatggatcaagtgctgttacagctcatgttccttagacctgatttgttttgatattttactgcctttccttttaatttttgtttgaatgagaaaagtttaatacaacaggtgtccagaatacttgcagtataaatgaagatttggtttttgtataaaaaaataatgctgttaaacaggagttgaccttcatttagttgatgtaatacatagctgtatggggttttttttagtaagttctttgagcataattcactttaaagtcatttttccagcaatgtttaaattactttctcattcttttagtgtattcaacattgtctgcctcttcctgcagttgatgtaattgctttgtttgcaatagcacaagctgcattattccagtcaggactgtgataacttgctgccagccccactcaactttcagttggctctgtgtcagttttccactcagtgttaactacttgttactgccatgctgcttgccctcccttgaagtgtctataagctcatcacagcctagagttaagtaaagtcaattcacagaagcacaattttgccctttgcgagacattgttgcctctatctagtcctacaagtagggttttgcatactgtgtttgcccctagggttgtcagtgcatcagaaatacttctaaatagtggtaaaaatgcacatggttaatgcacatgttacttttaaatcattaggatatccctcacctgttcctgatgaataaaaagtgtgttaaagaccaaaattcttggcataataatcagctacatacaaatcacatatagtttaatcttttttaatgaaaaaaaaatcatgtttaaaatggcaaaagcccatcttatacacttttatatagctgcaaaaaacatcttaactcagctgtgggttttttgtgggttcttgtttgttttttggcatgaattgtcatctttggtgtttttttaacccccagcccctcaaaaaaataaggcctccaggtatcaagatctcatattaggattttctgtccttaattttttgagcaaaatctggaaaatgtgaaagcatatttagattttatatactatctgaaatgtgatttgttaagattcttaaatttgggcctcttagaataattttgaatgagatctaccgactcacttgtgagaatatttttcacagattatctttgggccttttcattagaaagctgtttgtttgtccccctgttggtacatttggttacctcattttgccgtttcagattgtgaaagctcacaggggtgttttttggaatcatttgctgagtcattttctcaaatcatattccattgtatcagttaacatatagttttaaatgtatgtattataaatatctgtaaccaaatcatttgaaggcttgataaatttttaacaaagtttgtacattttttatgaaagttactagtaatgctttactaagtagtgcaatgaatttttatttttaatccctgtgcccaattttggagttgagagggttgttggtaataaatgtatgatgtacacttaaaaaaaaaaat

SEQ ID NO: 453684 - DNA, 4678 bp, Homo sapiens
gcggccgccgcggtcgctgccgccgccgcctcagcagccgccgccgccgcgcactttcagcctcagtcgtcgtctcccaggccgggccccgccgagcttgggcccccgcgccgcccgcgccccccaccgccgccgccccggccggagcccgccgccacggaccgcctcagccctccgggccacgggcctctccgggcgggagcccagggtggcggcgcctgcggccgagcgccgggagcaggtagtgttggtgcttcttttcagtgccagtccatccatcacgaccacatttgtcatgatgacagtgacaagatatctcccggggccaattcagcatctctacctggccatcctaacaaggtgatttgtgaaagggtgagacttcagagcctgttccctctcctcccaagtgatcagaacactaccgttcaagaggatgctcacttcaaagctttcttccagagtgaagatagtccaagtcctaagagacagcgcctctctcattcagtctttgattatacatcagcatcaccagctccctcaccaccaatgcgaccatgggagatgacatcaaataggcagcccccttcagttcgaccaagccaacatcacttctcaggggaacgatgcaacacacctgcacgcaacagaagaagtcctcctgtcaggcgccagagaggaagaagggatcgtctgtctcgacataattccattagtcaagatgaaaactatcaccatctcccttacgcacagcagcaagcaatagaggagcctcgagccttccaccctccgaatgtatctccccgtctgctacatcctgctgctcatccaccccagcagaatgcagtcatggttgacatacatgatcagctccatcaaggaacagtccctgtttcttacacagtaacaacagtggcaccacatgggattccactctgcacaggccagcacatccctgcttgtagtacacagcaggtcccaggatgctctgtggttttcagtggacagcacctccctgtctgtagtgtgcctcctccaatgcttcaggcatgttcagttcagcacttaccagtaccatatgctgcattcccaccccttatttctagtgatccatttcttatacatcctcctcacctttctccccatcatcctcctcatttgccaccaccaggccagtttgtccctttccaaacacagcaatcacgatcgcctctgcaaaggatagaaaatgaagtggaactcttaggagaacatcttccagtaggaggttttacttaccctccatcagcccaccccccaacattacctccatcagctcccttgcagttcttaacacatgatcctttgcatcaggaggtgtcctttggagtaccttatcctccatttatgcctcggaggcttacaggacgtagtagataccgatcccagcagccaataccacctcccccttatcatcccagcttactgccatatgtgttatcaatgcttccagtgccacctgcagtgggcccaactttcagctttgaattagatgtagaagatggagaagtagaaaattacgaggccctgttaaacctggcagagcgactgggagaggcaaagcctcgtggactgactaaagcagatattgaacaacttccttcttatcggttcaatcctaacaaccaccagtcagaacagactttgtgtgtagtatgcatgtgtgattttgagtcaaggcagctacttagagtcttaccctgtaaccacgagttccatgccaagtgtgttgacaaatggcttaaggcaaatcgtacttgcccaatttgccgagctgatgcttcagaagtgcatcgggattcagaatgaccaacctaagaagcacaaatttagtttgggtgttcctcatcacatgtatatacggactatccattgaacttaatctgtgtggcttccagccctccctttaccaaaagggtcaatggacctttctttgcactgtgtgacttaatcaactataaaagcttacaattagtcttcacagttatgggattgttatactaaccgtgtgattggaactccaaagactttttctttagcttaattttgtgtgtgcactaacattccctggtttttgtgtgatcattccgagtgttgctgcaagattacagtggacgtgatcttttagcatgtgcttttataaaaagtggtagctacagatgatatagcaatctaccttatatagagccttcagaaactgtgagtggaaatgaatgcgcagcgtatgactgttggtgataagtgtatctgtgtgagtgtgtgcaactacttgtgtgagggcatggtagctaacgtgtgtatgagatcctatataccagcatgtaccaagaatgtgtgtgtagttttaattatgctgcaatgtataatctggtgtgttatttaaacagcactagtactgtacactggtttttttcccttgtgtttgctgttgcacactgattgctgagggtgcatcaattacaagcattgaatactccatccccttccctcccagtgaatggaatgagaaaagccttcttcctttgcttcaggcagctgtcaccttctctttattggtggtcctaagtgggtcacttaagaaaaaaaagtgtaacaaattctcactccatgaacctggtttttttttattctgttgtggaaatttttaaatctccaacttgctgtttccaaaaagaaggtgcaatatcatatatcatcagttagcaatattagcatttcaatcagtgatttgaatgttgatacttttttttcctttacatttccagtaagtttcttacagaaagtacctgtgattttttttaatgtttagatttgtagtctagtctattctgaagatatttgattaatatatttctaagaagaccactagtcccatgaagtctcaccttgttgacttccaccagaacaaaacctgttaattcagcttgacttctcatatgtgttctgtgttcaagctcctgtgggcaactcaattgttttaagaaaactctatttctgttcatattaattcacttgccagactccaattctgaaagttgtctagttcttccttcatcacacgtgcttctcatcgaaaccctggtttcaggatggatcaagtgctgttacagctcatgttccttagacctgatttgttttgatattttactgcctttccttttaatttttgtttgaatgagaaaagtttaatacaacaggtgtccagaatacttgcagtataaatgaagatttggtttttgtataaaaaaataatgctgttaaacaggagttgaccttcatttagttgatgtaatacatagctgtatggggttttttttagtaagttctttgagcataattcactttaaagtcatttttccagcaatgtttaaattactttctcattcttttagtgtattcaacattgtctgcctcttcctgcagttgatgtaattgctttgtttgcaatagcacaagctgcattattccagtcaggactgtgataacttgctgccagccccactcaactttcagttggctctgtgtcagttttccactcagtgttaactacttgttactgccatgctgcttgccctcccttgaagtgtctataagctcatcacagcctagagttaagtaaagtcaattcacagaagcacaattttgccctttgcgagacattgttgcctctatctagtcctacaagtagggttttgcatactgtgtttgcccctagggttgtcagtgcatcagaaatacttctaaatagtggtaaaaatgcacatggttaatgcacatgttacttttaaatcattaggatatccctcacctgttcctgatgaataaaaagtgtgttaaagaccaaaattcttggcataataatcagctacatacaaatcacatatagtttaatcttttttaatgaaaaaaaaatcatgtttaaaatggcaaaagcccatcttatacacttttatatagctgcaaaaaacatcttaactcagctgtgggttttttgtgggttcttgtttgttttttggcatgaattgtcatctttggtgtttttttaacccccagcccctcaaaaaaataaggcctccaggtatcaagatctcatattaggattttctgtccttaattttttgagcaaaatctggaaaatgtgaaagcatatttagattttatatactatctgaaatgtgatttgttaagattcttaaatttgggcctcttagaataattttgaatgagatctaccgactcacttgtgagaatatttttcacagattatctttgggccttttcattagaaagctgtttgtttgtccccctgttggtacatttggttacctcattttgccgtttcagattgtgaaagctcacaggggtgttttttggaatcatttgctgagtcattttctcaaatcatattccattgtatcagttaacatatagttttaaatgtatgtattataaatatctgtaaccaaatcatttgaaggcttgataaatttttaacaaagtttgtacattttttatgaaagttactagtaatgctttactaagtagtgcaatgaatttttatttttaatccctgtgcccaattttggagttgagagggttgttggtaataaatgtatgatgtacacttaaaaaaaaaaat

SEQ ID NO: 453685 - DNA, 4800 bp, Homo sapiens
cgcccccttccccctcggggtggaaacaaagggggttcggcgcgcggtgcggagcctgggggaaaagggaggagcgctccggtggtctggcgcgctgggctcgctagagtgaagatagtccaagtcctaagagacagcgcctctctcattcagtctttgattatacatcagcatcaccagctccctcaccaccaatgcgaccatgggagatgacatcaaataggcagcccccttcagttcgaccaagccaacatcacttctcaggggaacgatgcaacacacctgcacgcaacagaagaagtcctcctgtcaggcgccagagaggaagaagggatcgtctgtctcgacataattccattagtcaagatgccttccaccctccgaatgtatctccccgtctgctacatcctgctgctcatccaccccagcagaatgcagtcatggttgacatacatgatcagctccatcaaggaacagtccctgtttcttacacagtaacaacagtggcaccacatgggattccactctgcacaggccagcacatccctgcttgtagtacacagcaggtcccaggatgctctgtggttttcagtggacagcacctccctgtctgtagtgtgcctcctccaatgcttcaggcatgttcagttcagcacttaccagtaccatatgctgcattcccaccccttatttctagtgatccatttcttatacatcctcctcacctttctccccatcatcctcctcatttgccaccaccaggccagtttgtccctttccaaacacagcaatcacgatcgcctctgcaaaggatagaaaatgaagtggaactcttaggagaacatcttccagtaggaggttttacttaccctccatcagcccaccccccaacattacctccatcagctcccttgcagttcttaacacatgatcctttgcatcaggaggtgtcctttggagtaccttatcctccatttatgcctcggaggcttacaggacgtagtagataccgatcccagcagccaataccacctcccccttatcatcccagcttactgccatatgtgttatcaatgcttccagtgccacctgcagtgggcccaactttcagctttgaattagatgtagaagatggagaagtagaaaattacgaggccctgttaaacctggcagagcgactgggagaggcaaagcctcgtggactgactaaagcagatattgaacaacttccttcttatcggttcaatcctaacaaccaccagtcagaacagactttgtgtgtagtatgcatgtgtgattttgagtcaaggcagctacttagagtcttaccctgtaaccacgagttccatgccaagtgtgttgacaaatggcttaaggcaaatcgtacttgcccaatttgccgagctgatgcttcagaagtgcatcgggattcagaatgaccaacctaagaagcacaaatttagtttgggtgttcctcatcacatgtatatacggactatccattgaacttaatctgtgtggcttccagccctccctttaccaaaagggtcaatggacctttctttgcactgtgtgacttaatcaactataaaagcttacaattagtcttcacagttatgggattgttatactaaccgtgtgattggaactccaaagactttttctttagcttaattttgtgtgtgcactaacattccctggtttttgtgtgatcattccgagtgttgctgcaagattacagtggacgtgatcttttagcatgtgcttttataaaaagtggtagctacagatgatatagcaatctaccttatatagagccttcagaaactgtgagtggaaatgaatgcgcagcgtatgactgttggtgataagtgtatctgtgtgagtgtgtgcaactacttgtgtgagggcatggtagctaacgtgtgtatgagatcctatataccagcatgtaccaagaatgtgtgtgtagttttaattatgctgcaatgtataatctggtgtgttatttaaacagcactagtactgtacactggtttttttcccttgtgtttgctgttgcacactgattgctgagggtgcatcaattacaagcattgaatactccatccccttccctcccagtgaatggaatgagaaaagccttcttcctttgcttcaggcagctgtcaccttctctttattggtggtcctaagtgggtcacttaagaaaaaaaagtgtaacaaattctcactccatgaacctggtttttttttattctgttgtggaaatttttaaatctccaacttgctgtttccaaaaagaaggtgcaatatcatatatcatcagttagcaatattagcatttcaatcagtgatttgaatgttgatacttttttttcctttacatttccagtaagtttcttacagaaagtacctgtgattttttttaatgtttagatttgtagtctagtctattctgaagatatttgattaatatatttctaagaagaccactagtcccatgaagtctcaccttgttgacttccaccagaacaaaacctgttaattcagcttgacttctcatatgtgttctgtgttcaagctcctgtgggcaactcaattgttttaagaaaactctatttctgttcatattaattcacttgccagactccaattctgaaagttgtctagttcttccttcatcacacgtgcttctcatcgaaaccctggtttcaggatggatcaagtgctgttacagctcatgttccttagacctgatttgttttgatattttactgcctttccttttaatttttgtttgaatgagaaaagtttaatacaacaggtgtccagaatacttgcagtataaatgaagatttggtttttgtataaaaaaataatgctgttaaacaggagttgaccttcatttagttgatgtaatacatagctgtatggggttttttttagtaagttctttgagcataattcactttaaagtcatttttccagcaatgtttaaattactttctcattcttttagtgtattcaacattgtctgcctcttcctgcagttgatgtaattgctttgtttgcaatagcacaagctgcattattccagtcaggactgtgataacttgctgccagccccactcaactttcagttggctctgtgtcagttttccactcagtgttaactacttgttactgccatgctgcttgccctcccttgaagtgtctataagctcatcacagcctagagttaagtaaagtcaattcacagaagcacaattttgccctttgcgagacattgttgcctctatctagtcctacaagtagggttttgcatactgtgtttgcccctagggttgtcagtgcatcagaaatacttctaaatagtggtaaaaatgcacatggttaatgcacatgttacttttaaatcattaggatatccctcacctgttcctgatgaataaaaagtgtgttaaagaccaaaattcttggcataataatcagctacatacaaatcacatatagtttaatcttttttaatgaaaaaaaaatcatgtttaaaatggcaaaagcccatcttatacacttttatatagctgcaaaaaatttatatctgtacagatctaacactacgacactcagtattcattttattgaagcatgcaagtaaagcactttttctaatttatatagaggtatctaattaacacagcacattgtactaatgactaggagtagcagctttttcttctctccctctatgaattcttataatgtccctttttctgtaagtttttgagaggcaattggcaatttaggaggcagcagggtctgttttggtcaaatcttgaatttcgttgttgcactctagtgactgatctttgggaatgtcttgtctttgcatggggctcatagagatgtgtgcagacttgcttattgtggttagtgtgtatcaggaacacacacacaggtgttctgaccagctcaggcttgccacagtgagcaactctgtggctagcaaaagagaagtttatttgtgcccagccattggtcaccttgggtgatgcaccagatagcaggcagatgttggttcattggccttcgtcctctttcctcctaaaataatattggctttaccatcttaactcagctgtgggttttttgtgggttcttgtttgttttttggcatgaattgtcatctttggtgtttttttaacccccagcccctcaaaaaaataaggcctccaggtatcaagatctcatattaggattttctgtccttaattttttgagcaaaatctggaaaatgtgaaagcatatttagattttatatactatctgaaatgtgatttgttaagattcttaaatttgggcctcttagaataattttgaatgagatctaccgactcacttgtgagaatatttttcacagattatctttgggccttttcattagaaagctgtttgtttgtccccctgttggtacatttggttacctcattttgccgtttcagattgtgaaagctcacaggggtgttttttggaatcatttgctgagtcattttctcaaatcatattccattgtatcagttaacatatagttttaaatgtatgtattataaatatctgtaaccaaatcatttgaaggcttgataaatttttaacaaagtttgtacattttttatgaaagttactagtaatgctttactaagtagtgcaatgaatttttatttttaatccctgtgcccaattttggagttgagagggttgttggtaataaatgtatgatgtacacttaaaaaaaaaaat

SEQ ID NO: 453686 - DNA, 1538 bp, Homo sapiens
cgcccccttccccctcggggtggaaacaaagggggttcggcgcgcggtgcggagcctgggggaaaagggaggagcgctccggtggtctggcgcgctgggctcgctaggtttgtgctggcgaggggacggggtgggacgggcgacccggacccaagaagtgggaggaccgcgcgtgtcgcggcctagcggcgaggggagtcgcctgcgcgcgcagcggaggccagtgcgccggcgcatagggagcccgggtctgtgatcgccgaggcggggtgaggcggggtgcggcggggcgcggcggggcggggaggggcgtggccgggccgggcccctagtgcggtgttgcgggacggggccgaggcccggtcggttggggcgtgggggcggagaggatggagcctccgaggcgttaggcgactctgtcatctctgggcgtgcagccgtcgtttcctggcgcggcccgtgtgatggtgccgggaggaaggaagcgcagtgacagtgcctaagttggagccggggttccgggggtgaggaggcccgcggacggcggatctggcgagctggccgcgggctgggcgagcagtcacaataggaggcggcggcccagcgaggatccgcgggagctgcccggcagggcggagcctcccctcgcagagtgaagatagtccaagtcctaagagacagcgcctctctcattcagtctttgattatacatcagcatcaccagctccctcaccaccaatgcgaccatgggagatgacatcaaataggcagcccccttcagttcgaccaagccaacatcacttctcaggggaacgatgcaacacacctgcacgcaacagaagaagtcctcctgtcaggcgccagagaggaagaagggatcgtctgtctcgacataattccattagtcaagatgaaaactatcaccatctcccttacgcacagcagcaagcaatagaggagcctcgagccttccaccctccgaatgtatctccccgtctgctacatcctgctgctcatccaccccagcagaatgcagtcatggttgacatacatgatcagctccatcaaggaacagtccctgtttcttacacagtaacaacagtggcaccacatgggattccactctgcacaggccagcacatccctgcttgtagtacacagcaggtcccaggatgctctgtggttttcagtggacagcacctccctgtctgtagtgtgcctcctccagtaagtctctatctttgttctcattagatattactattaagcacaccagcctgaatttggttttgtaacttcccgactcttaccctctttagaggggctaactgcattatataagcaaacaaaatttaagagactgtctttgtagtttcactttcaagtaaaaaggccaattttattgcaataaaaatctcaataatatccttatagtaaccatttaagaaaattagctttataaccggatatatttttacattaattaacttatacatatatttggatatcctgagggtcaaaccatgttttctcatatg

SEQ ID NO: 453687 - DNA, 1146 bp, Homo sapiens
gtcctttaggatttcggaattaacaccagcagaaaaagttaccaataggtatatgggaaacaggaaggacgtggtgttcttgggctgtgctgttttgcctccaacagtttttgtaagagagatccattgccagaggcaacctttgccatctttatgttttgatgtttaaaattaatttttaatttctttcctgtcttcgctagcagaatcatcaaatacctagaaaatccagactatccttcataggcgtgattctccacattggtgcagctagccatgaactatccttttcttcctctttttcccagatatctcccggggccaattcagcatctctacctggccatcctaacaaggtgatttgtgaaagggtgagacttcagagcctgttccctctcctcccaagtgatcagaacactaccgttcaagaggatgctcacttcaaagctttcttccagagtgaagatagtccaagtcctaagagacagcgcctctctcattcagtctttgattatacatcagcatcaccagctccctcaccaccaatgcgaccatgggagatgacatcaaataggcagcccccttcagttcgaccaagccaacatcacttctcaggggaacgatgcaacacacctgcacgcaacagaagaaggttagttgattacaatttatttcttaagttttcttccattggtagatttgtgagtatatttaacatcagaaaacattttttctgtaggcatttcataaacacatcaccacatatacacgtacattcactcacgaaaaagaaagttgcctagatttccagtaggttagaagagtttatttagcttatcattgacagatgaagaaatggaaagaggctaaaatgagtcgatgccattatatatgaaattagctacttaaggtacagattgttgtggactagcctgcgatcttgactattagaagatgcattttgtagttcataactgtaaggatatatggaagtcttagaaatgagctactccttttctactccattccttttccttctgtatcctcaaaggcaattaggagcttaattatgtttcttataaacccatggagacttggcacagtagtagctcatgcctataatcgcaacattttgggaagccaaag

SEQ ID NO: 453688 - DNA, 4867 bp, Homo sapiens
cgcccccttccccctcggggtggaaacaaagggggttcggcgcgcggtgcggagcctgggggaaaagggaggagcgctccggtggtctggcgcgctgggctcgctaggtttgtgctggcgaggggacggggtgggacgggcgacccggacccaagaagtgggaggaccgcgcgtgtcgcggcctagcggcgaggggagtcgcctgcgcgcgcagcggaggccagtgcgccggcgcatagggagcccgggtctgtgatcgccgaggcggggtgaggcggggtgcggcggggcgcggcggggcggggaggggcgtggccgggccgggcccctagtgcggtgttgcgggacggggccgaggcccggtcggttggggcgtgggggcggagaggatggagcctccgaggcgttaggcgactctgtcatctctgggcgtgcagccgtcgtttcctggcgcggcccgtgtgatggtgccgggaggaaggaagcgcagtgacagtgcctaagttggagccggggttccgggggtgaggaggcccgcggacggcggatctggcgagctggccgcgggctgggcgagcagtcacaataggaggcggcggcccagcgaggatccgcgggagctgcccggcagggcggagcctcccctcgcagagtgaagatagtccaagtcctaagagacagcgcctctctcattcagtctttgattatacatcagcatcaccagctccctcaccaccaatgcgaccatgggagatgacatcaaataggcagcccccttcagttcgaccaagccaacatcacttctcaggggaacgatgcaacacacctgcacgcaacagaagaagtcctcctgtcaggcgccagagaggaagaagggatcgtctgtctcgacataattccattagtcaagatgaaaactatcaccatctcccttacgcacagcagcaagcaatagaggagcctcgagccttccaccctccgaatgtatctccccgtctgctacatcctgctgctcatccaccccagcagaatgcagtcatggttgacatacatgatcagctccatcaaggaacagtccctgtttcttacacagtaacaacagtggcaccacatgggattccactctgcacaggccagcacatccctgcttgtagtacacagcaggtcccaggatgctctgtggttttcagtggacagcacctccctgtctgtagtgtgcctcctccaatgcttcaggcatgttcagttcagcacttaccagtaccatatgctgcattcccaccccttatttctagtgatccatttcttatacatcctcctcacctttctccccatcatcctcctcatttgccaccaccaggccagtttgtccctttccaaacacagcaatcacgatcgcctctgcaaaggatagaaaatgaagtggaactcttaggagaacatcttccagtaggaggttttacttaccctccatcagcccaccccccaacattacctccatcagctcccttgcagttcttaacacatgatcctttgcatcaggaggtgtcctttggagtaccttatcctccatttatgcctcggaggcttacaggacgtagtagataccgatcccagcagccaataccacctcccccttatcatcccagcttactgccatatgtgttatcaatgcttccagtgccacctgcagtgggcccaactttcagctttgaattagatgtagaagatggagaagtagaaaattacgaggccctgttaaacctggcagagcgactgggagaggcaaagcctcgtggactgactaaagcagatattgaacaacttccttcttatcggttcaatcctaacaaccaccagtcagaacagactttgtgtgtagtatgcatgtgtgattttgagtcaaggcagctacttagagtcttaccctgtaaccacgagttccatgccaagtgtgttgacaaatggcttaaggcaaatcgtacttgcccaatttgccgagctgatgcttcagaagtgcatcgggattcagaatgaccaacctaagaagcacaaatttagtttgggtgttcctcatcacatgtatatacggactatccattgaacttaatctgtgtggcttccagccctccctttaccaaaagggtcaatggacctttctttgcactgtgtgacttaatcaactataaaagcttacaattagtcttcacagttatgggattgttatactaaccgtgtgattggaactccaaagactttttctttagcttaattttgtgtgtgcactaacattccctggtttttgtgtgatcattccgagtgttgctgcaagattacagtggacgtgatcttttagcatgtgcttttataaaaagtggtagctacagatgatatagcaatctaccttatatagagccttcagaaactgtgagtggaaatgaatgcgcagcgtatgactgttggtgataagtgtatctgtgtgagtgtgtgcaactacttgtgtgagggcatggtagctaacgtgtgtatgagatcctatataccagcatgtaccaagaatgtgtgtgtagttttaattatgctgcaatgtataatctggtgtgttatttaaacagcactagtactgtacactggtttttttcccttgtgtttgctgttgcacactgattgctgagggtgcatcaattacaagcattgaatactccatccccttccctcccagtgaatggaatgagaaaagccttcttcctttgcttcaggcagctgtcaccttctctttattggtggtcctaagtgggtcacttaagaaaaaaaagtgtaacaaattctcactccatgaacctggtttttttttattctgttgtggaaatttttaaatctccaacttgctgtttccaaaaagaaggtgcaatatcatatatcatcagttagcaatattagcatttcaatcagtgatttgaatgttgatacttttttttcctttacatttccagtaagtttcttacagaaagtacctgtgattttttttaatgtttagatttgtagtctagtctattctgaagatatttgattaatatatttctaagaagaccactagtcccatgaagtctcaccttgttgacttccaccagaacaaaacctgttaattcagcttgacttctcatatgtgttctgtgttcaagctcctgtgggcaactcaattgttttaagaaaactctatttctgttcatattaattcacttgccagactccaattctgaaagttgtctagttcttccttcatcacacgtgcttctcatcgaaaccctggtttcaggatggatcaagtgctgttacagctcatgttccttagacctgatttgttttgatattttactgcctttccttttaatttttgtttgaatgagaaaagtttaatacaacaggtgtccagaatacttgcagtataaatgaagatttggtttttgtataaaaaaataatgctgttaaacaggagttgaccttcatttagttgatgtaatacatagctgtatggggttttttttagtaagttctttgagcataattcactttaaagtcatttttccagcaatgtttaaattactttctcattcttttagtgtattcaacattgtctgcctcttcctgcagttgatgtaattgctttgtttgcaatagcacaagctgcattattccagtcaggactgtgataacttgctgccagccccactcaactttcagttggctctgtgtcagttttccactcagtgttaactacttgttactgccatgctgcttgccctcccttgaagtgtctataagctcatcacagcctagagttaagtaaagtcaattcacagaagcacaattttgccctttgcgagacattgttgcctctatctagtcctacaagtagggttttgcatactgtgtttgcccctagggttgtcagtgcatcagaaatacttctaaatagtggtaaaaatgcacatggttaatgcacatgttacttttaaatcattaggatatccctcacctgttcctgatgaataaaaagtgtgttaaagaccaaaattcttggcataataatcagctacatacaaatcacatatagtttaatcttttttaatgaaaaaaaaatcatgtttaaaatggcaaaagcccatcttatacacttttatatagctgcaaaaaacatcttaactcagctgtgggttttttgtgggttcttgtttgttttttggcatgaattgtcatctttggtgtttttttaacccccagcccctcaaaaaaataaggcctccaggtatcaagatctcatattaggattttctgtccttaattttttgagcaaaatctggaaaatgtgaaagcatatttagattttatatactatctgaaatgtgatttgttaagattcttaaatttgggcctcttagaataattttgaatgagatctaccgactcacttgtgagaatatttttcacagattatctttgggccttttcattagaaagctgtttgtttgtccccctgttggtacatttggttacctcattttgccgtttcagattgtgaaagctcacaggggtgttttttggaatcatttgctgagtcattttctcaaatcatattccattgtatcagttaacatatagttttaaatgtatgtattataaatatctgtaaccaaatcatttgaaggcttgataaatttttaacaaagtttgtacattttttatgaaagttactagtaatgctttactaagtagtgcaatgaatttttatttttaatccctgtgcccaattttggagttgagagggttgttggtaataaatgtatgatgtacacttaaaaaaaaaaat

SEQ ID NO: 453689 - DNA, 4419 bp, Homo sapiens
cggaacccggtcgaaagggtcctctctggcgtccttctgcttccgtgggtttctggataggctgcgttttgttctcaggggatgcaagttcttcctttcagggttgaagcgtgagagaggttggtttttgaaacgggagtgtttcaggttattgaggtccaaaaagaaataaagtttttgtttacgtctgtatggcttgtaagagtgaagatagtccaagtcctaagagacagcgcctctctcattcagtctttgattatacatcagcatcaccagctccctcaccaccaatgcgaccatgggagatgacatcaaataggcagcccccttcagttcgaccaagccaacatcacttctcaggggaacgatgcaacacacctgcacgcaacagaagaagtcctcctgtcaggcgccagagaggaagaagggatcgtctgtctcgacataattccattagtcaagatgaaaactatcaccatctcccttacgcacagcagcaagcaatagaggagcctcgagccttccaccctccgaatgtatctccccgtctgctacatcctgctgctcatccaccccagcagaatgcagtcatggttgacatacatgatcagctccatcaaggaacagtccctgtttcttacacagtaacaacagtggcaccacatgggattccactctgcacaggccagcacatccctgcttgtagtacacagcaggtcccaggatgctctgtggttttcagtggacagcacctccctgtctgtagtgtgcctcctccaatgcttcaggcatgttcagttcagcacttaccagtaccatatgctgcattcccaccccttatttctagtgatccatttcttatacatcctcctcacctttctccccatcatcctcctcatttgccaccaccaggccagtttgtccctttccaaacacagcaatcacgatcgcctctgcaaaggatagaaaatgaagtggaactcttaggagaacatcttccagtaggaggttttacttaccctccatcagcccaccccccaacattacctccatcagctcccttgcagttcttaacacatgatcctttgcatcaggaggtgtcctttggagtaccttatcctccatttatgcctcggaggcttacaggacgtagtagataccgatcccagcagccaataccacctcccccttatcatcccagcttactgccatatgtgttatcaatgcttccagtgccacctgcagtgggcccaactttcagctttgaattagatgtagaagatggagaagtagaaaattacgaggccctgttaaacctggcagagcgactgggagaggcaaagcctcgtggactgactaaagcagatattgaacaacttccttcttatcggttcaatcctaacaaccaccagtcagaacagactttgtgtgtagtatgcatgtgtgattttgagtcaaggcagctacttagagtcttaccctgtaaccacgagttccatgccaagtgtgttgacaaatggcttaaggcaaatcgtacttgcccaatttgccgagctgatgcttcagaagtgcatcgggattcagaatgaccaacctaagaagcacaaatttagtttgggtgttcctcatcacatgtatatacggactatccattgaacttaatctgtgtggcttccagccctccctttaccaaaagggtcaatggacctttctttgcactgtgtgacttaatcaactataaaagcttacaattagtcttcacagttatgggattgttatactaaccgtgtgattggaactccaaagactttttctttagcttaattttgtgtgtgcactaacattccctggtttttgtgtgatcattccgagtgttgctgcaagattacagtggacgtgatcttttagcatgtgcttttataaaaagtggtagctacagatgatatagcaatctaccttatatagagccttcagaaactgtgagtggaaatgaatgcgcagcgtatgactgttggtgataagtgtatctgtgtgagtgtgtgcaactacttgtgtgagggcatggtagctaacgtgtgtatgagatcctatataccagcatgtaccaagaatgtgtgtgtagttttaattatgctgcaatgtataatctggtgtgttatttaaacagcactagtactgtacactggtttttttcccttgtgtttgctgttgcacactgattgctgagggtgcatcaattacaagcattgaatactccatccccttccctcccagtgaatggaatgagaaaagccttcttcctttgcttcaggcagctgtcaccttctctttattggtggtcctaagtgggtcacttaagaaaaaaaagtgtaacaaattctcactccatgaacctggtttttttttattctgttgtggaaatttttaaatctccaacttgctgtttccaaaaagaaggtgcaatatcatatatcatcagttagcaatattagcatttcaatcagtgatttgaatgttgatacttttttttcctttacatttccagtaagtttcttacagaaagtacctgtgattttttttaatgtttagatttgtagtctagtctattctgaagatatttgattaatatatttctaagaagaccactagtcccatgaagtctcaccttgttgacttccaccagaacaaaacctgttaattcagcttgacttctcatatgtgttctgtgttcaagctcctgtgggcaactcaattgttttaagaaaactctatttctgttcatattaattcacttgccagactccaattctgaaagttgtctagttcttccttcatcacacgtgcttctcatcgaaaccctggtttcaggatggatcaagtgctgttacagctcatgttccttagacctgatttgttttgatattttactgcctttccttttaatttttgtttgaatgagaaaagtttaatacaacaggtgtccagaatacttgcagtataaatgaagatttggtttttgtataaaaaaataatgctgttaaacaggagttgaccttcatttagttgatgtaatacatagctgtatggggttttttttagtaagttctttgagcataattcactttaaagtcatttttccagcaatgtttaaattactttctcattcttttagtgtattcaacattgtctgcctcttcctgcagttgatgtaattgctttgtttgcaatagcacaagctgcattattccagtcaggactgtgataacttgctgccagccccactcaactttcagttggctctgtgtcagttttccactcagtgttaactacttgttactgccatgctgcttgccctcccttgaagtgtctataagctcatcacagcctagagttaagtaaagtcaattcacagaagcacaattttgccctttgcgagacattgttgcctctatctagtcctacaagtagggttttgcatactgtgtttgcccctagggttgtcagtgcatcagaaatacttctaaatagtggtaaaaatgcacatggttaatgcacatgttacttttaaatcattaggatatccctcacctgttcctgatgaataaaaagtgtgttaaagaccaaaattcttggcataataatcagctacatacaaatcacatatagtttaatcttttttaatgaaaaaaaaatcatgtttaaaatggcaaaagcccatcttatacacttttatatagctgcaaaaaacatcttaactcagctgtgggttttttgtgggttcttgtttgttttttggcatgaattgtcatctttggtgtttttttaacccccagcccctcaaaaaaataaggcctccaggtatcaagatctcatattaggattttctgtccttaattttttgagcaaaatctggaaaatgtgaaagcatatttagattttatatactatctgaaatgtgatttgttaagattcttaaatttgggcctcttagaataattttgaatgagatctaccgactcacttgtgagaatatttttcacagattatctttgggccttttcattagaaagctgtttgtttgtccccctgttggtacatttggttacctcattttgccgtttcagattgtgaaagctcacaggggtgttttttggaatcatttgctgagtcattttctcaaatcatattccattgtatcagttaacatatagttttaaatgtatgtattataaatatctgtaaccaaatcatttgaaggcttgataaatttttaacaaagtttgtacattttttatgaaagttactagtaatgctttactaagtagtgcaatgaatttttatttttaatccctgtgcccaattttggagttgagagggttgttggtaataaatgtatgatgtacacttaaaaaaaaaaat

SEQ ID NO: 453690 - DNA, 4485 bp, Homo sapiens
cgcccccttccccctcggggtggaaacaaagggggttcggcgcgcggtgcggagcctgggggaaaagggaggagcgctccggtggtctggcgcgctgggctcgctaggtttgtgctggcgaggggacggggtgggacgggcgacccggacccaagaagtgggaggaccgcgcgtgtcgcggcctagcggcgaggggagtcgcctgcgcgcgcagcggaggccagtgcgccggcgcatagggagcccgggtctgtgatcgccgaggcgggagtgaagatagtccaagtcctaagagacagcgcctctctcattcagtctttgattatacatcagcatcaccagctccctcaccaccaatgcgaccatgggagatgacatcaaataggcagcccccttcagttcgaccaagccaacatcacttctcaggggaacgatgcaacacacctgcacgcaacagaagaagtcctcctgtcaggcgccagagaggaagaagggatcgtctgtctcgacataattccattagtcaagatgaaaactatcaccatctcccttacgcacagcagcaagcaatagaggagcctcgagccttccaccctccgaatgtatctccccgtctgctacatcctgctgctcatccaccccagcagaatgcagtcatggttgacatacatgatcagctccatcaaggaacagtccctgtttcttacacagtaacaacagtggcaccacatgggattccactctgcacaggccagcacatccctgcttgtagtacacagcaggtcccaggatgctctgtggttttcagtggacagcacctccctgtctgtagtgtgcctcctccaatgcttcaggcatgttcagttcagcacttaccagtaccatatgctgcattcccaccccttatttctagtgatccatttcttatacatcctcctcacctttctccccatcatcctcctcatttgccaccaccaggccagtttgtccctttccaaacacagcaatcacgatcgcctctgcaaaggatagaaaatgaagtggaactcttaggagaacatcttccagtaggaggttttacttaccctccatcagcccaccccccaacattacctccatcagctcccttgcagttcttaacacatgatcctttgcatcaggaggtgtcctttggagtaccttatcctccatttatgcctcggaggcttacaggacgtagtagataccgatcccagcagccaataccacctcccccttatcatcccagcttactgccatatgtgttatcaatgcttccagtgccacctgcagtgggcccaactttcagctttgaattagatgtagaagatggagaagtagaaaattacgaggccctgttaaacctggcagagcgactgggagaggcaaagcctcgtggactgactaaagcagatattgaacaacttccttcttatcggttcaatcctaacaaccaccagtcagaacagactttgtgtgtagtatgcatgtgtgattttgagtcaaggcagctacttagagtcttaccctgtaaccacgagttccatgccaagtgtgttgacaaatggcttaaggcaaatcgtacttgcccaatttgccgagctgatgcttcagaagtgcatcgggattcagaatgaccaacctaagaagcacaaatttagtttgggtgttcctcatcacatgtatatacggactatccattgaacttaatctgtgtggcttccagccctccctttaccaaaagggtcaatggacctttctttgcactgtgtgacttaatcaactataaaagcttacaattagtcttcacagttatgggattgttatactaaccgtgtgattggaactccaaagactttttctttagcttaattttgtgtgtgcactaacattccctggtttttgtgtgatcattccgagtgttgctgcaagattacagtggacgtgatcttttagcatgtgcttttataaaaagtggtagctacagatgatatagcaatctaccttatatagagccttcagaaactgtgagtggaaatgaatgcgcagcgtatgactgttggtgataagtgtatctgtgtgagtgtgtgcaactacttgtgtgagggcatggtagctaacgtgtgtatgagatcctatataccagcatgtaccaagaatgtgtgtgtagttttaattatgctgcaatgtataatctggtgtgttatttaaacagcactagtactgtacactggtttttttcccttgtgtttgctgttgcacactgattgctgagggtgcatcaattacaagcattgaatactccatccccttccctcccagtgaatggaatgagaaaagccttcttcctttgcttcaggcagctgtcaccttctctttattggtggtcctaagtgggtcacttaagaaaaaaaagtgtaacaaattctcactccatgaacctggtttttttttattctgttgtggaaatttttaaatctccaacttgctgtttccaaaaagaaggtgcaatatcatatatcatcagttagcaatattagcatttcaatcagtgatttgaatgttgatacttttttttcctttacatttccagtaagtttcttacagaaagtacctgtgattttttttaatgtttagatttgtagtctagtctattctgaagatatttgattaatatatttctaagaagaccactagtcccatgaagtctcaccttgttgacttccaccagaacaaaacctgttaattcagcttgacttctcatatgtgttctgtgttcaagctcctgtgggcaactcaattgttttaagaaaactctatttctgttcatattaattcacttgccagactccaattctgaaagttgtctagttcttccttcatcacacgtgcttctcatcgaaaccctggtttcaggatggatcaagtgctgttacagctcatgttccttagacctgatttgttttgatattttactgcctttccttttaatttttgtttgaatgagaaaagtttaatacaacaggtgtccagaatacttgcagtataaatgaagatttggtttttgtataaaaaaataatgctgttaaacaggagttgaccttcatttagttgatgtaatacatagctgtatggggttttttttagtaagttctttgagcataattcactttaaagtcatttttccagcaatgtttaaattactttctcattcttttagtgtattcaacattgtctgcctcttcctgcagttgatgtaattgctttgtttgcaatagcacaagctgcattattccagtcaggactgtgataacttgctgccagccccactcaactttcagttggctctgtgtcagttttccactcagtgttaactacttgttactgccatgctgcttgccctcccttgaagtgtctataagctcatcacagcctagagttaagtaaagtcaattcacagaagcacaattttgccctttgcgagacattgttgcctctatctagtcctacaagtagggttttgcatactgtgtttgcccctagggttgtcagtgcatcagaaatacttctaaatagtggtaaaaatgcacatggttaatgcacatgttacttttaaatcattaggatatccctcacctgttcctgatgaataaaaagtgtgttaaagaccaaaattcttggcataataatcagctacatacaaatcacatatagtttaatcttttttaatgaaaaaaaaatcatgtttaaaatggcaaaagcccatcttatacacttttatatagctgcaaaaaacatcttaactcagctgtgggttttttgtgggttcttgtttgttttttggcatgaattgtcatctttggtgtttttttaacccccagcccctcaaaaaaataaggcctccaggtatcaagatctcatattaggattttctgtccttaattttttgagcaaaatctggaaaatgtgaaagcatatttagattttatatactatctgaaatgtgatttgttaagattcttaaatttgggcctcttagaataattttgaatgagatctaccgactcacttgtgagaatatttttcacagattatctttgggccttttcattagaaagctgtttgtttgtccccctgttggtacatttggttacctcattttgccgtttcagattgtgaaagctcacaggggtgttttttggaatcatttgctgagtcattttctcaaatcatattccattgtatcagttaacatatagttttaaatgtatgtattataaatatctgtaaccaaatcatttgaaggcttgataaatttttaacaaagtttgtacattttttatgaaagttactagtaatgctttactaagtagtgcaatgaatttttatttttaatccctgtgcccaattttggagttgagagggttgttggtaataaatgtatgatgtacacttaaaaaaaaaaat

SEQ ID NO: 453691 - DNA, 4674 bp, Homo sapiens
gtcctttaggatttcggaattaacaccagcagaaaaagttaccaataggtatatgggaaacaggaaggacgtggtgttcttgggctgtgctgttttgcctccaacagtttttgtaagagagatccattgccagaggcaacctttgccatctttatgttttgatgtttaaaattaatttttaatttctttcctgtcttcgctagcagaatcatcaaatacctagaaaatccagactatccttcataggcgtgattctccacattggtgcagctagccatgaactatccttttcttcctctttttcccagatatctcccggggccaattcagcatctctacctggccatcctaacaaggtgatttgtgaaagggtgagacttcagagcctgttccctctcctcccaagtgatcagaacactaccgttcaagaggatgctcacttcaaagctttcttccagagtgaagatagtccaagtcctaagagacagcgcctctctcattcagtctttgattatacatcagcatcaccagctccctcaccaccaatgcgaccatgggagatgacatcaaataggcagcccccttcagttcgaccaagccaacatcacttctcaggggaacgatgcaacacacctgcacgcaacagaagaagtcctcctgtcaggcgccagagaggaagaagggatcgtctgtctcgacataattccattagtcaagatgaaaactatcaccatctcccttacgcacagcagcaagcaatagaggagcctcgagccttccaccctccgaatgtatctccccgtctgctacatcctgctgctcatccaccccagcagaatgcagtcatggttgacatacatgatcagctccatcaaggaacagtccctgtttcttacacagtaacaacagtggcaccacatgggattccactctgcacaggccagcacatccctgcttgtagtacacagcaggtcccaggatgctctgtggttttcagtggacagcacctccctgtctgtagtgtgcctcctccaatgcttcaggcatgttcagttcagcacttaccagtaccatatgctgcattcccaccccttatttctagtgatccatttcttatacatcctcctcacctttctccccatcatcctcctcatttgccaccaccaggccagtttgtccctttccaaacacagcaatcacgatcgcctctgcaaaggatagaaaatgaagtggaactcttaggagaacatcttccagtaggaggttttacttaccctccatcagcccaccccccaacattacctccatcagctcccttgcagttcttaacacatgatcctttgcatcaggaggtgtcctttggagtaccttatcctccatttatgcctcggaggcttacaggacgtagtagataccgatcccagcagccaataccacctcccccttatcatcccagcttactgccatatgtgttatcaatgcttccagtgccacctgcagtgggcccaactttcagctttgaattagatgtagaagatggagaagtagaaaattacgaggccctgttaaacctggcagagcgactgggagaggcaaagcctcgtggactgactaaagcagatattgaacaacttccttcttatcggttcaatcctaacaaccaccagtcagaacagactttgtgtgtagtatgcatgtgtgattttgagtcaaggcagctacttagagtcttaccctgtaaccacgagttccatgccaagtgtgttgacaaatggcttaaggcaaatcgtacttgcccaatttgccgagctgatgcttcagaagtgcatcgggattcagaatgaccaacctaagaagcacaaatttagtttgggtgttcctcatcacatgtatatacggactatccattgaacttaatctgtgtggcttccagccctccctttaccaaaagggtcaatggacctttctttgcactgtgtgacttaatcaactataaaagcttacaattagtcttcacagttatgggattgttatactaaccgtgtgattggaactccaaagactttttctttagcttaattttgtgtgtgcactaacattccctggtttttgtgtgatcattccgagtgttgctgcaagattacagtggacgtgatcttttagcatgtgcttttataaaaagtggtagctacagatgatatagcaatctaccttatatagagccttcagaaactgtgagtggaaatgaatgcgcagcgtatgactgttggtgataagtgtatctgtgtgagtgtgtgcaactacttgtgtgagggcatggtagctaacgtgtgtatgagatcctatataccagcatgtaccaagaatgtgtgtgtagttttaattatgctgcaatgtataatctggtgtgttatttaaacagcactagtactgtacactggtttttttcccttgtgtttgctgttgcacactgattgctgagggtgcatcaattacaagcattgaatactccatccccttccctcccagtgaatggaatgagaaaagccttcttcctttgcttcaggcagctgtcaccttctctttattggtggtcctaagtgggtcacttaagaaaaaaaagtgtaacaaattctcactccatgaacctggtttttttttattctgttgtggaaatttttaaatctccaacttgctgtttccaaaaagaaggtgcaatatcatatatcatcagttagcaatattagcatttcaatcagtgatttgaatgttgatacttttttttcctttacatttccagtaagtttcttacagaaagtacctgtgattttttttaatgtttagatttgtagtctagtctattctgaagatatttgattaatatatttctaagaagaccactagtcccatgaagtctcaccttgttgacttccaccagaacaaaacctgttaattcagcttgacttctcatatgtgttctgtgttcaagctcctgtgggcaactcaattgttttaagaaaactctatttctgttcatattaattcacttgccagactccaattctgaaagttgtctagttcttccttcatcacacgtgcttctcatcgaaaccctggtttcaggatggatcaagtgctgttacagctcatgttccttagacctgatttgttttgatattttactgcctttccttttaatttttgtttgaatgagaaaagtttaatacaacaggtgtccagaatacttgcagtataaatgaagatttggtttttgtataaaaaaataatgctgttaaacaggagttgaccttcatttagttgatgtaatacatagctgtatggggttttttttagtaagttctttgagcataattcactttaaagtcatttttccagcaatgtttaaattactttctcattcttttagtgtattcaacattgtctgcctcttcctgcagttgatgtaattgctttgtttgcaatagcacaagctgcattattccagtcaggactgtgataacttgctgccagccccactcaactttcagttggctctgtgtcagttttccactcagtgttaactacttgttactgccatgctgcttgccctcccttgaagtgtctataagctcatcacagcctagagttaagtaaagtcaattcacagaagcacaattttgccctttgcgagacattgttgcctctatctagtcctacaagtagggttttgcatactgtgtttgcccctagggttgtcagtgcatcagaaatacttctaaatagtggtaaaaatgcacatggttaatgcacatgttacttttaaatcattaggatatccctcacctgttcctgatgaataaaaagtgtgttaaagaccaaaattcttggcataataatcagctacatacaaatcacatatagtttaatcttttttaatgaaaaaaaaatcatgtttaaaatggcaaaagcccatcttatacacttttatatagctgcaaaaaacatcttaactcagctgtgggttttttgtgggttcttgtttgttttttggcatgaattgtcatctttggtgtttttttaacccccagcccctcaaaaaaataaggcctccaggtatcaagatctcatattaggattttctgtccttaattttttgagcaaaatctggaaaatgtgaaagcatatttagattttatatactatctgaaatgtgatttgttaagattcttaaatttgggcctcttagaataattttgaatgagatctaccgactcacttgtgagaatatttttcacagattatctttgggccttttcattagaaagctgtttgtttgtccccctgttggtacatttggttacctcattttgccgtttcagattgtgaaagctcacaggggtgttttttggaatcatttgctgagtcattttctcaaatcatattccattgtatcagttaacatatagttttaaatgtatgtattataaatatctgtaaccaaatcatttgaaggcttgataaatttttaacaaagtttgtacattttttatgaaagttactagtaatgctttactaagtagtgcaatgaatttttatttttaatccctgtgcccaattttggagttgagagggttgttggtaataaatgtatgatgtacacttaaaaaaaaaaat

SEQ ID NO: 453692 - DNA, 4410 bp, Homo sapiens
ttaggcatttcatctgggtattttcaggctccagtccaggcctggccttccacatctggtgctttaatatctacctgggacctctgatgtccacatctggaacctgcatttcaccctctatctttggtgcagagatatctacatttcctttcattttgggtcctttaagatccaggtcaacatctggcaaagacatcttaggagctctgaagtgcatctcaggcatcttaaacttcgggccataacccctatccacttctctctctcgtcgctaccaacaccaccctctacactgcaattgacctgaaggatgccttcttatacatcctcctcacctttctccccatcatcctcctcatttgccaccaccaggccagtttgtccctttccaaacacagcaatcacgatcgcctctgcaaaggatagaaaatgaagtggaactcttaggagaacatcttccagtaggaggttttacttaccctccatcagcccaccccccaacattacctccatcagctcccttgcagttcttaacacatgatcctttgcatcaggaggtgtcctttggagtaccttatcctccatttatgcctcggaggcttacaggacgtagtagataccgatcccagcagccaataccacctcccccttatcatcccagcttactgccatatgtgttatcaatgcttccagtgccacctgcagtgggcccaactttcagctttgaattagatgtagaagatggagaagtagaaaattacgaggccctgttaaacctggcagagcgactgggagaggcaaagcctcgtggactgactaaagcagatattgaacaacttccttcttatcggttcaatcctaacaaccaccagtcagaacagactttgtgtgtagtatgcatgtgtgattttgagtcaaggcagctacttagagtcttaccctgtaaccacgagttccatgccaagtgtgttgacaaatggcttaaggcaaatcgtacttgcccaatttgccgagctgatgcttcagaagtgcatcgggattcagaatgaccaacctaagaagcacaaatttagtttgggtgttcctcatcacatgtatatacggactatccattgaacttaatctgtgtggcttccagccctccctttaccaaaagggtcaatggacctttctttgcactgtgtgacttaatcaactataaaagcttacaattagtcttcacagttatgggattgttatactaaccgtgtgattggaactccaaagactttttctttagcttaattttgtgtgtgcactaacattccctggtttttgtgtgatcattccgagtgttgctgcaagattacagtggacgtgatcttttagcatgtgcttttataaaaagtggtagctacagatgatatagcaatctaccttatatagagccttcagaaactgtgagtggaaatgaatgcgcagcgtatgactgttggtgataagtgtatctgtgtgagtgtgtgcaactacttgtgtgagggcatggtagctaacgtgtgtatgagatcctatataccagcatgtaccaagaatgtgtgtgtagttttaattatgctgcaatgtataatctggtgtgttatttaaacagcactagtactgtacactggtttttttcccttgtgtttgctgttgcacactgattgctgagggtgcatcaattacaagcattgaatactccatccccttccctcccagtgaatggaatgagaaaagccttcttcctttgcttcaggcagctgtcaccttctctttattggtggtcctaagtgggtcacttaagaaaaaaaagtgtaacaaattctcactccatgaacctggtttttttttattctgttgtggaaatttttaaatctccaacttgctgtttccaaaaagaaggtgcaatatcatatatcatcagttagcaatattagcatttcaatcagtgatttgaatgttgatacttttttttcctttacatttccagtaagtttcttacagaaagtacctgtgattttttttaatgtttagatttgtagtctagtctattctgaagatatttgattaatatatttctaagaagaccactagtcccatgaagtctcaccttgttgacttccaccagaacaaaacctgttaattcagcttgacttctcatatgtgttctgtgttcaagctcctgtgggcaactcaattgttttaagaaaactctatttctgttcatattaattcacttgccagactccaattctgaaagttgtctagttcttccttcatcacacgtgcttctcatcgaaaccctggtttcaggatggatcaagtgctgttacagctcatgttccttagacctgatttgttttgatattttactgcctttccttttaatttttgtttgaatgagaaaagtttaatacaacaggtgtccagaatacttgcagtataaatgaagatttggtttttgtataaaaaaataatgctgttaaacaggagttgaccttcatttagttgatgtaatacatagctgtatggggttttttttagtaagttctttgagcataattcactttaaagtcatttttccagcaatgtttaaattactttctcattcttttagtgtattcaacattgtctgcctcttcctgcagttgatgtaattgctttgtttgcaatagcacaagctgcattattccagtcaggactgtgataacttgctgccagccccactcaactttcagttggctctgtgtcagttttccactcagtgttaactacttgttactgccatgctgcttgccctcccttgaagtgtctataagctcatcacagcctagagttaagtaaagtcaattcacagaagcacaattttgccctttgcgagacattgttgcctctatctagtcctacaagtagggttttgcatactgtgtttgcccctagggttgtcagtgcatcagaaatacttctaaatagtggtaaaaatgcacatggttaatgcacatgttacttttaaatcattaggatatccctcacctgttcctgatgaataaaaagtgtgttaaagaccaaaattcttggcataataatcagctacatacaaatcacatatagtttaatcttttttaatgaaaaaaaaatcatgtttaaaatggcaaaagcccatcttatacacttttatatagctgcaaaaaatttatatctgtacagatctaacactacgacactcagtattcattttattgaagcatgcaagtaaagcactttttctaatttatatagaggtatctaattaacacagcacattgtactaatgactaggagtagcagctttttcttctctccctctatgaattcttataatgtccctttttctgtaagtttttgagaggcaattggcaatttaggaggcagcagggtctgttttggtcaaatcttgaatttcgttgttgcactctagtgactgatctttgggaatgtcttgtctttgcatggggctcatagagatgtgtgcagacttgcttattgtggttagtgtgtatcaggaacacacacacaggtgttctgaccagctcaggcttgccacagtgagcaactctgtggctagcaaaagagaagtttatttgtgcccagccattggtcaccttgggtgatgcaccagatagcaggcagatgttggttcattggccttcgtcctctttcctcctaaaataatattggctttaccatcttaactcagctgtgggttttttgtgggttcttgtttgttttttggcatgaattgtcatctttggtgtttttttaacccccagcccctcaaaaaaataaggcctccaggtatcaagatctcatattaggattttctgtccttaattttttgagcaaaatctggaaaatgtgaaagcatatttagattttatatactatctgaaatgtgatttgttaagattcttaaatttgggcctcttagaataattttgaatgagatctaccgactcacttgtgagaatatttttcacagattatctttgggccttttcattagaaagctgtttgtttgtccccctgttggtacatttggttacctcattttgccgtttcagattgtgaaagctcacaggggtgttttttggaatcatttgctgagtcattttctcaaatcatattccattgtatcagttaacatatagttttaaatgtatgtattataaatatctgtaaccaaatcatttgaaggcttgataaatttttaacaaagtttgtacattttttatgaaagttactagtaatgctttactaagtagtgcaatgaatttttatttttaatccctgtgcccaattttggagttgagagggttgttggtaataaatgtatgatgtacacttaaaaaaaaaaat

SEQ ID NO: 453693 - DNA, 408 bp, Homo sapiens
ccaaggcagcacagcagagatttgtacgagagaagacatggctgactggccaaacccttgctttcctgggcctttgcaagatgcttggttgtgttgaggtttttaaatatatattttgtactttgtggagagaatgtgtgtgtgtggcagggggccccgccagggctggggacagagggtgtcaaacattcgtgagctggggactcagggaccggtgctgcaggagtgtcctgcccatgccccagtcggccccatctctcatccttttggataagtttctattctgtcagtgttaaagattttgttttgttggacatttttttcgaatcttaatttattattttttttatatttattgttagaaaatgacttatttctgctctggaataaagttgcagatgattcaaa

SEQ ID NO: 453694 - DNA, 1001 bp, Homo sapiens
ggggcagctgaaaactttccacaggctgcctgctcgcctggattttttaagtttgaggcatctgagagcccctgcttggagtgccctgagcacacgctgccatcccctgagggtgccacctcctgcgagtgtgaggaaggcttcttccgggcacctcaggacccagcgtcgatgccttgcacacgacccccctccgccccacactacctcacagccgtgggcatgggtgccaaggtggagctgcgctggacgccccctcaggacagcgggggccgcgaggacattgtctacagcgtcacctgcgaacagtgctggcccgagtctggggaatgcgggccgtgtgaggccagtgtgcgctactcggagcctcctcacggactgacccgcaccagtgtgacagtgagcgacctggagccccacatgaactacaccttcaccgtggaggcccgcaatggcgtctcaggcctggtaaccagccgcagcttccgtactgccagtgtcagcatcaaccagacagagccccccaaggtgaggctggagggccgcagcaccacctcgcttagcgtctcctggagcatccccccgccgcagcagagccgagtgtggaagtacgaggtcacttaccgcaagaagggagactccaacagctacaatgtgcgccgcaccgagggtttctccgtgaccctggacgacctggccccagacaccacctacctggtccaggtgcaggcactgacgcaggagggccagggggccggcagcaaggtgcacgaattccagacgctgtcccggagggatctggcaacttggcgtgatggcggcgtggtgtcgggtggctgtctgtggtggcggagtggtcttttccccgcgggagacccgtgccccgcccgggggtgtcgcccgtgcatcgagtccctgatttgccctttggccccgggtggctccgaccccgtccgcagggcgaggggcgcgcgactcagggggcgaagtggtgcccctcc

SEQ ID NO: 453695 - DNA, 2896 bp, Homo sapiens
tattcatgcgggggcgggggcttagctcgtagatatcgtgggcacctcggcggtcaatttcatagcacacgacccccctccgccccacactacctcacagccgtgggcatgggtgccaaggtggagctgcgctggacgccccctcaggacagcgggggccgcgaggacattgtctacagcgtcacctgcgaacagtgctggcccgagtctggggaatgcgggccgtgtgaggccagtgtgcgctactcggagcctcctcacggactgacccgcaccagtgtgacagtgagcgacctggagccccacatgaactacaccttcaccgtggaggcccgcaatggcgtctcaggcctggtaaccagccgcagcttccgtactgccagtgtcagcatcaaccagacagagccccccaaggtgaggctggagggccgcagcaccacctcgcttagcgtctcctggagcatccccccgccgcagcagagccgagtgtggaagtacgaggtcacttaccgcaagaagggagactccaacagctacaatgtgcgccgcaccgagggtttctccgtgaccctggacgacctggccccagacaccacctacctggtccaggtgcaggcactgacgcaggagggccagggggccggcagcaaggtgcacgaattccagacgctgtccccggagggatctggcaacttggcggtgattggcggcgtggctgtcggtgtggtcctgcttctggtgctggcaggagttggcttctttatccaccgcaggaggaagaaccagcgtgcccgccagtccccggaggacgtttacttctccaagtcagaacaactgaagcccctgaagacatacgtggacccccacacatatgaggaccccaaccaggctgtgttgaagttcactaccgagatccatccatcctgtgtcactcggcagaaggtgatcggagcaggagagtttggggaggtgtacaagggcatgctgaagacatcctcggggaagaaggaggtgccggtggccatcaagacgctgaaagccggctacacagagaagcagcgagtggacttcctcggcgaggccggcatcatgggccagttcagccaccacaacatcatccgcctagagggcgtcatctccaaatacaagcccatgatgatcatcactgagtacatggagaatggggccctggacaagttccttcgggagaaggatggcgagttcagcgtgctgcagctggtgggcatgctgcggggcatcgcagctggcatgaagtacctggccaacatgaactatgtgcaccgtgacctggctgcccgcaacatcctcgtcaacagcaacctggtctgcaaggtgtctgactttggcctgtcccgcgtgctggaggacgaccccgaggccacctacaccaccagtggcggcaagatccccatccgctggaccgccccggaggccatttcctaccggaagttcacctctgccagcgacgtgtggagctttggcattgtcatgtgggaggtgatgacctatggcgagcggccctactgggagttgtccaaccacgaggtgatgaaagccatcaatgatggcttccggctccccacacccatggactgcccctccgccatctaccagctcatgatgcagtgctggcagcaggagcgtgcccgccgccccaagttcgctgacatcgtcagcatcctggacaagctcattcgtgcccctgactccctcaagaccctggctgactttgacccccgcgtgtctatccggctccccagcacgagcggctcggagggggtgcccttccgcacggtgtccgagtggctggagtccatcaagatgcagcagtatacggagcacttcatggcggccggctacactgccatcgagaaggtggtgcagatgaccaacgacgacatcaagaggattggggtgcggctgcccggccaccagaagcgcatcgcctacagcctgctgggactcaaggaccaggtgaacactgtggggatccccatctgagcctcgacagggcctggagccccatcggccaagaatacttgaagaaacagagtggcctccctgctgtgccatgctgggccactggggactttatttatttctagttctttcctccccctgcaacttccgctgaggggtctcggatgacaccctggcctgaactgaggagatgaccagggatgctgggctgggccctctttccctgcgagacgcacacagctgagcacttagcaggcaccgccacgtcccagcatccctggagcaggagccccgccacagccttcggacagacatataggatattcccaagccgaccttccctccgccttctcccacatgaggccatctcaggagatggagggcttggcccagcgccaagtaaacagggtacctcaagccccatttcctcacactaagagggcagactgtgaacttgactgggtgagacccaaagcggtccctgtccctctagtgccttctttagaccctcgggccccatcctcatccctgactggccaaacccttgctttcctgggcctttgcaagatgcttggttgtgttgaggtttttaaatatatattttgtactttgtggagagaatgtgtgtgtgtggcagggggccccgccagggctggggacagagggtgtcaaacattcgtgagctggggactcagggaccggtgctgcaggagtgtcctgcccatgccccagtcggccccatctctcatccttttggataagtttctattctgtcagtgttaaagattttgttttgttggacatttttttcgaatcttaatttattattttttttatatttattgttagaaaatgacttatttctgctctggaataaagttgcagatgattcaaa

SEQ ID NO: 453696 - DNA, 2562 bp, Homo sapiens
ggcaaggaagtggtactgctggactttgccgcagcttccgtactgccagtgtcagcatcaaccagacagagccccccaaggtgaggctggagggccgcagcaccacctcgcttagcgtctcctggagcatccccccgccgcagcagagccgagtgtggaagtacgaggtcacttaccgcaagaagggagactccaacagctacaatgtgcgccgcaccgagggtttctccgtgaccctggacgacctggccccagacaccacctacctggtccaggtgcaggcactgacgcaggagggccagggggccggcagcaaggtgcacgaattccagacgctgtccccggagggatctggcaacttggcggtgattggcggcgtggctgtcggtgtggtcctgcttctggtgctggcaggagttggcttctttatccaccgcaggaggaagaaccagcgtgcccgccagtccccggaggacgtttacttctccaagtcagaacaactgaagcccctgaagacatacgtggacccccacacatatgaggaccccaaccaggctgtgttgaagttcactaccgagatccatccatcctgtgtcactcggcagaaggtgatcggagcaggagagtttggggaggtgtacaagggcatgctgaagacatcctcggggaagaaggaggtgccggtggccatcaagacgctgaaagccggctacacagagaagcagcgagtggacttcctcggcgaggccggcatcatgggccagttcagccaccacaacatcatccgcctagagggcgtcatctccaaatacaagcccatgatgatcatcactgagtacatggagaatggggccctggacaagttccttcgggagaaggatggcgagttcagcgtgctgcagctggtgggcatgctgcggggcatcgcagctggcatgaagtacctggccaacatgaactatgtgcaccgtgacctggctgcccgcaacatcctcgtcaacagcaacctggtctgcaaggtgtctgactttggcctgtcccgcgtgctggaggacgaccccgaggccacctacaccaccagtggcggcaagatccccatccgctggaccgccccggaggccatttcctaccggaagttcacctctgccagcgacgtgtggagctttggcattgtcatgtgggaggtgatgacctatggcgagcggccctactgggagttgtccaaccacgaggtgatgaaagccatcaatgatggcttccggctccccacacccatggactgcccctccgccatctaccagctcatgatgcagtgctggcagcaggagcgtgcccgccgccccaagttcgctgacatcgtcagcatcctggacaagctcattcgtgcccctgactccctcaagaccctggctgactttgacccccgcgtgtctatccggctccccagcacgagcggctcggagggggtgcccttccgcacggtgtccgagtggctggagtccatcaagatgcagcagtatacggagcacttcatggcggccggctacactgccatcgagaaggtggtgcagatgaccaacgacgacatcaagaggattggggtgcggctgcccggccaccagaagcgcatcgcctacagcctgctgggactcaaggaccaggtgaacactgtggggatccccatctgagcctcgacagggcctggagccccatcggccaagaatacttgaagaaacagagtggcctccctgctgtgccatgctgggccactggggactttatttatttctagttctttcctccccctgcaacttccgctgaggggtctcggatgacaccctggcctgaactgaggagatgaccagggatgctgggctgggccctctttccctgcgagacgcacacagctgagcacttagcaggcaccgccacgtcccagcatccctggagcaggagccccgccacagccttcggacagacatataggatattcccaagccgaccttccctccgccttctcccacatgaggccatctcaggagatggagggcttggcccagcgccaagtaaacagggtacctcaagccccatttcctcacactaagagggcagactgtgaacttgactgggtgagacccaaagcggtccctgtccctctagtgccttctttagaccctcgggccccatcctcatccctgactggccaaacccttgctttcctgggcctttgcaagatgcttggttgtgttgaggtttttaaatatatattttgtactttgtggagagaatgtgtgtgtgtggcagggggccccgccagggctggggacagagggtgtcaaacattcgtgagctggggactcagggaccggtgctgcaggagtgtcctgcccatgccccagtcggccccatctctcatccttttggataagtttctattctgtcagtgttaaagattttgttttgttggacatttttttcgaatcttaatttattattttttttatatttattgttagaaaatgacttatttctgctctggaataaagttgcagatgattcaaa

SEQ ID NO: 453697 - DNA, 3841 bp, Homo sapiens
gaggggcagaagttgcgcgcaggccggcgggcgggagcggacaccgaggccggcgtgcaggcgtgcgggtgtgcgggagccgggctcggggggatcggaccgagagcgagaagcgcggcatggagctccaggcagcccgcgcctgcttcgccctgctgtggggctgtgcgctggccgcggccgcggcggcgcagggcaaggaagtggtactgctggactttgctgcagctggaggggagctcggctggctcacacacccgtatggcaaagggtgggacctgatgcagaacatcatgaatgacatgccgatctacatgtactccgtgtgcaacgtgatgtctggcgaccaggacaactggctccgcaccaactgggtgtaccgaggagaggctgagcgtatcttcattgagctcaagtttactgtacgtgactgcaacagcttccctggtggcgccagctcctgcaaggagactttcaacctctactatgccgagtcggacctggactacggcaccaacttccagaagcgcctgttcaccaagattgacaccattgcgcccgatgagatcaccgtcagcagcgacttcgaggcacgccacgtgaagctgaacgtggaggagcgctccgtggggccgctcacccgcaaaggcttctacctggccttccaggatatcggtgcctgtgtggcgctgctctccgtccgtgtctactacaagaagtgccccgagctgctgcagggcctggcccacttccctgagaccatcgccggctctgatgcaccttccctggccactgtggccggcacctgtgtggaccatgccgtggtgccaccggggggtgaagagccccgtatgcactgtgcagtggatggcgagtggctggtgcccattgggcagtgcctgtgccaggcaggctacgagaaggtggaggatgcctgccaggcctgctcgcctggattttttaagtttgaggcatctgagagcccctgcttggagtgccctgagcacacgctgccatcccctgagggtgccacctcctgcgagtgtgaggaaggcttcttccgggcacctcaggacccagcgtcgatgccttgcacacgacccccctccgccccacactacctcacagccgtgggcatgggtgccaaggtggagctgcgctggacgccccctcaggacagcgggggccgcgaggacattgtctacagcgtcacctgcgaacagtgctggcccgagtctggggaatgcgggccgtgtgaggccagtgtgcgctactcggagcctcctcacggactgacccgcaccagtgtgacagtgagcgacctggagccccacatgaactacaccttcaccgtggaggcccgcaatggcgtctcaggcctggtaaccagccgcagcttccgtactgccagtgtcagcatcaaccagacagagccccccaaggtgaggctggagggccgcagcaccacctcgcttagcgtctcctggagcatccccccgccgcagcagagccgagtgtggaagtacgaggtcacttaccgcaagaagggagactccaacagctacaatgtgcgccgcaccgagggtttctccgtgaccctggacgacctggccccagacaccacctacctggtccaggtgcaggcactgacgcaggagggccagggggccggcagcaaggtgcacgaattccagacgctgtccccggagggatctggcaacttggcggtgattggcggcgtggctgtcggtgtggtcctgcttctggtgctggcaggagttggcttctttatccaccgcaggaggaagaaccagcgtgcccgccagtccccggaggacgtttacttctccaagtcagaacaactgaagcccctgaagacatacgtggacccccacacatatgaggaccccaaccaggctgtgttgaagttcactaccgagatccatccatcctgtgtcactcggcagaaggtgatcggagcaggagagtttggggaggtgtacaagggcatgctgaagacatcctcggggaagaaggaggtgccggtggccatcaagacgctgaaagccggctacacagagaagcagcgagtggacttcctcggcgaggccggcatcatgggccagttcagccaccacaacatcatccgcctagagggcgtcatctccaaatacaagcccatgatgatcatcactgagtacatggagaatggggccctggacaagttccttcgggagaaggatggcgagttcagcgtgctgcagctggtgggcatgctgcggggcatcgcagctggcatgaagtacctggccaacatgaactatgtgcaccgtgacctggctgcccgcaacatcctcgtcaacagcaacctggtctgcaaggtgtctgactttggcctgtcccgcgtgctggaggacgaccccgaggccacctacaccaccagtggcggcaagatccccatccgctggaccgccccggaggccatttcctaccggaagttcacctctgccagcgacgtgtggagctttggcattgtcatgtgggaggtgatgacctatggcgagcggccctactgggagttgtccaaccacgaggtgatgaaagccatcaatgatggcttccggctccccacacccatggactgcccctccgccatctaccagctcatgatgcagtgctggcagcaggagcgtgcccgccgccccaagttcgctgacatcgtcagcatcctggacaagctcattcgtgcccttccgcacggtgtccgagtggctggagtccatcaagatgcagcagtatacggagcacttcatggcggccggctacactgccatcgagaaggtggtgcagatgaccaacgacgacatcaagaggattggggtgcggctgcccggccaccagaagcgcatcgcctacagcctgctgggactcaaggaccaggtgaacactgtggggatccccatctgagcctcgacagggcctggagccccatcggccaagaatacttgaagaaacagagtggcctccctgctgtgccatgctgggccactggggactttatttatttctagttctttcctccccctgcaacttccgctgaggggtctcggatgacaccctggcctgaactgaggagatgaccagggatgctgggctgggccctctttccctgcgagacgcacacagctgagcacttagcaggcaccgccacgtcccagcatccctggagcaggagccccgccacagccttcggacagacatataggatattcccaagccgaccttccctccgccttctcccacatgaggccatctcaggagatggagggcttggcccagcgccaagtaaacagggtacctcaagccccatttcctcacactaagagggcagactgtgaacttgactgggtgagacccaaagcggtccctgtccctctagtgccttctttagaccctcgggccccatcctcatccctgactggccaaacccttgctttcctgggcctttgcaagatgcttggttgtgttgaggtttttaaatatatattttgtactttgtggagagaatgtgtgtgtgtggcagggggccccgccagggctggggacagagggtgtcaaacattcgtgagctggggactcagggaccggtgctgcaggagtgtcctgcccatgccccagtcggccccatctctcatccttttggataagtttctattctgtcagtgttaaagattttgttttgttggacatttttttcgaatcttaatttattattttttttatatttattgttagaaaatgacttatttctgctctggaataaagttgcagatgattcaaa

SEQ ID NO: 453698 - DNA, 1958 bp, Homo sapiens
gaggggcagaagttgcgcgcaggccggcgggcgggagcggacaccgaggccggcgtgcaggcgtgcgggtgtgcgggagccgggctcggggggatcggaccgagagcgagaagcgcggcatggagctccaggcagcccgcgcctgcttcgccctgctgtggggctgtgcgctggccgcggccgcggcggcgcagggcaaggaagtggtactgctggactttgctgcagctggaggggagctcggctggctcacacacccgtatggcaaagggtgggacctgatgcagaacatcatgaatgacatgccgatctacatgtactccgtgtgcaacgtgatgtctggcgaccaggacaactggctccgcaccaactgggtgtaccgaggagaggctgagcgtatcttcattgagctcaagtttactgtacgtgactgcaacagcttccctggtggcgccagctcctgcaaggagactttcaacctctactatgccgagtcggacctggactacggcaccaacttccagaagcgcctttcacctctgccagcgacgtgtggagctttggcattgtcatgtgggaggtgatgacctatggcgagcggccctactgggagttgtccaaccacgaggtgatgaaagccatcaatgatggcttccggctccccacacccatggactgcccctccgccatctaccagctcatgatgcagtgctggcagcaggagcgtgcccgccgccccaagttcgctgacatcgtcagcatcctggacaagctcattcgtgcccctgactccctcaagaccctggctgactttgacccccgcgtgtctatccggctccccagcacgagcggctcggagggggtgcccttccgcacggtgtccgagtggctggagtccatcaagatgcagcagtatacggagcacttcatggcggccggctacactgccatcgagaaggtggtgcagatgaccaacgacgacatcaagaggattggggtgcggctgcccggccaccagaagcgcatcgcctacagcctgctgggactcaaggaccaggtgaacactgtggggatccccatctgagcctcgacagggcctggagccccatcggccaagaatacttgaagaaacagagtggcctccctgctgtgccatgctgggccactggggactttatttatttctagttctttcctccccctgcaacttccgctgaggggtctcggatgacaccctggcctgaactgaggagatgaccagggatgctgggctgggccctctttccctgcgagacgcacacagctgagcacttagcaggcaccgccacgtcccagcatccctggagcaggagccccgccacagccttcggacagacatataggatattcccaagccgaccttccctccgccttctcccacatgaggccatctcaggagatggagggcttggcccagcgccaagtaaacagggtacctcaagccccatttcctcacactaagagggcagactgtgaacttgactgggtgagacccaaagcggtccctgtccctctagtgccttctttagaccctcgggccccatcctcatccctgactggccaaacccttgctttcctgggcctttgcaagatgcttggttgtgttgaggtttttaaatatatattttgtactttgtggagagaatgtgtgtgtgtggcagggggccccgccagggctggggacagagggtgtcaaacattcgtgagctggggactcagggaccggtgctgcaggagtgtcctgcccatgccccagtcggccccatctctcatccttttggataagtttctattctgtcagtgttaaagattttgttttgttggacatttttttcgaatcttaatttattattttttttatatttattgttagaaaatgacttatttctgctctggaataaagttgcagatgattcaaa

SEQ ID NO: 453699 - DNA, 3822 bp, Homo sapiens
gaggggcagaagttgcgcgcaggccggcgggcgggagcggacaccgaggccggcgtgcaggcgtgcgggtgtgcgggagccgggctcggggggatcggaccgagagcgagaagcgcggcatggagctccaggcagcccgcgcctgcttcgccctgctgtggggctgtgcgctggccgcggccgcggcggcgcagggcaaggaagtggtactgctggactttgctgcagctggaggggagctcggctggctcacacacccgtatggcaaagggtgggacctgatgcagaacatcatgaatgacatgccgatctacatgtactccgtgtgcaacgtgatgtctggcgaccaggacaactggctccgcaccaactgggtgtaccgaggagaggctgagcgtatcttcattgagctcaagtttactgtacgtgactgcaacagcttccctggtggcgccagctcctgcaaggagactttcaacctctactatgccgagtcggacctggactacggcaccaacttccagaagcgcctgttcaccaagattgacaccattgcgcccgatgagatcaccgtcagcagcgacttcgaggcacgccacgtgaagctgaacgtggaggagcgctccgtggggccgctcacccgcaaaggcttctacctggccttccaggatatcggtgcctgtgtggcgctgctctccgtccgtgtctactacaagaagtgccccgagctgctgcagggcctggcccacttccctgagaccatcgccggctctgatgcaccttccctggccactgtggccggcacctgtgtggaccatgccgtggtgccaccggggggtgaagagccccgtatgcactgtgcagtggatggcgagtggctggtgcccattgggcagtgcctgtgccaggcaggctacgagaaggtggaggatgcctgccaggcctgctcgcctggattttttaagtttgaggcatctgagagcccctgcttggagtgccctgagcacacgctgccatcccctgagggtgccacctcctgcgagtgtgaggaaggcttcttccgggcacctcaggacccagcgtcgatgccttgcacacgacccccctccgccccacactacctcacagccgtgggcatgggtgccaaggtggagctgcgctggacgccccctcaggacagcgggggccgcgaggacattgtctacagcgtcacctgcgaacagtgctggcccgagtctggggaatgcgggccgtgtgaggccagtgtgcgctactcggagcctcctcacggactgacccgcaccagtgtgacagtgagcgacctggagccccacatgaactacaccttcaccgtggaggcccgcaatggcgtctcaggcctggtaaccagccgcagcttccgtactgccagtgtcagcatcaaccagacagagccccccaaggtgaggctggagggccgcagcaccacctcgcttagcgtctcctggagcatccccccgccgcagcagagccgagtgtggaagtacgaggtcacttaccgcaagaagggagactccaacagctacaatgtgcgccgcaccgagggtttctccgtgaccctggacgacctggccccagacaccacctacctggtccaggtgcaggcactgacgcaggagggccagggggccggcagcaaggtgcacgaattccagacgctgtccccggagggatctggcaacttggcggtgattggcggcgtggctgtcggtgtggtcctgcttctggtgctggcaggagttggcttctttatccaccgcaggaggaagaaccagcgtgcccgccagtccccggaggacgtttacttctccaagtcagaacaactgaagcccctgaagacatacgtggacccccacacatatgaggaccccaaccaggctgtgttgaagttcactaccgagatccatccatcctgtgtcactcggcagaaggtgatcggagcaggagagtttggggaggtgtacaagggcatgctgaagacatcctcggggaagaaggaggtgccggtggccatcaagacgctgaaagccggctacacagagaagcagcgagtggacttcctcggcgaggccggcatcatgggccagttcagccaccacaacatcatccgcctagagggcgtcatctccaaatacaagcccatgatgatcatcactgagtacatggagaatggggccctggacaagttccttcgggagaaggatggcgagttcagcgtgctgcagctggtgggcatgctgcggggcatcgcagctggcatgaagtacctggccaacatgaactatgtgcaccgtgacctggctgcccgcaacatcctcgtcaacagcaacctggtctgcaaggtgtctgactttggcctgtcccgcgtgctggaggacgaccccgaggccacctacaccaccagtggcggcaagatccccatccgctggaccgccccggaggccatttcctaccggaagttcacctctgccagcgacgtgtggagctttggcattgtcatgtgggaggtgatgacctatggcgagcggccctactgggagttgtccaaccacgaggtgatgaaagccatcaatgatggcttccggctccccacacccatggactgcccctccgccatctaccagctcatgatgcagtgctggcagcaggagcgtgcccgccgccccaagttcgctgacatcgtcagcatcctggacaagctcattcgtgcccctgactccctcaagaccctggctgactttgacccccgcgtgtctatccggctccccagcacgagcggctcggagggggtgcccttccgcacggtgtccgagtggctggagtccatcaagatgcagcagtatacggagcacttcatggcggccggctacactgccatcgagaaggtggtgcagatgaccaacgacgacatcaagaggattggggtgcggctgcccggccaccagaagcgcatcgcctacagcctgctgggactcaaggaccaggtgaacactgtggggatccccatctgagcctcgacagggcctggagccccatcggccaagaatacttgaagaaacagagtggcctccctgctgtgccatgctgggccactggggactttatttatttctagttctttcctccccctgcaacttccgctgaggggtctcggatgacaccctggcctgaactgaggagatgaccagggatgctgggctgggccctctttccctgcgagacgcacacagctgagcacttagcaggcaccgccacgtcccagcatccctggagcaggagccccgccacagccttcggacagacatataggatattcccaagccgaccttccctccgccttctcccacatgaggccatctcaggagatggagggcttggcccagcgccaagtaaacagggtacctcaagccccatttctgactggccaaacccttgctttcctgggcctttgcaagatgcttggttgtgttgaggtttttaaatatatattttgtactttgtggagagaatgtgtgtgtgtggcagggggccccgccagggctggggacagagggtgtcaaacattcgtgagctggggactcagggaccggtgctgcaggagtgtcctgcccatgccccagtcggccccatctctcatccttttggataagtttctattctgtcagtgttaaagattttgttttgttggacatttttttcgaatcttaatttattattttttttatatttattgttagaaaatgacttatttctgctctggaataaagttgcagatgattcaaa

SEQ ID NO: 453700 - DNA, 3373 bp, Homo sapiens
gaggggcagaagttgcgcgcaggccggcgggcgggagcggacaccgaggccggcgtgcaggcgtgcgggtgtgcgggagccgggctcggggggatcggaccgagagcgagaagcgcggcatggagctccaggcagcccgcgcctgcttcgccctgctgtggggctgtgcgctggccgcggccgcggcggcgcagggcaaggaagtggtactgctggactttgctgcagctggaggggagctcggctggctcacacacccgtatggcaaagggtgggacctgatgcagaacatcatgaatgacatgccgatctacatgtactccgtgtgcaacgtgatgtctggcgaccaggacaactggctccgcaccaactgggtgtaccgaggagaggctgagcgtatcttcattgagctcaagtttactgtacgtgactgcaacagcttccctggtggcgccagctcctgcaaggagactttcaacctctactatgccgagtcggacctggactacggcaccaacttccagaagcgcctgttcaccaagattgacaccattgcgcccgatgagatcaccgtcagcagcgacttcgaggcacgccacgtgaagctgaacgtggaggagcgctccgtggggccgctcacccgcaaaggcttctacctggccttccaggatatcggtgcctgtgtggcgctgctctccgtccgtgtctactacaagaagtgccccgagctgctgcagggcctggcccacttccctgagaccatcgccggctctgatgcaccttccctggccactgtggccggcacctgtgtggaccatgccgtggtgccaccggggggtgaagagccccgtatgcactgtgcagtggatggcgagtggctggtgcccattgggcagtgcctgtgccaggcaggctacgagaaggtggaggatgcctgccaggcctgctcgcctggattttttaagtttgaggcatctgagagcccctgcttggagtgccctgagcacacgctgccatcccctgagggtgccacctcctgcgagtgtgaggaaggcttcttccgggcacctcaggacccagcgtcgatgccttgcacacgacccccctccgccccacactacctcacagccgtgggcatgggtgccaaggtggagctgcgctggacgccccctcaggacagcgggggccgcgaggacattgtctacagcgtcacctgcgaacagtgctggcccgagtctggggaatgcgggccgtgtgaggccagtgtgcgctactcggagcctcctcacggactgacccgcaccagtgtgacagtgagcgacctggagccccacatgaactacaccttcaccgtggaggcccgcaatggcgtctcaggcctggtaaccagccgcagcttccgtactgccagtgtcagcatcaaccagacagagccccccaaggtgaggctggagggccgcagcaccacctcgcttagcgtctcctggagcatccccccgccgcagcagagccgagtgtggaagtacgaggtcacttaccgcaagaagggagactccaacagctacaatgtgcgccgcaccgagggtttctccgtgaccctggacgacctggccccagacaccacctacctggtccaggtgcaggcactgacgcaggagggccagggggccggcagcaaggtgcacgaattccagacgctgtccccggagggatctggcaacttggcggtgattggcggcgtggctgtcggtgtggtcctgcttctggtgctggcaggagttggcttctttatccaccgcaggaggaagaaccagcgtgcccgccagtccccggaggacgtttacttctccaagtcagaacaactgaagcccctgaagacatacgtggacccccacacatatgaggaccccaaccaggctgtgttgaagttcactaccgagatccatccatcctgtgtcactcggcagaaggtgatcggagcaggagagtttggggaggtgtacaagggcatgctgaagacatcctcggggaagaaggaggtgccggtggccatcaagacgctgaaagccggctacacagagaagcagcgagtggacttcctcggcgaggccggcatcatgggccagttcagccaccacaacatcatccgcctagagggcgtcatctccaaatacaagcccatgatgatcatcactgagtacatggagaatggggccctggacaagttccttcgggagaaggatggcgagttcagcgtgctgcagctggtgggcatgctgcggggcatcgcagctggcatgaagtacctggccaacatgaactatgtgcaccgtgacctggctgcccgcaacatcctcgtcaacagcaacctggtctgcaaggtgtctgactttggcctgtcccgcgtgctggaggacgaccccgaggccacctacaccaccagtggcggcaagatccccatccgctggaccgccccggaggccatttcctaccggaagttcacctctgccagcgacgtgtggagctttggcattgtcatgtgggaggtgatgacctatggcgagcggccctactgggagttgtccaaccacgaggtgatgaaagccatcaatgatggcttccggctccccacacccatggactgcccctccgccatctaccagctcatgatgcagtgctggcagcaggagcgtgcccgccgccccaagttcgctgacatcgtcagcatcctggacaagctcattcgtgcccctgactccctcaagaccctggctgactttgacccccgcgtgtctatccggctccccagcacgagcggctcggagggggtgcccttccgcacggtgtccgagtggctggagtccatcaagatgcagcagtatacggagcacttcatggcggccggctacactgccatcgagaaggtggtgcagatgaccaacgacgacatcaagaggattggggtgcggctgcccggccaccagaagcgcatcgcctacagcctgctgggactcaaggaccaggtgaacactgtggggatccccatctgagcctcgacagggcctggagccccatcggccaagaatacttgaagaaacagagtggcctccctgctgtgccatgctgggccactggggaagagggtgtcaaacattcgtgagctggggactcagggaccggtgctgcaggagtgtcctgcccatgccccagtcggccccatctctcatccttttggataagtttctattctgtcagtgttaaagattttgttttgttggacatttttttcgaatcttaatttattattttttttatatttattgttagaaaatgacttatttctgctctggaataaagttgcagatgattcaaa

SEQ ID NO: 453701 - DNA, 3372 bp, Homo sapiens
gaggggcagaagttgcgcgcaggccggcgggcgggagcggacaccgaggccggcgtgcaggcgtgcgggtgtgcgggagccgggctcggggggatcggaccgagagcgagaagcgcggcatggagctccaggcagcccgcgcctgcttcgccctgctgtggggctgtgcgctggccgcggccgcggcggcgcagggcaaggaagtggtactgctggactttgctgcagctggaggggagctcggctggctcacacacccgtatggcaaagggtgggacctgatgcagaacatcatgaatgacatgccgatctacatgtactccgtgtgcaacgtgatgtctggcgaccaggacaactggctccgcaccaactgggtgtaccgaggagaggctgagcgtatcttcattgagctcaagtttactgtacgtgactgcaacagcttccctggtggcgccagctcctgcaaggagactttcaacctctactatgccgagtcggacctggactacggcaccaacttccagaagcgcctgttcaccaagattgacaccattgcgcccgatgagatcaccgtcagcagcgacttcgaggcacgccacgtgaagctgaacgtggaggagcgctccgtggggccgctcacccgcaaaggcttctacctggccttccaggatatcggtgcctgtgtggcgctgctctccgtccgtgtctactacaagaagtgccccgagctgctgcagggcctggcccacttccctgagaccatcgccggctctgatgcaccttccctggccactgtggccggcacctgtgtggaccatgccgtggtgccaccggggggtgaagagccccgtatgcactgtgcagtggatggcgagtggctggtgcccattgggcagtgcctgtgccaggcaggctacgagaaggtggaggatgcctgccaggcctgctcgcctggattttttaagtttgaggcatctgagagcccctgcttggagtgccctgagcacacgctgccatcccctgagggtgccacctcctgcgagtgtgaggaaggcttcttccgggcacctcaggacccagcgtcgatgccttgcacacgacccccctccgccccacactacctcacagccgtgggcatgggtgccaaggtggagctgcgctggacgccccctcaggacagcgggggccgcgaggacattgtctacagcgtcacctgcgaacagtgctggcccgagtctggggaatgcgggccgtgtgaggccagtgtgcgctactcggagcctcctcacggactgacccgcaccagtgtgacagtgagcgacctggagccccacatgaactacaccttcaccgtggaggcccgcaatggcgtctcaggcctggtaaccagccgcagcttccgtactgccagtgtcagcatcaaccagacagagccccccaaggtgaggctggagggccgcagcaccacctcgcttagcgtctcctggagcatccccccgccgcagcagagccgagtgtggaagtacgaggtcacttaccgcaagaagggagactccaacagctacaatgtgcgccgcaccgagggtttctccgtgaccctggacgacctggccccagacaccacctacctggtccaggtgcaggcactgacgcaggagggccagggggccggcagcaaggtgcacgaattccagacgctgtccccggagggatctggcaacttggcggtgattggcggcgtggctgtcggtgtggtcctgcttctggtgctggcaggagttggcttctttatccaccgcaggaggaagaaccagcgtgcccgccagtccccggaggacgtttacttctccaagtcagaacaactgaagcccctgaagacatacgtggacccccacacatatgaggaccccaaccaggctgtgttgaagttcactaccgagatccatccatcctgtgtcactcggcagaaggtgatcggagcaggagagtttggggaggtgtacaagggcatgctgaagacatcctcggggaagaaggaggtgccggtggccatcaagacgctgaaagccggctacacagagaagcagcgagtggacttcctcggcgaggccggcatcatgggccagttcagccaccacaacatcatccgcctagagggcgtcatctccaaatacaagcccatgatgatcatcactgagtacatggagaatggggccctggacaagttccttcgggagaaggatggcgagttcagcgtgctgcagctggtgggcatgctgcggggcatcgcagctggcatgaagtacctggccaacatgaactatgtgcaccgtgacctggctgcccgcaacatcctcgtcaacagcaacctggtctgcaaggtgtctgactttggcctgtcccgcgtgctggaggacgaccccgaggccacctacaccaccagtggcggcaagatccccatccgctggaccgccccggaggccatttcctaccggaagttcacctctgccagcgacgtgtggagctttggcattgtcatgtgggaggtgatgacctatggcgagcggccctactgggagttgtccaaccacgaggtgatgaaagccatcaatgatggcttccggctccccacacccatggactgcccctccgccatctaccagctcatgatgcagtgctggcagcaggagcgtgcccgccgccccaagttcgctgacatcgtcagcatcctggacaagctcattcgtgcccctgactccctcaagaccctggctgactttgacccccgcgtgtctatccggctccccagcacgagcggctcggagggggtgcccttccgcacggtgtccgagtggctggagtccatcaagatgcagcagtatacggagcacttcatggcggccggctacactgccatcgagaaggtggtgcagatgaccaacgacgacatcaagaggattggggtgcggctgcccggccaccagaagcgcatcgcctacagcctgctgggactcaaggaccaggtgaacactgtggggatccccatctgagcctcgacagggcctggagccccatcggccaagaatacttgaagaaacagagtggcctccctgctgtgccatgctgggccactggggaagagggtgtcaaacattcgtgagctggggactcagggaccggtgctgcaggagtgtcctgcccatgccccagtcggccccatctctcatccttttggataagtttctattctgtcagtgctcaagcctatgaaatagaagaacgtatgtttccggtccttatgcataattttgtaattattcactgtcatatcaggactgcttcatgctttggaatacattttcacctgattct

SEQ ID NO: 453702 - DNA, 1561 bp, Homo sapiens
gaggggcagaagttgcgcgcaggccggcgggcgggagcggacaccgaggccggcgtgcaggcgtgcgggtgtgcgggagccgggctcggggggatcggaccgagagcgagaagcgcggcatggagctccaggcagcccgcgcctgcttcgccctgctgtggggctgtgcgctggccgcggccgcggcggcgcagggcaaggaagtggtactgctggactttgctgcagctggaggggagctcggctggctcacacacccgtatggcaaagggtgggacctgatgcagaacatcatgaatgacatgccgatctacatgtactccgtgtgcaacgtgatgtctggcgaccaggacaactggctccgcaccaactgggtgtaccgaggagaggctgagcgtatcttcattgagctcaagtttactgtacgtgactgcaacagcttccctggtggcgccagctcctgcaaggagactttcaacctctactatgccgagtcggacctggactacggcaccaacttccagaagcgcctgttcaccaagattgacaccattgcgcccgatgagatcaccgtcagcagcgacttcgaggcacgccacgtgaagctgaacgtggaggagcgctccgtggggccgctcacccgcaaaggcttctacctggccttccaggatatcggtgcctgtgtggcgctgctctccgtccgtgtctactacaagaagtgccccgagctgctgcagggcctggcccacttccctgagaccatcgccggctctgatgcaccttccctggccactgtggccggcacctgtgtggaccatgccgtggtgccaccggggggtgaagagccccgtatgcactgtgcagtggatggcgagtggctggtgcccattgggcagtgcctgtgccaggcaggctacgagaaggtggaggatgcctgccaggcctgctcgcctggattttttaagtttgaggcatctgagagcccctgcttggagtgccctgagcacacgctgccatcccctgagggtgccacctcctgcgagtgtgaggaaggcttcttccgggcacctcaggacccagcgtcgatgccttgcacacgacccccctccgccccacactacctcacagccgtgggcatgggtgccaaggtggagctgcgctggacgccccctcaggacagcgggggccgcgaggacattgtctacagcgtcacctgcgaacagtgctggcccgagtctggggaatgcgggccgtgtgaggccagtgtgcgctactcggagcctcctcacggactgacccgcaccagtgtgacagtgagcgacctggagccccacatgaactacaccttcaccgtggaggcccgcaatggcgtctcaggcctggtaaccagccgcagcttccgtactgccagtgtcagcatcaaccagacaggctggagtgcaatggcacaatcttggctcaccgcaacctctgcatcccggattcaagtgattctcctgcctcagcctcctgagtggctgggattacaggcatgcgccaccatgcccagctaataaaagta

SEQ ID NO: 453703 - DNA, 1432 bp, Homo sapiens
gaggggcagaagttgcgcgcaggccggcgggcgggagcggacaccgaggccggcgtgcaggcgtgcgggtgtgcgggagccgggctcggggggatcggaccgagagcgagaagcgcggcatggagctccaggcagcccgcgcctgcttcgccctgctgtggggctgtgcgctggccgcggccgcggcggcgcagggcaaggaagtggtactgctggactttgctgcagctggaggggagctcggctggctcacacacccgtatggcaaagggtgggacctgatgcagaacatcatgaatgacatgccgatctacatgtactccgtgtgcaacgtgatgtctggcgaccaggacaactggctccgcaccaactgggtgtaccgaggagaggctgagcgtatcttcattgagctcaagtttactgtacgtgactgcaacagcttccctggtggcgccagctcctgcaaggagactttcaacctctactatgccgagtcggacctggactacggcaccaacttccagaagcgcctgttcaccaagattgacaccattgcgcccgatgagatcaccgtcagcagcgacttcgaggcacgccacgtgaagctgaacgtggaggagcgctccgtggggccgctcacccgcaaaggcttctacctggccttccaggatatcggtgcctgtgtggcgctgctctccgtccgtgtctactacaagaagtgccccgagctgctgcagggcctggcccacttccctgagaccatcgccggctctgatgcaccttccctggccactgtggccggcacctgtgtggaccatgccgtggtgccaccggggggtgaagagccccgtatgcactgtgcagtggatggcgagtggctggtgcccattgggcagtgcctgtgccaggcaggctacgagaaggtggaggatgcctgccagggtgagtgacggttctgggttgcagggaagggggttctgcattcccaggttctggtctttagctttggaatcatggaatcttggtaagctcatccctgctttgacacacattagttctgttagtggaaattatagatccttcccagacatcagtttccttattaaggctggactaactcattcattaagaatgaatgaattgtggctgggcacggtggctcatgcctgtaatcccagcactttgggaggctgaggtgggtggatcacttgagcccaggagtttgagaccagcctgggcaacataatgaaacgccgtctctaccaaaaacacaaaaattagctgggtgtggtggcatgcacctgtaatcccagctacttgggaggctgaagcacgagaatcaattgcttgaacccgggaggtggaggatgcagtaagctgagatcgcaccactgtactccagcctggggtgacagaggagatgcttgtctga

SEQ ID NO: 453704 - DNA, 419 bp, Homo sapiens
gtcctggctcgctcacttcctccctgttcctccacccgccttctccgcaccctcggccctgagagtggagcttgggcagcaaaagcggggactgggccgcattctgagcaccccaggtcctcctaggaccaaagtagggccaggaggcttccctggccggagcagacctcactgacctccctgcatttggttccccgtggggctctttcaggaggaagaaccagcgtgcccgccagtccccggaggacgtttacttctccaagtcaggtgagacgcagcccccgctccaggcccagccctgcccgcaccgtccccagctctgtgggggaggtgggggcagccagggtgttcccagggcactggggtggggccacaggcttccgtgggcagctctgaggggtccgtcccccacagcctgg

SEQ ID NO: 453705 - DNA, 3924 bp, Homo sapiens
gaggggcagaagttgcgcgcaggccggcgggcgggagcggacaccgaggccggcgtgcaggcgtgcgggtgtgcgggagccgggctcggggggatcggaccgagagcgagaagcgcggcatggagctccaggcagcccgcgcctgcttcgccctgctgtggggctgtgcgctggccgcggccgcggcggcgcagggcaaggaagtggtactgctggactttgctgcagctggaggggagctcggctggctcacacacccgtatggcaaagggtgggacctgatgcagaacatcatgaatgacatgccgatctacatgtactccgtgtgcaacgtgatgtctggcgaccaggacaactggctccgcaccaactgggtgtaccgaggagaggctgagcgtatcttcattgagctcaagtttactgtacgtgactgcaacagcttccctggtggcgccagctcctgcaaggagactttcaacctctactatgccgagtcggacctggactacggcaccaacttccagaagcgcctgttcaccaagattgacaccattgcgcccgatgagatcaccgtcagcagcgacttcgaggcacgccacgtgaagctgaacgtggaggagcgctccgtggggccgctcacccgcaaaggcttctacctggccttccaggatatcggtgcctgtgtggcgctgctctccgtccgtgtctactacaagaagtgccccgagctgctgcagggcctggcccacttccctgagaccatcgccggctctgatgcaccttccctggccactgtggccggcacctgtgtggaccatgccgtggtgccaccggggggtgaagagccccgtatgcactgtgcagtggatggcgagtggctggtgcccattgggcagtgcctgtgccaggcaggctacgagaaggtggaggatgcctgccaggcctgctcgcctggattttttaagtttgaggcatctgagagcccctgcttggagtgccctgagcacacgctgccatcccctgagggtgccacctcctgcgagtgtgaggaaggcttcttccgggcacctcaggacccagcgtcgatgccttgcacacgacccccctccgccccacactacctcacagccgtgggcatgggtgccaaggtggagctgcgctggacgccccctcaggacagcgggggccgcgaggacattgtctacagcgtcacctgcgaacagtgctggcccgagtctggggaatgcgggccgtgtgaggccagtgtgcgctactcggagcctcctcacggactgacccgcaccagtgtgacagtgagcgacctggagccccacatgaactacaccttcaccgtggaggcccgcaatggcgtctcaggcctggtaaccagccgcagcttccgtactgccagtgtcagcatcaaccagacagagccccccaaggtgaggctggagggccgcagcaccacctcgcttagcgtctcctggagcatccccccgccgcagcagagccgagtgtggaagtacgaggtcacttaccgcaagaagggagactccaacagctacaatgtgcgccgcaccgagggtttctccgtgaccctggacgacctggccccagacaccacctacctggtccaggtgcaggcactgacgcaggagggccagggggccggcagcaaggtgcacgaattccagacgctgtccccggagggatctggcaacttggcggtgattggcggcgtggctgtcggtgtggtcctgcttctggtgctggcaggagttggcttctttatccaccgcaggaggaagaaccagcgtgcccgccagtccccggaggacgtttacttctccaagtcagaacaactgaagcccctgaagacatacgtggacccccacacatatgaggaccccaaccaggctgtgttgaagttcactaccgagatccatccatcctgtgtcactcggcagaaggtgatcggagcaggagagtttggggaggtgtacaagggcatgctgaagacatcctcggggaagaaggaggtgccggtggccatcaagacgctgaaagccggctacacagagaagcagcgagtggacttcctcggcgaggccggcatcatgggccagttcagccaccacaacatcatccgcctagagggcgtcatctccaaatacaagcccatgatgatcatcactgagtacatggagaatggggccctggacaagttccttcgggagaaggatggcgagttcagcgtgctgcagctggtgggcatgctgcggggcatcgcagctggcatgaagtacctggccaacatgaactatgtgcaccgtgacctggctgcccgcaacatcctcgtcaacagcaacctggtctgcaaggtgtctgactttggcctgtcccgcgtgctggaggacgaccccgaggccacctacaccaccagtggcggcaagatccccatccgctggaccgccccggaggccatttcctaccggaagttcacctctgccagcgacgtgtggagctttggcattgtcatgtgggaggtgatgacctatggcgagcggccctactgggagttgtccaaccacgaggtgatgaaagccatcaatgatggcttccggctccccacacccatggactgcccctccgccatctaccagctcatgatgcagtgctggcagcaggagcgtgcccgccgccccaagttcgctgacatcgtcagcatcctggacaagctcattcgtgcccctgactccctcaagaccctggctgactttgacccccgcgtgtctatccggctccccagcacgagcggctcggagggggtgcccttccgcacggtgtccgagtggctggagtccatcaagatgcagcagtatacggagcacttcatggcggccggctacactgccatcgagaaggtggtgcagatgaccaacgacgacatcaagaggattggggtgcggctgcccggccaccagaagcgcatcgcctacagcctgctgggactcaaggaccaggtgaacactgtggggatccccatctgagcctcgacagggcctggagccccatcggccaagaatacttgaagaaacagagtggcctccctgctgtgccatgctgggccactggggactttatttatttctagttctttcctccccctgcaacttccgctgaggggtctcggatgacaccctggcctgaactgaggagatgaccagggatgctgggctgggccctctttccctgcgagacgcacacagctgagcacttagcaggcaccgccacgtcccagcatccctggagcaggagccccgccacagccttcggacagacatataggatattcccaagccgaccttccctccgccttctcccacatgaggccatctcaggagatggagggcttggcccagcgccaagtaaacagggtacctcaagccccatttcctcacactaagagggcagactgtgaacttgactgggtgagacccaaagcggtccctgtccctctagtgccttctttagaccctcgggccccatcctcatccctgactggccaaacccttgctttcctgggcctttgcaagatgcttggttgtgttgaggtttttaaatatatattttgtactttgtggagagaatgtgtgtgtgtggcagggggccccgccagggctggggacagagggtgtcaaacattcgtgagctggggactcagggaccggtgctgcaggagtgtcctgcccatgccccagtcggccccatctctcatccttttggataagtttctattctgtcagtgttaaagattttgttttgttggacatttttttcgaatcttaatttattattttttttatatttattgttagaaaatgacttatttctgctctggaataaagttgcagatgattcaaa

SEQ ID NO: 453706 - DNA, 494 bp, Homo sapiens
ccagaggcaccaaggaggccagaggcaccaaggaggccagaggcaccaaggaggccagaggcaccaaggaggctgtgttgaagttcactaccgagatccatccatcctgtgtcactcggcagaaggtgatcggagcaggagagtttggggaggtgtacaagggcatgctgaagacatcctcggggaagaaggaggtgccggtggccatcaagacgctgaaagccggctacacagagaagcagcgagtggacttcctcggcgaggccggcatcatgggccagttcagccaccacaacatcatccgcctagagggcgtcatctccaaatgtgaggcttggggcctgcccacactgggtggagaggggccacttagcaggggctctgtctgtgactgtgcccacctcccctatacctgtgcccaccttccccccacacctgcacccacctcctctacaactgtgcccacttctccccaatacctgtacccacctcct

SEQ ID NO: 453707 - DNA, 2567 bp, Homo sapiens
ctcgctttcagaagtcacagagctgccaggtttggggttttgcccccgcagatgctgcagcatcaaccagacagagccccccaaggtgaggctggagggccgcagcaccacctcgcttagcgtctcctggagcatccccccgccgcagcagagccgagtgtggaagtacgaggtcacttaccgcaagaagggagactccaacagctacaatgtgcgccgcaccgagggtttctccgtgaccctggacgacctggccccagacaccacctacctggtccaggtgcaggcactgacgcaggagggccagggggccggcagcaaggtgcacgaattccagacgctgtccccggagggatctggcaacttggcggtgattggcggcgtggctgtcggtgtggtcctgcttctggtgctggcaggagttggcttctttatccaccgcaggaggaagaaccagcgtgcccgccagtccccggaggacgtttacttctccaagtcagaacaactgaagcccctgaagacatacgtggacccccacacatatgaggaccccaaccaggctgtgttgaagttcactaccgagatccatccatcctgtgtcactcggcagaaggtgatcggagcaggagagtttggggaggtgtacaagggcatgctgaagacatcctcggggaagaaggaggtgccggtggccatcaagacgctgaaagccggctacacagagaagcagcgagtggacttcctcggcgaggccggcatcatgggccagttcagccaccacaacatcatccgcctagagggcgtcatctccaaatacaagcccatgatgatcatcactgagtacatggagaatggggccctggacaagttccttcgggagaaggatggcgagttcagcgtgctgcagctggtgggcatgctgcggggcatcgcagctggcatgaagtacctggccaacatgaactatgtgcaccgtgacctggctgcccgcaacatcctcgtcaacagcaacctggtctgcaaggtgtctgactttggcctgtcccgcgtgctggaggacgaccccgaggccacctacaccaccagtggcggcaagatccccatccgctggaccgccccggaggccatttcctaccggaagttcacctctgccagcgacgtgtggagctttggcattgtcatgtgggaggtgatgacctatggcgagcggccctactgggagttgtccaaccacgaggtgatgaaagccatcaatgatggcttccggctccccacacccatggactgcccctccgccatctaccagctcatgatgcagtgctggcagcaggagcgtgcccgccgccccaagttcgctgacatcgtcagcatcctggacaagctcattcgtgcccctgactccctcaagaccctggctgactttgacccccgcgtgtctatccggctccccagcacgagcggctcggagggggtgcccttccgcacggtgtccgagtggctggagtccatcaagatgcagcagtatacggagcacttcatggcggccggctacactgccatcgagaaggtggtgcagatgaccaacgacgacatcaagaggattggggtgcggctgcccggccaccagaagcgcatcgcctacagcctgctgggactcaaggaccaggtgaacactgtggggatccccatctgagcctcgacagggcctggagccccatcggccaagaatacttgaagaaacagagtggcctccctgctgtgccatgctgggccactggggactttatttatttctagttctttcctccccctgcaacttccgctgaggggtctcggatgacaccctggcctgaactgaggagatgaccagggatgctgggctgggccctctttccctgcgagacgcacacagctgagcacttagcaggcaccgccacgtcccagcatccctggagcaggagccccgccacagccttcggacagacatataggatattcccaagccgaccttccctccgccttctcccacatgaggccatctcaggagatggagggcttggcccagcgccaagtaaacagggtacctcaagccccatttcctcacactaagagggcagactgtgaacttgactgggtgagacccaaagcggtccctgtccctctagtgccttctttagaccctcgggccccatcctcatccctgactggccaaacccttgctttcctgggcctttgcaagatgcttggttgtgttgaggtttttaaatatatattttgtactttgtggagagaatgtgtgtgtgtggcagggggccccgccagggctggggacagagggtgtcaaacattcgtgagctggggactcagggaccggtgctgcaggagtgtcctgcccatgccccagtcggccccatctctcatccttttggataagtttctattctgtcagtgttaaagattttgttttgttggacatttttttcgaatcttaatttattattttttttatatttattgttagaaaatgacttatttctgctctggaataaagttgcagatgattcaaa

SEQ ID NO: 453708 - DNA, 1610 bp, Homo sapiens
acgctaggtagaggctgggtgtgaattggcgaggcacatcctcgtcaacagcaacctggtctgcaaggtgtctgactttggcctgtcccgcgtgctggaggacgaccccgaggccacctacaccaccagtggcggcaagatccccatccgctggaccgccccggaggccatttcctaccggaagttcacctctgccagcgacgtgtggagctttggcattgtcatgtgggaggtgatgacctatggcgagcggccctactgggagttgtccaaccacgaggtgatgaaagccatcaatgatggcttccggctccccacacccatggactgcccctccgccatctaccagctcatgatgcagtgctggcagcaggagcgtgcccgccgccccaagttcgctgacatcgtcagcatcctggacaagctcattcgtgcccctgactccctcaagaccctggctgactttgacccccgcgtgtctatccggctccccagcacgagcggctcggagggggtgcccttccgcacggtgtccgagtggctggagtccatcaagatgcagcagtatacggagcacttcatggcggccggctacactgccatcgagaaggtggtgcagatgaccaacgacgacatcaagaggattggggtgcggctgcccggccaccagaagcgcatcgcctacagcctgctgggactcaaggaccaggtgaacactgtggggatccccatctgagcctcgacagggcctggagccccatcggccaagaatacttgaagaaacagagtggcctccctgctgtgccatgctgggccactggggactttatttatttctagttctttcctccccctgcaacttccgctgaggggtctcggatgacaccctggcctgaactgaggagatgaccagggatgctgggctgggccctctttccctgcgagacgcacacagctgagcacttagcaggcaccgccacgtcccagcatccctggagcaggagccccgccacagccttcggacagacatataggatattcccaagccgaccttccctccgccttctcccacatgaggccatctcaggagatggagggcttggcccagcgccaagtaaacagggtacctcaagccccatttcctcacactaagagggcagactgtgaacttgactgggtgagacccaaagcggtccctgtccctctagtgccttctttagaccctcgggccccatcctcatccctgactggccaaacccttgctttcctgggcctttgcaagatgcttggttgtgttgaggtttttaaatatatattttgtactttgtggagagaatgtgtgtgtgtggcagggggccccgccagggctggggacagagggtgtcaaacattcgtgagctggggactcagggaccggtgctgcaggagtgtcctgcccatgccccagtcggccccatctctcatccttttggataagtttctattctgtcagtgttaaagattttgttttgttggacatttttttcgaatcttaatttattattttttttatatttattgttagaaaatgacttatttctgctctggaataaagttgcagatgattcaaa

SEQ ID NO: 453709 - DNA, 1000 bp, Homo sapiens
ggatctaagatcccctcctacgacatcaagaggattggggtgcggctgcccggccaccagaagcgcatcgcctacagcctgctgggactcaaggaccaggtgaacactgtggggatccccatctgagcctcgacagggcctggagccccatcggccaagaatacttgaagaaacagagtggcctccctgctgtgccatgctgggccactggggactttatttatttctagttctttcctccccctgcaacttccgctgaggggtctcggatgacaccctggcctgaactgaggagatgaccagggatgctgggctgggccctctttccctgcgagacgcacacagctgagcacttagcaggcaccgccacgtcccagcatccctggagcaggagccccgccacagccttcggacagacatataggatattcccaagccgaccttccctccgccttctcccacatgaggccatctcaggagatggagggcttggcccagcgccaagtaaacagggtacctcaagccccatttcctcacactaagagggcagactgtgaacttgactgggtgagacccaaagcggtccctgtccctctagtgccttctttagaccctcgggccccatcctcatccctgactggccaaacccttgctttcctgggcctttgcaagatgcttggttgtgttgaggtttttaaatatatattttgtactttgtggagagaatgtgtgtgtgtggcagggggccccgccagggctggggacagagggtgtcaaacattcgtgagctggggactcagggaccggtgctgcaggagtgtcctgcccatgccccagtcggccccatctctcatccttttggataagtttctattctgtcagtgttaaagattttgttttgttggacatttttttcgaatcttaatttattattttttttatatttattgttagaaaatgacttatttctgctctggaataaagttgcagatgattcaaa

SEQ ID NO: 453710 - DNA, 3369 bp, Homo sapiens
gaggggcagaagttgcgcgcaggccggcgggcgggagcggacaccgaggccggcgtgcaggcgtgcgggtgtgcgggagccgggctcggggggatcggaccgagagcgagaagcgcggcatggagctccaggcagcccgcgcctgcttcgccctgctgtggggctgtgcgctggccgcggccgcggcggcgcagggcaaggaagtggtactgctggactttgctgcagctggaggggagctcggctggctcacacacccgtatggcaaagggtgggacctgatgcagaacatcatgaatgacatgccgatctacatgtactccgtgtgcaacgtgatgtctggcgaccaggacaactggctccgcaccaactgggtgtaccgaggagaggctgagcgtatcttcattgagctcaagtttactgtacgtgactgcaacagcttccctggtggcgccagctcctgcaaggagactttcaacctctactatgccgagtcggacctggactacggcaccaacttccagaagcgcctgttcaccaagattgacaccattgcgcccgatgagatcaccgtcagcagcgacttcgaggcacgccacgtgaagctgaacgtggaggagcgctccgtggggccgctcacccgcaaaggcttctacctggccttccaggatatcggtgcctgtgtggcgctgctctccgtccgtgtctactacaagaagtgccccgagctgctgcagggcctggcccacttccctgagaccatcgccggctctgatgcaccttccctggccactgtggccggcacctgtgtggaccatgccgtggtgccaccggggggtgaagagccccgtatgcactgtgcagtggatggcgagtggctggtgcccattgggcagtgcctgtgccaggcaggctacgagaaggtggaggatgcctgccaggcctgctcgcctggattttttaagtttgaggcatctgagagcccctgcttggagtgccctgagcacacgctgccatcccctgagggtgccacctcctgcgagtgtgaggaaggcttcttccgggcacctcaggacccagcgtcgatgccttgcacacgacccccctccgccccacactacctcacagccgtgggcatgggtgccaaggtggagctgcgctggacgccccctcaggacagcgggggccgcgaggacattgtctacagcgtcacctgcgaacagtgctggcccgagtctggggaatgcgggccgtgtgaggccagtgtgcgctactcggagcctcctcacggactgacccgcaccagtgtgacagtgagcgacctggagccccacatgaactacaccttcaccgtggaggcccgcaatggcgtctcaggcctggtaaccagccgcagcttccgtactgccagtgtcagcatcaaccagacagagccccccaaggtgaggctggagggccgcagcaccacctcgcttagcgtctcctggagcatccccccgccgcagcagagccgagtgtggaagtacgaggtcacttaccgcaagaagggagactccaacagctacaatgtgcgccgcaccgagggtttctccgtgaccctggacgacctggccccagacaccacctacctggtccaggtgcaggcactgacgcaggagggccagggggccggcagcaaggtgcacgaattccagacgctgtccccggagggatctggcaacttggcggtgattggcggcgtggctgtcggtgtggtcctgcttctggtgctggcaggagttggcttctttatccaccgcaggaggaagaaccagcgtgcccgccagtccccggaggacgtttacttctccaagtcagaacaactgaagcccctgaagacatacgtggacccccacacatatgaggaccccaaccaggctgtgttgaagttcactaccgagatccatccatcctgtgtcactcggcagaaggtgatcggagcaggagagtttggggaggtgtacaagggcatgctgaagacatcctcggggaagaaggaggtgccggtggccatcaagacgctgaaagccggctacacagagaagcagcgagtggacttcctcggcgaggccggcatcatgggccagttcagccaccacaacatcatccgcctagagggcgtcatctccaaatacaagcccatgatgatcatcactgagtacatggagaatggggccctggacaagttccttcgggagaaggatggcgagttcagcgtgctgcagctggtgggcatgctgcggggcatcgcagctggcatgaagtacctggccaacatgaactatgtgcaccgtgacctggctgcccgcaacatcctcgtcaacagcaacctggtctgcaaggtgtctgactttggcctgtcccgcgtgctggaggacgaccccgaggccacctacaccaccagtggcggcaagatccccatccgctggaccgccccggaggccatttcctaccggaagttcacctctgccagcgacgtgtggagctttggcattgtcatgtgggaggtgatgacctatggcgagcggccctactgggagttgtccaaccacgaggtgatgaaagccatcaatgatggcttccggctccccacacccatggactgcccctccgccatctaccagctcatgatgcagtgctggcagcaggagcgtgcccgccgccccaagttcgctgacatcgtcagcatcctggacaagctcattcgtgcccctgactccctcaagaccctggctgactttgacccccgcgtgtctatccggctccccagcacgagcggctcggagggggtgcccttccgcacggtgtccgagtggctggagtccatcaagatgcagcagtatacggagcacttcatggcggccggctacactgccatcgagaaggtggtgcagatgaccaacgacgacatcaagaggattggggtgcggctgcccggccaccagaagcgcatcgcctacagcctgctgggactcaaggaccaggtgaacactgtggggatccccatctgagcctcgacagggcctggagccccatcggccaagaatacttgaagaaacagagtggcctccctgctgtgccatgctgggccactggggaagagggtgtcaaacattcgtgagctggggactcagggaccggtgctgcaggagtgtcctgcccatgccccagtcggccccatctctcatccttcgcattagtttcccttcccagagtgttgggtcaggaagaaacctggcattaggttgggatttgtatttgaataggagccccaggcaagggtaggaacaggttttaaatcagaggcggcaggtaaaagtcgattttttc

SEQ ID NO: 453711 - DNA, 2759 bp, Homo sapiens
gaggggcagaagttgcgcgcaggccggcgggcgggagcggacaccgaggccggcgtgcaggcgtgcgggtgtgcgggagccgggctcggggggatcggaccgagagcgagaagcgcggcatggagctccaggcagcccgcgcctgcttcgccctgctgtggggctgtgcgctggccgcggccgcggcggcgcagggcaaggaagtggtactgctggactttgctgcagctggaggggagctcggctggctcacacacccgtatggcaaagggtgggacctgatgcagaacatcatgaatgacatgccgatctacatgtactccgtgtgcaacgtgatgtctggcgaccaggacaactggctccgcaccaactgggtgtaccgaggagaggctgagcgtatcttcattgagctcaagtttactgtacgtgactgcaacagcttccctggtggcgccagctcctgcaaggagactttcaacctctactatgccgagtcggacctggactacggcaccaacttccagaagcgcctgttcaccaagattgacaccattgcgcccgatgagatcaccgtcagcagcgacttcgaggcacgccacgtgaagctgaacgtggaggagcgctccgtggggccgctcacccgcaaaggcttctacctggccttccaggatatcggtgcctgtgtggcgctgctctccgtccgtgtctactacaagaagtgccccgagctgctgcagggcctggcccacttccctgagaccatcgccggctctgatgcaccttccctggccactgtggccggcacctgtgtggaccatgccgtggtgccaccggggggtgaagagccccgtatgcactgtgcagtggatggcgagtggctggtgcccattgggcagtgcctgtgccaggcaggctacgagaaggtggaggatgcctgccaggcctgctcgcctggattttttaagtttgaggcatctgagagcccctgcttggagtgccctgagcacacgctgccatcccctgagggtgccacctcctgcgagtgtgaggaaggcttcttccgggcacctcaggacccagcgtcgatgccttgcacacgacccccctccgccccacactacctcacagccgtgggcatgggtgccaaggtggagctgcgctggacgccccctcaggacagcgggggccgcgaggacattgtctacagcgtcacctgcgaacagtgctggcccgagtctggggaatgcgggccgtgtgaggccagtgtgcgctactcggagcctcctcacggactgacccgcaccagtgtgacagtgagcgacctggagccccacatgaactacaccttcaccgtggaggcccgcaatggcgtctcaggcctggtaaccagccgcagcttccgtactgccagtgtcagcatcaaccagacagagccccccaaggtgaggctggagggccgcagcaccacctcgcttagcgtctcctggagcatccccccgccgcagcagagccgagtgtggaagtacgaggtcacttaccgcaagaagggagactccaacagctacaatgtgcgccgcaccgagggtttctccgtgaccctggacgacctggccccagacaccacctacctggtccaggtgcaggcactgacgcaggagggccagggggccggcagcaaggtgcacgaattccagacgctgtccccggagggatctggcaacttggcggtgattggcggcgtggctgtcggtgtggtcctgcttctggtgctggcaggagttggcttctttatccaccgcaggaggaagaaccagcgtgcccgccagtccccggaggacgtttacttctccaagtcagaacaactgaagcccctgaagacatacgtggacccccacacatatgaggaccccaaccaggctgtgttgaagttcactaccgagatccatccatcctgtgtcactcggcagaaggtgatcggagcaggagagtttggggaggtgtacaagggcatgctgaagacatcctcggggaagaaggaggtgccggtggccatcaagacgctgaaagccggctacacagagaagcagcgagtggacttcctcggcgaggccggcatcatgggccagttcagccaccacaacatcatccgcctagagggcgtcatctccaaatacaagcccatgatgatcatcactgagtacatggagaatggggccctggacaagttccttcgggagaaggatggcgagttcagcgtgctgcagctggtgggcatgctgcggggcatcgcagctggcatgaagtacctggccaacatgaactatgtgcaccgtgacctggctgcccgcaacatcctcgtcaacagcaacctggtctgcaaggtgtctgactttggcctgtcccgcgtgctggaggacgaccccgaggccacctacaccaccagtggcggcaagatccccatccgctggaccgccccggaggccatttcctaccggaagttcacctctgccagcgacgtgtggagctttggcattgtcatgtgggaggtgatgacctatggcgagcggccctactgggagttgtccaaccacgagtggatgaagccatcatgatgggttcgggtcccaaccatgtattgcccttcgctttacaggtcttgatgcgtgtgggcggacgtgccgcgcccagttgtgctctcggtctggcacctccttggcctgtcctcagacgtgttgcccccagggtcgggggcccccggc

SEQ ID NO: 453712 - DNA, 1915 bp, Homo sapiens
gaggggcagaagttgcgcgcaggccggcgggcgggagcggacaccgaggccggcgtgcaggcgtgcgggtgtgcgggagccgggctcggggggatcggaccgagagcgagaagcgcggcatggagctccaggcagcccgcgcctgcttcgccctgctgtggggctgtgcgctggccgcggccgcggcggcgcagggcaaggaagtggtactgctggactttgctgcagctggaggggagctcggctggctcacacacccgtatggcaaagggtgggacctgatgcagaacatcatgaatgacatgccgatctacatgtactccgtgtgcaacgtgatgtctggcgaccaggacaactggctccgcaccaactgggtgtaccgaggagaggctgagcgtatcttcattgagctcaagtttactgtacgtgactgcaacagcttccctggtggcgccagctcctgcaaggagactttcaacctctactatgccgagtcggacctggactacggcaccaacttccagaagcgcctgttcaccaagattgacaccattgcgcccgatgagatcaccgtcagcagcgacttcgaggcacgccacgtgaagctgaacgtggaggagcgctccgtggggccgctcacccgcaaaggcttctacctggccttccaggatatcggtgcctgtgtggcgctgctctccgtccgtgtctactacaagaagtgccccgagctgctgcagggcctggcccacttccctgagaccatcgccggctctgatgcaccttccctggccactgtggccggcacctgtgtggaccatgccgtggtgccaccggggggtgaagagccccgtatgcactgtgcagtggatggcgagtggctggtgcccattgggcagtgcctgtgccaggcaggctacgagaaggtggaggatgcctgccaggcctgctcgcctggattttttaagtttgaggcatctgagagcccctgcttggagtgccctgagcacacgctgccatcccctgagggtgccacctcctgcgagtgtgaggaaggcttcttccgggcacctcaggacccagcgtcgatgccttgcacacgacccccctccgccccacactacctcacagccgtgggcatgggtgccaaggtggagctgcgctggacgccccctcaggacagcgggggccgcgaggacattgtctacagcgtcacctgcgaacagtgctggcccgagtctggggaatgcgggccgtgtgaggccagtgtgcgctactcggagcctcctcacggactgacccgcaccagtgtgacagtgagcgacctggagccccacatgaactacaccttcaccgtggaggcccgcaatggcgtctcaggcctggtaaccagccgcagcttccgtactgccagtgtcagcatcaaccagacagagccccccaaggtgaggctggagggccgcagcaccacctcgcttagcgtctcctggagcatccccccgccgcagcagagccgagtgtggaagtacgaggtcacttaccgcaagaagggagactccaacagctacaatgtgcgccgcaccgagggtttctccgtgaccctggacgacctggccccagacaccacctacctggtccaggtgcaggcactgacgcaggagggccagggggccggcagcaaggtgcacgaattccagacgctgtcccggagggatctggcaacttggcgtgatggcggcgtggtgtcgggtggctgtctgtggtggcggagtggtcttttccccgcgggagacccgtgccccgcccgggggtgtcgcccgtgcatcgagtccctgatttgccctttggccccgggtggctccgaccccgtccgcagggcgaggggcgcgcgactcagggggcgaagtggtgcccctcc

SEQ ID NO: 453713 - DNA, 3012 bp, Homo sapiens
agcggaggtggcccatgtcctgcaagggccttgctgatgggatgtcctgaagggctgggcagccttagatcgggctaagagggcaggactgtgggccagtgccagagccaggcttgtctgttctcaaaggatcagcctcctttggaggacattttgtgtcaaggatagggctgaggacctgcgttctgaacgtctttcctgggattcttgacagccaaagaaattcgaggatcgcctctatgaaggtgaagtcttggcatgtggggtacccctgaatcctgggctaaggtctgtgaccttttgccctccagttggggtatgtgtggtgtccccaaagaacaagggctcgtggatcccgagcagggtgcgatggcggattgggaggtcccatgtcactctcccatgcccgcctttgaagctgaggcgctctttagttaacaaactacaagtcccagcagggaccgggacgcgggtgggagaggcgcctgtggccccgaggcgtgccgcgagttgtagtccctcctgcccgctgtgttcgcttttgagctctccgatgggatgcggcgcttcggaatttcgggctttgatccctgtcccgcccttggcacaggcacctgccggcctgaaggcccccgcggtgggggtaccctgcgcccctccgcgggaaggtggactacagttatcggcaggctgtgcggcgccaaagccacggtgacccagacccgaggtttttccgggcgtcgcagtttcccgagactccgtggcggcgtttgtcttctttttcttagtcagatcccgtacttttgtggagggtagaggaggctttgaccgccgcggccccgggggctggtgggaaatggagttccaaatgagaaaatagaattccccacttctctttcccacaggtgccagggaaacggagtcatcgacccaagaaggtcgtgggagatgaggtcccagggtaaacagcgggtcccgccactatgtcaccctttcctgccgcctccccggatgaactgcatgcagggcggccggctccgtggcaggcagaggcaggaagaggcgcggagcccgctggtggcgaagaggggagtgcggcgggaggggagggcagaggcaggcggccggtcgcgtggggcctgggccgccccaggagggcctctggctggattcttagcagatggaagccgtgcaagggcaggaggcaggggcctgacgtgtttggattgaggttgcaggaggggcccctggctgcttcagggagaataatttggaggcgagcggggaggtgagaggaagctgtgcggtgcaggatggcgtggctgtggaggtggagaacgttgggccacgctaggagtcttgaaagaggagccaaaaggacttgctgagagccgccgcagctggtgaatgacggtgccatgactgaggtggtcgaaagggagtatttaaggggaaatcaggcattccgttttgaccaaattaagctggagatgcctgtggaacattccagccaggctgcatcacgtcacactgaccttcagcattgcccacagtccatcttcccccaggacctgaggattttgcgtccggctccctcctcgcccaggacccccaagctcccagcacgcttctgatttttttttgtaggttttttttttttggtttttggtttggtttggttttgttttggagagggagtctcactttgtgccctagactgggagtgcaatggcgccatctcggcttactgcaacctccacctcccaggtgcaagcgattcccctgcctcagcttcccgagtagctgggattacagatgtgagccaccgtacccagctaatttttgtatttttagtagagacggggtttcaccatatgggccaagctggtctcgaactcctgacctcaggcgatccatctgtctcagcctcccaaagtgctgggattacaggtgtgagccaccgcgccaggcctcagcccacttcttttgggtggcaatggtttggatatcgtttgtcctcactaaaattcatgttgagattcgagccccagtgtggcaggtgttgggatgtggggcctcataggagctgtgtggtcttggaggtggagtcctcatggatagattaatgcctgccttaaggggtgagtgagtgctcacccttgggaatttgggaatttggttttctctcccttgcttccttcagcaccatgtgatctctgtgcacacagctgcatccttctgccctcccccagaagcagcagcagcctcagggatgagggaggtcctcagtgagtgcacctgcccagtcttgaaccttccagccatcagaatctgagccaaatcaacctcttcctttataaagacccagcctcaggtcttctgtcagagcaacacaaaatggactcagcacggatcaaattgtgtctcccccacccccacaaaaaactttatattaaaatcctaacccccagcatctcagaatgtgatctgattaggaaataaggtcattgcagatataattagttcagatgaggtcattcatgtgggccctaatccaataggatgtgtgtcttataaaagtttgtacagagacccagacacacagaaatgacaccatgtggaggtgaaggcagagattggggtgacgcctctacaaaccgaggaaaaccaaagctgccggcacaccctcagaagccagagaccggggactcatcctccctcacagcctcaggagcagccagggctgacaccctcatctcagacttctgacctccagcactgggagaccttcagtttttgtgatttaagccactaattttgaggactcacatgtgaccctaatgccgccatcaccttaactccgaggccagagtctacactacagcttccctctccccgcatccagactacatcccgcaaatacaccagtgaacctggtaccaaggtgatgggggacaggtcaaggccaagagatcagagccacaaagacaaacccggtcagagggaaaaaga

SEQ ID NO: 453714 - DNA, 2446 bp, Homo sapiens
  misc_feature (2431)..(2432): n is a, c, g, or t
agcggaggtggcccatgtcctgcaagggccttgctgatgggatgtcctgaagggctgggcagccttagatcgggctaagagggcaggactgtgggccagtgccagagccaggcttgtctgttctcaaaggatcagcctcctttggaggacattttgtgtcaaggatagggctgaggacctgcgttctgaacgtctttcctgggattcttgacagccaaagaaattcgaggatcgcctctatgaaggtgaagtcttggcatgtggggtacccctgaatcctgggctaaggtctgtgaccttttgccctccagttggggtatgtgtggtgtccccaaagaacaagggctcgtggatcccgagcagggtgcgatggcggattgggaggtcccatgtcactctcccatgcccgcctttgaagctgaggcgctctttagttaacaaactacaagtcccagcagggaccgggacgcgggtgggagaggcgcctgtggccccgaggcgtgccgcgagttgtagtccctcctgcccgctgtgttcgcttttgagctctccgatgggatgcggcgcttcggaatttcgggctttgatccctgtcccgcccttggcacaggcacctgccggcctgaaggcccccgcggtgggggtaccctgcgcccctccgcgggaaggtggactacagttatcggcaggctgtgcggcgccaaagccacggtgacccagacccgaggtttttccgggcgtcgcagtttcccgagactccgtggcggcgtttgtcttctttttcttagtcagatcccgtacttttgtggagggtagaggaggctttgaccgccgcggccccgggggctggtgggaaatggagttccaaatgagaaaatagaattccccacttctctttcccacaggtgccagggaaacggagtcatcgacccaagaaggtcgtgggagatgaggtcccagggtaaacagcgggtcccgccactatgtcaccctttcctgccgcctccccggatgaactgcatgcagggcggccggctccgtggcaggcagaggcaggaagaggcgcggagcccgctggtggcgaagaggggagtgcggcgggaggggagggcagaggcaggcggccggtcgcgtggggcctgggccgccccaggagggcctctggctggattcttagcagatggaagccgtgcaagggcaggaggcaggggcctgacgtgtttggattgaggttgcaggaggggcccctggctgcttcagggagaataatttggaggcgagcggggaggtgagaggaagctgtgcggtgcaggatggcgtggctgtggaggtggagaacgttgggccacgctaggagtcttgaaagaggagccaaaaggacttgctgagagccgccgcagctggtgaatgacggtgccatgactgaggtggtcgaaagggagtatttaaggggaaatcaggcattccgttttgaccaaattaagctggagatgcctgtggaacattccagccaggctgcatcacgtcacactgaccttcagcattgcccacagtccatcttcccccaggacctgaggattttgcgtccggctccctcctcgcccaggacccccaagctcccagcacgcttctgatttttttttgtaggttttttttttttggtttttggtttggtttggttttgttttggagagggagtctcactttgtgccctagactgggagtgcaatggcgccatctcggcttactgcaacctccacctcccaggtgcaagcgattcccctgcctcagcttcccgagtagctgggattacagatgtgagccaccgtacccagctaatttttgtatttttagtagagacggggtttcaccatatgggccaagctggtctcgaactcctgacctcaggcgatccatctgtctcagcctcccaaagtgctgggattacaggtgtgagccaccgcgccaggcctcagcccacttcttttgggtggcaatggtttggatatcgtttgtcctcactaaaattcatgttgagattcgagccccagtgtggcaggtgttgggatgtggggcctcataggagctgtgtggtcttggaggtggagtcctcatggatagattaatgcctgccttaaggggtgagtgagtgctcacccttgggaatttgggaatttggttttctctcccttgcttccttcagcaccatgtgatctctgtgcacacagctgcatccttctgccctcccccagaagcagcagcagcctcagggatgagggaggtcctcagtgagtgcacctgcccagtcttgaaccttccagccatcagaatctgagccaaatcaacctcttcctttataaagacccagcctcaggtcttctgtcagagcaacacaaaatggactcagcacggatcaaattgtgtcaacccnngctgtgtggggagg

SEQ ID NO: 453715 - DNA, 2472 bp, Homo sapiens
agcggaggtggcccatgtcctgcaagggccttgctgatgggatgtcctgaagggctgggcagccttagatcgggctaagagggcaggactgtgggccagtgccagagccaggcttgtctgttctcaaaggatcagcctcctttggaggacattttgtgtcaaggatagggctgaggacctgcgttctgaacgtctttcctgggattcttgacagccaaagaaattcgaggatcgcctctatgaaggtgaagtcttggcatgtggggtacccctgaatcctgggctaaggtctgtgaccttttgccctccagttggggtatgtgtggtgtccccaaagaacaagggctcgtggatcccgagcagggtgcgatggcggattgggaggtcccatgtcactctcccatgcccgcctttgaagctgaggcgctctttagttaacaaactacaagtcccagcagggaccgggacgcgggtgggagaggcgcctgtggccccgaggcgtgccgcgagttgtagtccctcctgcccgctgtgttcgcttttgagctctccgatgggatgcggcgcttcggaatttcgggctttgatccctgtcccgcccttggcacaggcacctgccggcctgaaggcccccgcggtgggggtaccctgcgcccctccgcgggaaggtggactacagttatcggcaggctgtgcggcgccaaagccacggtgacccagacccgaggtttttccgggcgtcgcagtttcccgagactccgtggcggcgtttgtcttctttttcttagtcagatcccgtacttttgtggagggtagaggaggctttgaccgccgcggccccgggggctggtgggaaatggagttccaaatgagaaaatagaattccccacttctctttcccacaggtgccagggaaacggagtcatcgacccaagaaggtcgtgggagatgaggtcccagggtaaacagcgggtcccgccactatgtcaccctttcctgccgcctccccggatgaactgcatgcagggcggccggctccgtggcaggcagaggcaggaagaggcgcggagcccgctggtggcgaagaggggagtgcggcgggaggggagggcagaggcaggcggccggtcgcgtggggcctgggccgccccaggagggcctctggctggattcttagcagatggaagccgtgcaagggcaggaggcaggggcctgacgtgtttggattgaggttgcaggaggggcccctggctgcttcagggagaataatttggaggcgagcggggaggtgagaggaagctgtgcggtgcaggatggcgtggctgtggaggtggagaacgttgggccacgctaggagtcttgaaagaggagccaaaaggacttgctgagagccgccgcagctggtgaatgacggtgccatgactgaggtggtcgaaagggagtatttaaggggaaatcaggcattccgttttgaccaaattaagctggagatgcctgtggaacattccagccaggctgcatcacgtcacactgaccttcagcattgcccacagtccatcttcccccaggacctgaggattttgcgtccggctccctcctcgcccaggacccccaagctcccagcacgcttctgatttttttttgtaggttttttttttttggtttttggtttggtttggttttgttttggagagggagtctcactttgtgccctagactgggagtgcaatggcgccatctcggcttactgcaacctccacctcccaggtgcaagcgattcccctgcctcagcttcccgagtagctgggattacagatgtgagccaccgtacccagctaatttttgtatttttagtagagacggggtttcaccatatgggccaagctggtctcgaactcctgacctcaggcgatccatctgtctcagcctcccaaagtgctgggattacaggtgtgagccaccgcgccaggcctcagcccacttcttttgggtggcaatggtttggatatcgtttgtcctcactaaaattcatgttgagattcgagccccagtgtggcaggtgttgggatgtggggcctcataggagctgtgtggtcttggaggtggagtcctcatggatagattaatgcctgccttaaggggtgagtgagtgctcacccttgggaatttgggaatttggttttctctcccttgcttccttcagcaccatgtgatctctgtgcacacagctgcatccttctgccctcccccagaagcagcagcagcctcagggatgagggaggtcctcagtgagtgcacctgcccagtcttgaaccttccagccatcagaatctgagccaaatcaacctcttcctttataaagacccagcctcaggtcttctgtcagagcaacacaaaatggactcagcacggatcaaattgtgtctcccccacccccacaaaaaactttatattaaaatcctaacccccagc

SEQ ID NO: 453716 - DNA, 3055 bp, Homo sapiens
agcggaggtggcccatgtcctgcaagggccttgctgatgggatgtcctgaagggctgggcagccttagatcgggctaagagggcaggactgtgggccagtgccagagccaggcttgtctgttctcaaaggatcagcctcctttggaggacattttgtgtcaaggatagggctgaggacctgcgttctgaacgtctttcctgggattcttgacagccaaagaaattcgaggatcgcctctatgaaggtgaagtcttggcatgtggggtacccctgaatcctgggctaaggtctgtgaccttttgccctccagttggggtatgtgtggtgtccccaaagaacaagggctcgtggatcccgagcagggtgcgatggcggattgggaggtcccatgtcactctcccatgcccgcctttgaagctgaggcgctctttagttaacaaactacaagtcccagcagggaccgggacgcgggtgggagaggcgcctgtggccccgaggcgtgccgcgagttgtagtccctcctgcccgctgtgttcgcttttgagctctccgatgggatgcggcgcttcggaatttcgggctttgatccctgtcccgcccttggcacaggcacctgccggcctgaaggcccccgcggtgggggtaccctgcgcccctccgcgggaaggtggactacagttatcggcaggctgtgcggcgccaaagccacggtgacccagacccgaggtttttccgggcgtcgcagtttcccgagactccgtggcggcgtttgtcttctttttcttagtcagatcccgtacttttgtggagggtagaggaggctttgaccgccgcggccccgggggctggtgggaaatggagttccaaatgagaaaatagaattccccacttctctttcccacaggtgccagggaaacggagtcatcgacccaagaaggtcgtgggagatgaggtcccagggtaaacagcgggtcccgccactatgtcaccctttcctgccgcctccccggatgaactgcatgcagggcggccggctccgtggcaggcagaggcaggaagaggcgcggagcccgctggtggcgaagaggggagtgcggcgggaggggagggcagaggcaggcggccggtcgcgtggggcctgggccgccccaggagggcctctggctggattcttagcagatggaagccgtgcaagggcaggaggcaggggcctgacgtgtttggattgaggttgcaggaggggcccctggctgcttcagggagaataatttggaggcgagcggggaggtgagaggaagctgtgcggtgcaggatggcgtggctgtggaggtggagaacgttgggccacgctaggagtcttgaaagaggagccaaaaggacttgctgagagccgccgcagctggtgaatgacggtgccatgactgaggtggtcgaaagggagtatttaaggggaaatcaggcattccgttttgaccaaattaagctggagatgcctgtggaacattccagccaggctgcatcacgtcacactgaccttcagcattgcccacagtccatcttcccccaggacctgaggattttgcgtccggctccctcctcgcccaggacccccaagctcccagcacgcttctgatttttttttgtaggttttttttttttggtttttggtttggtttggttttgttttggagagggagtctcactttgtgccctagactgggagtgcaatggcgccatctcggcttactgcaacctccacctcccaggtgcaagcgattcccctgcctcagcttcccgagtagctgggattacagatgtgagccaccgtacccagctaatttttgtatttttagtagagacggggtttcaccatatgggccaagctggtctcgaactcctgacctcaggcgatccatctgtctcagcctcccaaagtgctgggattacaggtgtgagccaccgcgccaggcctcagcccacttcttttgggtggcaatggtttggatatcgtttgtcctcactaaaattcatgttgagattcgagccccagtgtggcaggtgttgggatgtggggcctcataggagctgtgtggtcttggaggtggagtcctcatggatagattaatgcctgccttaaggggtgagtgagtgctcacccttgggaatttgggaatttggttttctctcccttgcttccttcagcaccatgtgatctctgtgcacacagctgcatccttctgccctcccccagaagcagcagcagcctcagggatgagggaggtcctcagtgagtgcacctgcccagtcttgaaccttccagccatcagaatctgagccaaatcaacctcttcctttataaagacccagcctcaggtcttctgtcagagcaacacaaaatggactcagcacggatcaaattgtgtctcccccacccccacaaaaaactttatattaaaatcctaacccccagcatctcagaatgtgatctgattaggaaataaggtcattgcagatataattagttcagatgaggtcattcatgtgggccctaatccaataggatgtgtgtcttataaaagtttgtacagagacccagacacacagaaatgacaccatgtggaggtgaaggcagagattggggtgacgcctctacaaaccgaggaaaaccaaagctgccggcacaccctcagaagccagagaccggggactcatcctccctcacagcctcaggagcagccagggctgacaccctcatctcagacttctgacctccagcactgggagaccttcagtttttgtgatttaagccactaattttgaggactcacatgtgaccctaatgccgccatcaccttaactccgaggccagagtctacactacagcctccctaacagagggaaggggctgggttcccaccccttgctccttccctctccccgcatccagactacatcccgcaaatacaccagtgaacctggtaccaaggtgatgggggacaggtcaaggccaagagatcagagccacaaagacaaacccggtcagagggaaaaaga

SEQ ID NO: 453717 - DNA, 684 bp, Homo sapiens
  misc_feature (672)..(672): n is a, c, g, or t
catgaggaagcggggcagccggcagctcccagactggagatgctctggggaaagcacttgcttcgatctattctccagatcacactaacaacagcttttcatcaaacccttcaactcctgttggctctcctccatctctctcagcaggcacagctgtttggtctagaaatggaggacaggcctcatcgtctcctaattatgaaggacccttacactctttgcaaagccgaattgaagatcgtttagaaagactggatgatgctattcatgttctccggaaccatgcagtgggcccatccacagctatgcctggtggtcatggggacatgcatggaatcattggaccttctcataatggagccatgggtggtctgggctcagggtatggaaccggccttctttcagccaacagacattcactcatggtggggacccatcgtgaagatggcgtggccctgagaggcagccattctcttctgccaaaccaggttccggttccacagcttcctgtccagtctgcgacttcccctgacctgaacccaccccaggacccttacagaggcatgccaccaggactacaggggcagagtgtctcctctggcagctctgagatcaaatccgatgacgagtcgggcagaaggtacggctgatcgatcgagggttaaaaaaagngccacaaaacaa

SEQ ID NO: 453718 - DNA, 441 bp, Homo sapiens
catgaggaagcggggcagccggcagctcccagactggagatgctctggggaaagcacttgcttcggtgaggaaatattgactttggactccatatgtaccattgtaaagggtgaactttaatcagaagtggacatttggaattttagaaaatgaatggcaaatagctttgatttttggaaaatgctagctttcttgcataacagtcactggaaaatttgagaaggctctgaagcttccagtatatagtctctttctctcatcctcaaaatggtactaagctgcactcaattatggatgtgggaatattctcctggtctttgggtttataggttttttatactgatgtcttatttttctctaaagtaatatgggtgcacattgaccagctaagactgtcttagcaaggaatagttctaaaacactttgaaagaggcatttga

SEQ ID NO: 453719 - DNA, 7494 bp, Homo sapiens
  misc_feature (1217)..(1217): n is a, c, g, or t
catgtttattcacaatagtcattcagagctttatagcacgtgctgctctgccttcttgagacaagacgtcgtgcacacttctcttttttacatgacagcccttggaatatttgaaccctgctgctgtgacgacttcctcatatgatatgctttccaggtggctcatcatcctctttgccttccattcaaaagtttctaatttgtcactgtaacactcagaaatggacagaaccgatcttatcttttcagactattctgggcccggccatgcatttgttatgaatcatggaatattttggttttcacaattagaaattaccttttggctttttttttttttttttttgtaagagacagagtctggctgtgttgcccaggctggagtgcagtggcctgatcacatctcactgtagcctccacctcctagattcaagtgagcctcccacctcagcctcctgagtagctgagaccgcaggtgtgcatcactgtgcccagctaatttttttttattttttgtagagacgaggtctcactatatcatccaggctggggttataggcatgagccactgcacccagctttctggcttcatttttgactcacaatgaggtcatggtcattcataagctgcaggtgtttggtttgttgaatcgttttgcatgactgatatcagttcaggtttcccaaacttgttctgtggatcataaacatctataagattaaagaccatggaagtcatgtttttgtaactttttgtttaatacatagagaaaatgagactcacatagtgggttgaccaggccttcaaagcaaggtaatggggacacctgaataaaagcctcactgtcttcactcccattgctctggtgtcttacatataggcctttcttcttactcctgttaagctgccttgtatttttttgacctatcaaaatcatttttcaattacttgtttcccctagatttcagatgtcacggtatgaaaggttttatatatatttaaaaaataaagtataaacataaagtctttttgaagcgtggttatgcaacatatgctaggcgtaagttggtgaatgcctgctttgcagagtgtaaccccattgaataaaaaaagctttgttttccctttctgcccccctgtatcagtatgggcacaccctgcactctaactttaatctacgtcaccctcacctgtttggtttgggtttaatgtctgngagaaaaccaaatatcttgtgtattgtgaactgtcaaagccatctaaaccaatcccaaggtcaagtggatataaaaattctgccaaaaacatggcataagatggaaaagttccctgaaaactctggaagaaaacaaagtaatgtagacaccttctttttccccacaccattagaaaatgttgcatcccttttgtcccacagcaataatgacgatgaggacctgacaccagagcagaaggcagagcgtgagaaggagcggaggatggccaacaatgcccgagagcgtctgcgggtccgtgacatcaacgaggctttcaaagagctcggccgcatggtgcagctccacctcaagagtgacaagccccagaccaagctcctgatcctccaccaggcggtggccgtcatcctcagtctggagcagcaagtccgagaaaggaatctgaatccgaaagctgcgtgtctgaaaagaagggaggaagagaaggtgtcctcagagcctccccctctctccttggccggcccacaccctggaatgggagacgcatcgaatcacatgggacagatgtaaaagggtccaagttgccacattgcttcattaaaacaagagaccacttccttaacagctgtattatcttaaacccacataaacacttctccttaacccccatttttgtaatataagacaagtctgagtagttatgaatcgcagacgcaagaggtttcagcattcccaattatcaaaaaacagaaaaacaaaaaaaagaaagaaaaaagtgcaacttgagggacgactttctttaacatatcattcagaatgtgcaaagcagtatgtacaggctgagacacagcccagagactgaacggcaatctttccacactgtggaacaatgcatttgtgcctaaacttcttttggaaaaaaaaaatataattaatttgtaagtctgaaaaaaaaatatttaatttaaaaaaaattgtaaacttgcaataatgaaaaagtgtacttctgaagaaaactacatgaacgtttttgttggtattcaagtcagctagtgtttataattactggatattgaattaggggaagctcggctgccctagtaacaaaaccagcaaacgtcctgatgacaacgaagtgatgacattagccattccttagggtaggaggaacagatggatcttatagacctatgacaaatatatatataaatatatatataaatatatattaaaaatttagtgactatggtaagcttttgttcatttgtttcagacttttttctcctgtaaaaaaatagtactgattaacttttttaaaagaaagattttactgtaaatatggatttttttttttttggtcttatttctgtccctttccctggtttgttatcgtaacctgtagtgccaactctgcttccagaggggtagtgcaggatgaaatgctgaccctgatgttgcttctcattcataaataagtagaaagttgtttctccagtcttttgggaacacaggacttaaaagtcacatcatgtgtagatattacaagcagcattaccaagacatggcaaaaagagtttgtctgaattgtaatgttgcgtttgtgaacctattctgggattttcagaggtacaaggttagaatgctacaatgttaccactgtgccttccaatgtttatatcatcggaaacataacataatcaaagtggctgtgatttaacaaaatgattaaagtgttacctacctgtgtagccgaagtagtgtgcagtgaggcgtttctgaatacatggtcagatttttggaaaaaaacaaaaacaaaaaaaacaagtaaagttcaaaaaccgtcaaatgagaaaattgcaagtagtgtgacagagctgattgattttgttgctttcttgattttttttttcaaaatgggtttactaaaatgtagatgacttaactgcctcctccttcgtctgaaaaatgccaatattcaatcatcatgcagcattataacaagccttataagtcctaaagcattaagttgcacttttttgaggaggggtagtgcagtatttctctggccagtatgaatgaagtttatacttaccatatttgatagaaacatagatcaagctatggcacagcgactcatcagatagctagctttgacgtctgggcacaattgaaccaacttccatcgtgaatctttataatgattgactttggtgtatagtgcagtaaacaaatagtgctcctagttaagtatttgtcagcatccttttgtctctaacttgtttctatttttacagccacacaattcttggcatgtattaagaaaaaaaaaaatccctgttcaagtagtttttccacctatcagcactgagtaaatgccataaatccattgaaatggtctaaatgttccatctgttctcctgttttgccagttatatagtaatgaaatacatttgtaaattttatgcaacaaatggcaaacgtatcattattttgaaattgtgtatgtaaaagttatatttttacatgtagactcttgttattatgtgttttaatacattgtatcagtttttgtttttttttaaaaactgtggtttaaaaagaagtctcatttaaatgaaatagctacaagaatcagaattttatgttcatttctgaaaatgtaagaacaaataagatagttaccacgtggtcatcttttacaaacccataaacattttgattagctgtgtgtgtgttgaaaaactgtaaatatgttcagtagcgataaaactaaaataactttgatttgttgataagttcctaaaatgtggaggtggattaaaaccttaggagaatagcagaaatcaaacttcatgaaaagttattttggggctttcctgtgaaatgtatgaacaaagaggctcagagaaggacatggaagacaataatgtatactctctcctcctccctgaataatgaaaaccatgtgtatttgttccctccgtatgttaaagatttccttttagtggtacattctgcactcattttgtatagtctaccaaggcgggtatccctaggaacaatattatataggaagcaggtatactctgatcacattcaggataagtgtacagaagaaaatacggtgtttactctttagggaactggaaacactccctgcattgatgtacattttaagaatggcacttttgatacatgttatcataaaggtgcttaatagagctgaattaaagtttttcaaatctgtaaacaaagcaaaaaagtaaattgtagtcatttgattattttttaaattggtgctttatattttgttctcactcagagtaaaagctgcaatttattgttcaccagctttgatgtattcattactcagtaatgcaatacctctattgttgaattccctttggaaataagtgaaaattctaacggccactgaaagctgctcgctaggttttgcttggtggagaaacataatctgcacctatccatattaattgggttgtatccccattaaaaaagaaaaaaagggaatgtggcctttttagtgtgttttttattgttgttgttttgtaattatcaaacccaggtaagatattggtatcctgcactggattttcaaatgaagttcagcagaagacagttaagattaaagtactatacaaaaatttcaaaagggtccatactacgctatctgtatgacgacacttaggctggggatctctttcagaaactcggactttaaaagcaacttggagcagttgatccacctccacattcaagtaatttatgaatatgcagaatagggatctgttcatctagaaatttttaccatttgtcttctgtgtagctgcaaggaacactaatgtttatacaactgtcagtccacccagtggtgcaactggttctgattcagtcttccgattcctttttatttttcactttttcctatttctgaatttttttttttatttgtgatcttgattttgatgaggggttggggagtggggagggagtcgaaccaagacttggagttaagaggattttcatcttttgcatccaacaggcagaatatgatctgtgtccaaaagtgaacttgagtcaggaatgaatcaatttcagcataaacaagcacaaaaatttagtctgctggctgactggaagcaaaaaagtcaagatggaatatgatgaattccaacacaatggggcaccaaggcctttaggcctctctttttattttgctttggttttgtttgtttttctttagagacatgctctttctcatgggacttgaagtggactcatctttgtgcagtgctggttttgccatactcatttcaagtattatagacatatgtaatggtgaaaatatatgaactgtggcctttttcattcttgttacttgtgatgcaattaagtgaagataagaaaaaaaaaaaaaaagcagagatttaccatgtatcagtgcctggctttttgttataaagctttgtttgtctagtgctcttttgctataaaatagactgtagtacaccctagtaggaaaaaaaaaaaactaaatttaaaaataaaaaatatatttggcttatttttcgcaggagcaatccttttataccatgaatattacaaaaaaattgtcagattctgaatatttcttctttgtagatttttggaatcattatgagtaaaagtttgttactttattttactatttaaaagatgttattttaccatgtgttaccaagatgaaactgtatgggtagcttttttgtttgttttttgttttgtttttgtttttgtttttgtttttagttgtaggtcgcagcggggaaattttttgcgactgtacacatagctgcagcattaaaaacttaaaaaaattgttaaaaaaaaaaaaagggaaaacatttcaaaaaaaaaaaaaaagataaacagttacaccttgttttcaatgtgtggctgagtgcctcgattttttcatgtttttggtgtatttctgatttgtagaagtgtccaaacaggttgtgtgctggagttccttcaagacaaaaacaaacccagcttggtcaaggccattacctgtttcccatctgtagttattcgatgaagtcatgtacatgaccgttctgtagcaataaatgtgccatttttataaactgtttctgacacttgtttcatttcattttgcattgtccatatagctatgattctcttctgtaagtaaaacgcatctatatttcattttccaagtgttggaggtattgacagcttaacaaacaaaacatacaaaaaaaatcacaaaaacaaattgaaaagcaaagcacatgattgatcaaggaagagatgcccttaatgaaaatggaacgggatgcatgcaaaacaaaaagaaaactgtctagaggattaactaattgaaggaatataattaatgtgtgtgtaacactgaagctatgcatttgaagagctctgaactgcaccagtgttttcggttgtgctgcaggttgctaagtcaagtcagccttaaccttttgcaccagttggtcggctgtttggcagaacattctcagatcttttcagtcaaaaatctaagatgatttattttgtatcactttgttaaaagctgaatattgttaactacagttaatattaacactgtatttatactttctcaaactacatccgccccaccacttctggttgcctctgttgactattaatccagatgtaaacaaccagatgtttttttctaacttgtacaaactgacgtgtgtcaactatcatggaaggaaaaaaatgtacagattaaaattattcagtgttatgtactgtaagttaatatttttgtagaatggacatcaatctactttgcaaaatttggaggctatttcaacattgcactgtagaaatgtaaagtaatgtatgcaatgtaaaggaaagcccgcggtagctgagcgcttcataacagaatgttctaatcaagtacgtggtatttggggatgtctccaatattgctcttgtattctttctaattgggtttagtgactagttgaaggaaaatgttataacgccatttggttcacatgtgaagtgccctccatagccaaatgttgggatttttttttttttcgtttttggttggactgtttgcagatatttaaattttatgaaatttccaaagattttggttgataacccccttttaccttctaaatgatttgagatgttcttatgttcttactgtgtgttttaaatatatataaaagagccacaagcaaaaaaaat

SEQ ID NO: 453720 - DNA, 6800 bp, Homo sapiens
catgaggaagcggggcagccggcagctcccagactggagatgctctggggaaagcacttgcttcgatctattctccagatcacactaacaacagcttttcatcaaacccttcaactcctgttggctctcctccatctctctcagcaggcacagctgtttggtctagaaatggaggacaggcctcatcgtctcctaattatgaaggacccttacactctttgcaaagccgaattgaagatcgtttagaaagactggatgatgctattcatgttctccggaaccatgcagtgggcccatccacagctatgcctggtggtcatggggacatgcatggaatcattggaccttctcataatggagccatgggtggtctgggctcagggtatggaaccggccttctttcagccaacagacattcactcatggtggggacccatcgtgaagatggcgtggccctgagaggcagccattctcttctgccaaaccaggttccggttccacagcttcctgtccagtctgcgacttcccctgacctgaacccaccccaggacccttacagaggcatgccaccaggactacaggggcagagtgtctcctctggcagctctgagatcaaatccgatgacgagggtgatgagaacctgcaagacacgaaatcttcggaggacaagaaattagatgacgacaagaaggatatcaaatcaattactaggtcaagatctagcaataatgacgatgaggacctgacaccagagcagaaggcagagcgtgagaaggagcggaggatggccaacaatgcccgagagcgtctgcgggtccgtgacatcaacgaggctttcaaagagctcggccgcatggtgcagctccacctcaagagtgacaagccccagaccaagctcctgatcctccaccaggcggtggccgtcatcctcagtctggagcagcaagtccgagaaaggaatctgaatccgaaagctgcgtgtctgaaaagaagggaggaagagaaggtgtcctcagagcctccccctctctccttggccggcccacaccctggaatgggagacgcatcgaatcacatgggacagatgtaaaagggtccaagttgccacattgcttcattaaaacaagagaccacttccttaacagctgtattatcttaaacccacataaacacttctccttaacccccatttttgtaatataagacaagtctgagtagttatgaatcgcagacgcaagaggtttcagcattcccaattatcaaaaaacagaaaaacaaaaaaaagaaagaaaaaagtgcaacttgagggacgactttctttaacatatcattcagaatgtgcaaagcagtatgtacaggctgagacacagcccagagactgaacggcaatctttccacactgtggaacaatgcatttgtgcctaaacttcttttggaaaaaaaaaatataattaatttgtaagtctgaaaaaaaaatatttaatttaaaaaaaattgtaaacttgcaataatgaaaaagtgtacttctgaagaaaactacatgaacgtttttgttggtattcaagtcagctagtgtttataattactggatattgaattaggggaagctcggctgccctagtaacaaaaccagcaaacgtcctgatgacaacgaagtgatgacattagccattccttagggtaggaggaacagatggatcttatagacctatgacaaatatatatataaatatatatataaatatatattaaaaatttagtgactatggtaagcttttgttcatttgtttcagacttttttctcctgtaaaaaaatagtactgattaacttttttaaaagaaagattttactgtaaatatggatttttttttttttggtcttatttctgtccctttccctggtttgttatcgtaacctgtagtgccaactctgcttccagaggggtagtgcaggatgaaatgctgaccctgatgttgcttctcattcataaataagtagaaagttgtttctccagtcttttgggaacacaggacttaaaagtcacatcatgtgtagatattacaagcagcattaccaagacatggcaaaaagagtttgtctgaattgtaatgttgcgtttgtgaacctattctgggattttcagaggtacaaggttagaatgctacaatgttaccactgtgccttccaatgtttatatcatcggaaacataacataatcaaagtggctgtgatttaacaaaatgattaaagtgttacctacctgtgtagccgaagtagtgtgcagtgaggcgtttctgaatacatggtcagatttttggaaaaaaacaaaaacaaaaaaaacaagtaaagttcaaaaaccgtcaaatgagaaaattgcaagtagtgtgacagagctgattgattttgttgctttcttgattttttttttcaaaatgggtttactaaaatgtagatgacttaactgcctcctccttcgtctgaaaaatgccaatattcaatcatcatgcagcattataacaagccttataagtcctaaagcattaagttgcacttttttgaggaggggtagtgcagtatttctctggccagtatgaatgaagtttatacttaccatatttgatagaaacatagatcaagctatggcacagcgactcatcagatagctagctttgacgtctgggcacaattgaaccaacttccatcgtgaatctttataatgattgactttggtgtatagtgcagtaaacaaatagtgctcctagttaagtatttgtcagcatccttttgtctctaacttgtttctatttttacagccacacaattcttggcatgtattaagaaaaaaaaaaatccctgttcaagtagtttttccacctatcagcactgagtaaatgccataaatccattgaaatggtctaaatgttccatctgttctcctgttttgccagttatatagtaatgaaatacatttgtaaattttatgcaacaaatggcaaacgtatcattattttgaaattgtgtatgtaaaagttatatttttacatgtagactcttgttattatgtgttttaatacattgtatcagtttttgtttttttttaaaaactgtggtttaaaaagaagtctcatttaaatgaaatagctacaagaatcagaattttatgttcatttctgaaaatgtaagaacaaataagatagttaccacgtggtcatcttttacaaacccataaacattttgattagctgtgtgtgtgttgaaaaactgtaaatatgttcagtagcgataaaactaaaataactttgatttgttgataagttcctaaaatgtggaggtggattaaaaccttaggagaatagcagaaatcaaacttcatgaaaagttattttggggctttcctgtgaaatgtatgaacaaagaggctcagagaaggacatggaagacaataatgtatactctctcctcctccctgaataatgaaaaccatgtgtatttgttccctccgtatgttaaagatttccttttagtggtacattctgcactcattttgtatagtctaccaaggcgggtatccctaggaacaatattatataggaagcaggtatactctgatcacattcaggataagtgtacagaagaaaatacggtgtttactctttagggaactggaaacactccctgcattgatgtacattttaagaatggcacttttgatacatgttatcataaaggtgcttaatagagctgaattaaagtttttcaaatctgtaaacaaagcaaaaaagtaaattgtagtcatttgattattttttaaattggtgctttatattttgttctcactcagagtaaaagctgcaatttattgttcaccagctttgatgtattcattactcagtaatgcaatacctctattgttgaattccctttggaaataagtgaaaattctaacggccactgaaagctgctcgctaggttttgcttggtggagaaacataatctgcacctatccatattaattgggttgtatccccattaaaaaagaaaaaaagggaatgtggcctttttagtgtgttttttattgttgttgttttgtaattatcaaacccaggtaagatattggtatcctgcactggattttcaaatgaagttcagcagaagacagttaagattaaagtactatacaaaaatttcaaaagggtccatactacgctatctgtatgacgacacttaggctggggatctctttcagaaactcggactttaaaagcaacttggagcagttgatccacctccacattcaagtaatttatgaatatgcagaatagggatctgttcatctagaaatttttaccatttgtcttctgtgtagctgcaaggaacactaatgtttatacaactgtcagtccacccagtggtgcaactggttctgattcagtcttccgattcctttttatttttcactttttcctatttctgaatttttttttttatttgtgatcttgattttgatgaggggttggggagtggggagggagtcgaaccaagacttggagttaagaggattttcatcttttgcatccaacaggcagaatatgatctgtgtccaaaagtgaacttgagtcaggaatgaatcaatttcagcataaacaagcacaaaaatttagtctgctggctgactggaagcaaaaaagtcaagatggaatatgatgaattccaacacaatggggcaccaaggcctttaggcctctctttttattttgctttggttttgtttgtttttctttagagacatgctctttctcatgggacttgaagtggactcatctttgtgcagtgctggttttgccatactcatttcaagtattatagacatatgtaatggtgaaaatatatgaactgtggcctttttcattcttgttacttgtgatgcaattaagtgaagataagaaaaaaaaaaaaaaagcagagatttaccatgtatcagtgcctggctttttgttataaagctttgtttgtctagtgctcttttgctataaaatagactgtagtacaccctagtaggaaaaaaaaaaaactaaatttaaaaataaaaaatatatttggcttatttttcgcaggagcaatccttttataccatgaatattacaaaaaaattgtcagattctgaatatttcttctttgtagatttttggaatcattatgagtaaaagtttgttactttattttactatttaaaagatgttattttaccatgtgttaccaagatgaaactgtatgggtagcttttttgtttgttttttgttttgtttttgtttttgtttttgtttttagttgtaggtcgcagcggggaaattttttgcgactgtacacatagctgcagcattaaaaacttaaaaaaattgttaaaaaaaaaaaaagggaaaacatttcaaaaaaaaaaaaaaagataaacagttacaccttgttttcaatgtgtggctgagtgcctcgattttttcatgtttttggtgtatttctgatttgtagaagtgtccaaacaggttgtgtgctggagttccttcaagacaaaaacaaacccagcttggtcaaggccattacctgtttcccatctgtagttattcgatgaagtcatgtacatgaccgttctgtagcaataaatgtgccatttttataaactgtttctgacacttgtttcatttcattttgcattgtccatatagctatgattctcttctgtaagtaaaacgcatctatatttcattttccaagtgttggaggtattgacagcttaacaaacaaaacatacaaaaaaaatcacaaaaacaaattgaaaagcaaagcacatgattgatcaaggaagagatgcccttaatgaaaatggaacgggatgcatgcaaaacaaaaagaaaactgtctagaggattaactaattgaaggaatataattaatgtgtgtgtaacactgaagctatgcatttgaagagctctgaactgcaccagtgttttcggttgtgctgcaggttgctaagtcaagtcagccttaaccttttgcaccagttggtcggctgtttggcagaacattctcagatcttttcagtcaaaaatctaagatgatttattttgtatcactttgttaaaagctgaatattgttaactacagttaatattaacactgtatttatactttctcaaactacatccgccccaccacttctggttgcctctgttgactattaatccagatgtaaacaaccagatgtttttttctaacttgtacaaactgacgtgtgtcaactatcatggaaggaaaaaaatgtacagattaaaattattcagtgttatgtactgtaagttaatatttttgtagaatggacatcaatctactttgcaaaatttggaggctatttcaacattgcactgtagaaatgtaaagtaatgtatgcaatgtaaaggaaagcccgcggtagctgagcgcttcataacagaatgttctaatcaagtacgtggtatttggggatgtctccaatattgctcttgtattctttctaattgggtttagtgactagttgaaggaaaatgttataacgccatttggttcacatgtgaagtgccctccatagccaaatgttgggatttttttttttttcgtttttggttggactgtttgcagatatttaaattttatgaaatttccaaagattttggttgataacccccttttaccttctaaatgatttgagatgttcttatgttcttactgtgtgttttaaatatatataaaagagccacaagcaaaaaaaat

SEQ ID NO: 453721 - DNA, 6937 bp, Homo sapiens
acacctaggcgcacttctgcacccaggcgcacttctgcacccaggcgcacttctgcacccaggcgcacttctgcacccaggcgcacttctgcacccaggcgcacttctgcacccaggcccacttcttaatcatggcctcagttccgaaaaccaacaaaatagaaccgcggtcagaagtgcgcctgggtgcgcacccaggcgcatctattctccagatcacactaacaacagcttttcatcaaacccttcaactcctgttggctctcctccatctctctcagcaggcacagctgtttggtctagaaatggaggacaggcctcatcgtctcctaattatgaaggacccttacactctttgcaaagccgaattgaagatcgtttagaaagactggatgatgctattcatgttctccggaaccatgcagtgggcccatccacagctatgcctggtggtcatggggacatgcatggaatcattggaccttctcataatggagccatgggtggtctgggctcagggtatggaaccggccttctttcagccaacagacattcactcatggtggggacccatcgtgaagatggcgtggccctgagaggcagccattctcttctgccaaaccaggttccggttccacagcttcctgtccagtctgcgacttcccctgacctgaacccaccccaggacccttacagaggcatgccaccaggactacaggggcagagtgtctcctctggcagctctgagatcaaatccgatgacgagggtgatgagaacctgcaagacacgaaatcttcggaggacaagaaattagatgacgacaagaaggatatcaaatcaattactaggtcaagatctagcaataatgacgatgaggacctgacaccagagcagaaggcagagcgtgagaaggagcggaggatggccaacaatgcccgagagcgtctgcgggtccgtgacatcaacgaggctttcaaagagctcggccgcatggtgcagctccacctcaagagtgacaagccccagaccaagctcctgatcctccaccaggcggtggccgtcatcctcagtctggagcagcaagtccgagaaaggaatctgaatccgaaagctgcgtgtctgaaaagaagggaggaagagaaggtgtcctcagagcctccccctctctccttggccggcccacaccctggaatgggagacgcatcgaatcacatgggacagatgtaaaagggtccaagttgccacattgcttcattaaaacaagagaccacttccttaacagctgtattatcttaaacccacataaacacttctccttaacccccatttttgtaatataagacaagtctgagtagttatgaatcgcagacgcaagaggtttcagcattcccaattatcaaaaaacagaaaaacaaaaaaaagaaagaaaaaagtgcaacttgagggacgactttctttaacatatcattcagaatgtgcaaagcagtatgtacaggctgagacacagcccagagactgaacggcaatctttccacactgtggaacaatgcatttgtgcctaaacttcttttggaaaaaaaaaatataattaatttgtaagtctgaaaaaaaaatatttaatttaaaaaaaattgtaaacttgcaataatgaaaaagtgtacttctgaagaaaactacatgaacgtttttgttggtattcaagtcagctagtgtttataattactggatattgaattaggggaagctcggctgccctagtaacaaaaccagcaaacgtcctgatgacaacgaagtgatgacattagccattccttagggtaggaggaacagatggatcttatagacctatgacaaatatatatataaatatatatataaatatatattaaaaatttagtgactatggtaagcttttgttcatttgtttcagacttttttctcctgtaaaaaaatagtactgattaacttttttaaaagaaagattttactgtaaatatggatttttttttttttggtcttatttctgtccctttccctggtttgttatcgtaacctgtagtgccaactctgcttccagaggggtagtgcaggatgaaatgctgaccctgatgttgcttctcattcataaataagtagaaagttgtttctccagtcttttgggaacacaggacttaaaagtcacatcatgtgtagatattacaagcagcattaccaagacatggcaaaaagagtttgtctgaattgtaatgttgcgtttgtgaacctattctgggattttcagaggtacaaggttagaatgctacaatgttaccactgtgccttccaatgtttatatcatcggaaacataacataatcaaagtggctgtgatttaacaaaatgattaaagtgttacctacctgtgtagccgaagtagtgtgcagtgaggcgtttctgaatacatggtcagatttttggaaaaaaacaaaaacaaaaaaaacaagtaaagttcaaaaaccgtcaaatgagaaaattgcaagtagtgtgacagagctgattgattttgttgctttcttgattttttttttcaaaatgggtttactaaaatgtagatgacttaactgcctcctccttcgtctgaaaaatgccaatattcaatcatcatgcagcattataacaagccttataagtcctaaagcattaagttgcacttttttgaggaggggtagtgcagtatttctctggccagtatgaatgaagtttatacttaccatatttgatagaaacatagatcaagctatggcacagcgactcatcagatagctagctttgacgtctgggcacaattgaaccaacttccatcgtgaatctttataatgattgactttggtgtatagtgcagtaaacaaatagtgctcctagttaagtatttgtcagcatccttttgtctctaacttgtttctatttttacagccacacaattcttggcatgtattaagaaaaaaaaaaatccctgttcaagtagtttttccacctatcagcactgagtaaatgccataaatccattgaaatggtctaaatgttccatctgttctcctgttttgccagttatatagtaatgaaatacatttgtaaattttatgcaacaaatggcaaacgtatcattattttgaaattgtgtatgtaaaagttatatttttacatgtagactcttgttattatgtgttttaatacattgtatcagtttttgtttttttttaaaaactgtggtttaaaaagaagtctcatttaaatgaaatagctacaagaatcagaattttatgttcatttctgaaaatgtaagaacaaataagatagttaccacgtggtcatcttttacaaacccataaacattttgattagctgtgtgtgtgttgaaaaactgtaaatatgttcagtagcgataaaactaaaataactttgatttgttgataagttcctaaaatgtggaggtggattaaaaccttaggagaatagcagaaatcaaacttcatgaaaagttattttggggctttcctgtgaaatgtatgaacaaagaggctcagagaaggacatggaagacaataatgtatactctctcctcctccctgaataatgaaaaccatgtgtatttgttccctccgtatgttaaagatttccttttagtggtacattctgcactcattttgtatagtctaccaaggcgggtatccctaggaacaatattatataggaagcaggtatactctgatcacattcaggataagtgtacagaagaaaatacggtgtttactctttagggaactggaaacactccctgcattgatgtacattttaagaatggcacttttgatacatgttatcataaaggtgcttaatagagctgaattaaagtttttcaaatctgtaaacaaagcaaaaaagtaaattgtagtcatttgattattttttaaattggtgctttatattttgttctcactcagagtaaaagctgcaatttattgttcaccagctttgatgtattcattactcagtaatgcaatacctctattgttgaattccctttggaaataagtgaaaattctaacggccactgaaagctgctcgctaggttttgcttggtggagaaacataatctgcacctatccatattaattgggttgtatccccattaaaaaagaaaaaaagggaatgtggcctttttagtgtgttttttattgttgttgttttgtaattatcaaacccaggtaagatattggtatcctgcactggattttcaaatgaagttcagcagaagacagttaagattaaagtactatacaaaaatttcaaaagggtccatactacgctatctgtatgacgacacttaggctggggatctctttcagaaactcggactttaaaagcaacttggagcagttgatccacctccacattcaagtaatttatgaatatgcagaatagggatctgttcatctagaaatttttaccatttgtcttctgtgtagctgcaaggaacactaatgtttatacaactgtcagtccacccagtggtgcaactggttctgattcagtcttccgattcctttttatttttcactttttcctatttctgaatttttttttttatttgtgatcttgattttgatgaggggttggggagtggggagggagtcgaaccaagacttggagttaagaggattttcatcttttgcatccaacaggcagaatatgatctgtgtccaaaagtgaacttgagtcaggaatgaatcaatttcagcataaacaagcacaaaaatttagtctgctggctgactggaagcaaaaaagtcaagatggaatatgatgaattccaacacaatggggcaccaaggcctttaggcctctctttttattttgctttggttttgtttgtttttctttagagacatgctctttctcatgggacttgaagtggactcatctttgtgcagtgctggttttgccatactcatttcaagtattatagacatatgtaatggtgaaaatatatgaactgtggcctttttcattcttgttacttgtgatgcaattaagtgaagataagaaaaaaaaaaaaaaagcagagatttaccatgtatcagtgcctggctttttgttataaagctttgtttgtctagtgctcttttgctataaaatagactgtagtacaccctagtaggaaaaaaaaaaaactaaatttaaaaataaaaaatatatttggcttatttttcgcaggagcaatccttttataccatgaatattacaaaaaaattgtcagattctgaatatttcttctttgtagatttttggaatcattatgagtaaaagtttgttactttattttactatttaaaagatgttattttaccatgtgttaccaagatgaaactgtatgggtagcttttttgtttgttttttgttttgtttttgtttttgtttttgtttttagttgtaggtcgcagcggggaaattttttgcgactgtacacatagctgcagcattaaaaacttaaaaaaattgttaaaaaaaaaaaaagggaaaacatttcaaaaaaaaaaaaaaagataaacagttacaccttgttttcaatgtgtggctgagtgcctcgattttttcatgtttttggtgtatttctgatttgtagaagtgtccaaacaggttgtgtgctggagttccttcaagacaaaaacaaacccagcttggtcaaggccattacctgtttcccatctgtagttattcgatgaagtcatgtacatgaccgttctgtagcaataaatgtgccatttttataaactgtttctgacacttgtttcatttcattttgcattgtccatatagctatgattctcttctgtaagtaaaacgcatctatatttcattttccaagtgttggaggtattgacagcttaacaaacaaaacatacaaaaaaaatcacaaaaacaaattgaaaagcaaagcacatgattgatcaaggaagagatgcccttaatgaaaatggaacgggatgcatgcaaaacaaaaagaaaactgtctagaggattaactaattgaaggaatataattaatgtgtgtgtaacactgaagctatgcatttgaagagctctgaactgcaccagtgttttcggttgtgctgcaggttgctaagtcaagtcagccttaaccttttgcaccagttggtcggctgtttggcagaacattctcagatcttttcagtcaaaaatctaagatgatttattttgtatcactttgttaaaagctgaatattgttaactacagttaatattaacactgtatttatactttctcaaactacatccgccccaccacttctggttgcctctgttgactattaatccagatgtaaacaaccagatgtttttttctaacttgtacaaactgacgtgtgtcaactatcatggaaggaaaaaaatgtacagattaaaattattcagtgttatgtactgtaagttaatatttttgtagaatggacatcaatctactttgcaaaatttggaggctatttcaacattgcactgtagaaatgtaaagtaatgtatgcaatgtaaaggaaagcccgcggtagctgagcgcttcataacagaatgttctaatcaagtacgtggtatttggggatgtctccaatattgctcttgtattctttctaattgggtttagtgactagttgaaggaaaatgttataacgccatttggttcacatgtgaagtgccctccatagccaaatgttgggatttttttttttttcgtttttggttggactgtttgcagatatttaaattttatgaaatttccaaagattttggttgataacccccttttaccttctaaatgatttgagatgttcttatgttcttactgtgtgttttaaatatatataaaagagccacaagcaaaaaaaat

SEQ ID NO: 453722 - DNA, 6788 bp, Homo sapiens
gtacccactagtccacggttggctagtgtgctctggggaaagcacttgcttcgatctattctccagatcacactaacaacagcttttcatcaaacccttcaactcctgttggctctcctccatctctctcagcaggcacagctgtttggtctagaaatggaggacaggcctcatcgtctcctaattatgaaggacccttacactctttgcaaagccgaattgaagatcgtttagaaagactggatgatgctattcatgttctccggaaccatgcagtgggcccatccacagctatgcctggtggtcatggggacatgcatggaatcattggaccttctcataatggagccatgggtggtctgggctcagggtatggaaccggccttctttcagccaacagacattcactcatggtggggacccatcgtgaagatggcgtggccctgagaggcagccattctcttctgccaaaccaggttccggttccacagcttcctgtccagtctgcgacttcccctgacctgaacccaccccaggacccttacagaggcatgccaccaggactacaggggcagagtgtctcctctggcagctctgagatcaaatccgatgacgagggtgatgagaacctgcaagacacgaaatcttcggaggacaagaaattagatgacgacaagaaggatatcaaatcaattactaggtcaagatctagcaataatgacgatgaggacctgacaccagagcagaaggcagagcgtgagaaggagcggaggatggccaacaatgcccgagagcgtctgcgggtccgtgacatcaacgaggctttcaaagagctcggccgcatggtgcagctccacctcaagagtgacaagccccagaccaagctcctgatcctccaccaggcggtggccgtcatcctcagtctggagcagcaagtccgagaaaggaatctgaatccgaaagctgcgtgtctgaaaagaagggaggaagagaaggtgtcctcagagcctccccctctctccttggccggcccacaccctggaatgggagacgcatcgaatcacatgggacagatgtaaaagggtccaagttgccacattgcttcattaaaacaagagaccacttccttaacagctgtattatcttaaacccacataaacacttctccttaacccccatttttgtaatataagacaagtctgagtagttatgaatcgcagacgcaagaggtttcagcattcccaattatcaaaaaacagaaaaacaaaaaaaagaaagaaaaaagtgcaacttgagggacgactttctttaacatatcattcagaatgtgcaaagcagtatgtacaggctgagacacagcccagagactgaacggcaatctttccacactgtggaacaatgcatttgtgcctaaacttcttttggaaaaaaaaaatataattaatttgtaagtctgaaaaaaaaatatttaatttaaaaaaaattgtaaacttgcaataatgaaaaagtgtacttctgaagaaaactacatgaacgtttttgttggtattcaagtcagctagtgtttataattactggatattgaattaggggaagctcggctgccctagtaacaaaaccagcaaacgtcctgatgacaacgaagtgatgacattagccattccttagggtaggaggaacagatggatcttatagacctatgacaaatatatatataaatatatatataaatatatattaaaaatttagtgactatggtaagcttttgttcatttgtttcagacttttttctcctgtaaaaaaatagtactgattaacttttttaaaagaaagattttactgtaaatatggatttttttttttttggtcttatttctgtccctttccctggtttgttatcgtaacctgtagtgccaactctgcttccagaggggtagtgcaggatgaaatgctgaccctgatgttgcttctcattcataaataagtagaaagttgtttctccagtcttttgggaacacaggacttaaaagtcacatcatgtgtagatattacaagcagcattaccaagacatggcaaaaagagtttgtctgaattgtaatgttgcgtttgtgaacctattctgggattttcagaggtacaaggttagaatgctacaatgttaccactgtgccttccaatgtttatatcatcggaaacataacataatcaaagtggctgtgatttaacaaaatgattaaagtgttacctacctgtgtagccgaagtagtgtgcagtgaggcgtttctgaatacatggtcagatttttggaaaaaaacaaaaacaaaaaaaacaagtaaagttcaaaaaccgtcaaatgagaaaattgcaagtagtgtgacagagctgattgattttgttgctttcttgattttttttttcaaaatgggtttactaaaatgtagatgacttaactgcctcctccttcgtctgaaaaatgccaatattcaatcatcatgcagcattataacaagccttataagtcctaaagcattaagttgcacttttttgaggaggggtagtgcagtatttctctggccagtatgaatgaagtttatacttaccatatttgatagaaacatagatcaagctatggcacagcgactcatcagatagctagctttgacgtctgggcacaattgaaccaacttccatcgtgaatctttataatgattgactttggtgtatagtgcagtaaacaaatagtgctcctagttaagtatttgtcagcatccttttgtctctaacttgtttctatttttacagccacacaattcttggcatgtattaagaaaaaaaaaaatccctgttcaagtagtttttccacctatcagcactgagtaaatgccataaatccattgaaatggtctaaatgttccatctgttctcctgttttgccagttatatagtaatgaaatacatttgtaaattttatgcaacaaatggcaaacgtatcattattttgaaattgtgtatgtaaaagttatatttttacatgtagactcttgttattatgtgttttaatacattgtatcagtttttgtttttttttaaaaactgtggtttaaaaagaagtctcatttaaatgaaatagctacaagaatcagaattttatgttcatttctgaaaatgtaagaacaaataagatagttaccacgtggtcatcttttacaaacccataaacattttgattagctgtgtgtgtgttgaaaaactgtaaatatgttcagtagcgataaaactaaaataactttgatttgttgataagttcctaaaatgtggaggtggattaaaaccttaggagaatagcagaaatcaaacttcatgaaaagttattttggggctttcctgtgaaatgtatgaacaaagaggctcagagaaggacatggaagacaataatgtatactctctcctcctccctgaataatgaaaaccatgtgtatttgttccctccgtatgttaaagatttccttttagtggtacattctgcactcattttgtatagtctaccaaggcgggtatccctaggaacaatattatataggaagcaggtatactctgatcacattcaggataagtgtacagaagaaaatacggtgtttactctttagggaactggaaacactccctgcattgatgtacattttaagaatggcacttttgatacatgttatcataaaggtgcttaatagagctgaattaaagtttttcaaatctgtaaacaaagcaaaaaagtaaattgtagtcatttgattattttttaaattggtgctttatattttgttctcactcagagtaaaagctgcaatttattgttcaccagctttgatgtattcattactcagtaatgcaatacctctattgttgaattccctttggaaataagtgaaaattctaacggccactgaaagctgctcgctaggttttgcttggtggagaaacataatctgcacctatccatattaattgggttgtatccccattaaaaaagaaaaaaagggaatgtggcctttttagtgtgttttttattgttgttgttttgtaattatcaaacccaggtaagatattggtatcctgcactggattttcaaatgaagttcagcagaagacagttaagattaaagtactatacaaaaatttcaaaagggtccatactacgctatctgtatgacgacacttaggctggggatctctttcagaaactcggactttaaaagcaacttggagcagttgatccacctccacattcaagtaatttatgaatatgcagaatagggatctgttcatctagaaatttttaccatttgtcttctgtgtagctgcaaggaacactaatgtttatacaactgtcagtccacccagtggtgcaactggttctgattcagtcttccgattcctttttatttttcactttttcctatttctgaatttttttttttatttgtgatcttgattttgatgaggggttggggagtggggagggagtcgaaccaagacttggagttaagaggattttcatcttttgcatccaacaggcagaatatgatctgtgtccaaaagtgaacttgagtcaggaatgaatcaatttcagcataaacaagcacaaaaatttagtctgctggctgactggaagcaaaaaagtcaagatggaatatgatgaattccaacacaatggggcaccaaggcctttaggcctctctttttattttgctttggttttgtttgtttttctttagagacatgctctttctcatgggacttgaagtggactcatctttgtgcagtgctggttttgccatactcatttcaagtattatagacatatgtaatggtgaaaatatatgaactgtggcctttttcattcttgttacttgtgatgcaattaagtgaagataagaaaaaaaaaaaaaaagcagagatttaccatgtatcagtgcctggctttttgttataaagctttgtttgtctagtgctcttttgctataaaatagactgtagtacaccctagtaggaaaaaaaaaaaactaaatttaaaaataaaaaatatatttggcttatttttcgcaggagcaatccttttataccatgaatattacaaaaaaattgtcagattctgaatatttcttctttgtagatttttggaatcattatgagtaaaagtttgttactttattttactatttaaaagatgttattttaccatgtgttaccaagatgaaactgtatgggtagcttttttgtttgttttttgttttgtttttgtttttgtttttgtttttagttgtaggtcgcagcggggaaattttttgcgactgtacacatagctgcagcattaaaaacttaaaaaaattgttaaaaaaaaaaaaagggaaaacatttcaaaaaaaaaaaaaaagataaacagttacaccttgttttcaatgtgtggctgagtgcctcgattttttcatgtttttggtgtatttctgatttgtagaagtgtccaaacaggttgtgtgctggagttccttcaagacaaaaacaaacccagcttggtcaaggccattacctgtttcccatctgtagttattcgatgaagtcatgtacatgaccgttctgtagcaataaatgtgccatttttataaactgtttctgacacttgtttcatttcattttgcattgtccatatagctatgattctcttctgtaagtaaaacgcatctatatttcattttccaagtgttggaggtattgacagcttaacaaacaaaacatacaaaaaaaatcacaaaaacaaattgaaaagcaaagcacatgattgatcaaggaagagatgcccttaatgaaaatggaacgggatgcatgcaaaacaaaaagaaaactgtctagaggattaactaattgaaggaatataattaatgtgtgtgtaacactgaagctatgcatttgaagagctctgaactgcaccagtgttttcggttgtgctgcaggttgctaagtcaagtcagccttaaccttttgcaccagttggtcggctgtttggcagaacattctcagatcttttcagtcaaaaatctaagatgatttattttgtatcactttgttaaaagctgaatattgttaactacagttaatattaacactgtatttatactttctcaaactacatccgccccaccacttctggttgcctctgttgactattaatccagatgtaaacaaccagatgtttttttctaacttgtacaaactgacgtgtgtcaactatcatggaaggaaaaaaatgtacagattaaaattattcagtgttatgtactgtaagttaatatttttgtagaatggacatcaatctactttgcaaaatttggaggctatttcaacattgcactgtagaaatgtaaagtaatgtatgcaatgtaaaggaaagcccgcggtagctgagcgcttcataacagaatgttctaatcaagtacgtggtatttggggatgtctccaatattgctcttgtattctttctaattgggtttagtgactagttgaaggaaaatgttataacgccatttggttcacatgtgaagtgccctccatagccaaatgttgggatttttttttttttcgtttttggttggactgtttgcagatatttaaattttatgaaatttccaaagattttggttgataacccccttttaccttctaaatgatttgagatgttcttatgttcttactgtgtgttttaaatatatataaaagagccacaagcaaaaaaaat

SEQ ID NO: 453723 - DNA, 6366 bp, Homo sapiens
  misc_feature (1217)..(1217): n is a, c, g, or t
catgtttattcacaatagtcattcagagctttatagcacgtgctgctctgccttcttgagacaagacgtcgtgcacacttctcttttttacatgacagcccttggaatatttgaaccctgctgctgtgacgacttcctcatatgatatgctttccaggtggctcatcatcctctttgccttccattcaaaagtttctaatttgtcactgtaacactcagaaatggacagaaccgatcttatcttttcagactattctgggcccggccatgcatttgttatgaatcatggaatattttggttttcacaattagaaattaccttttggctttttttttttttttttttgtaagagacagagtctggctgtgttgcccaggctggagtgcagtggcctgatcacatctcactgtagcctccacctcctagattcaagtgagcctcccacctcagcctcctgagtagctgagaccgcaggtgtgcatcactgtgcccagctaatttttttttattttttgtagagacgaggtctcactatatcatccaggctggggttataggcatgagccactgcacccagctttctggcttcatttttgactcacaatgaggtcatggtcattcataagctgcaggtgtttggtttgttgaatcgttttgcatgactgatatcagttcaggtttcccaaacttgttctgtggatcataaacatctataagattaaagaccatggaagtcatgtttttgtaactttttgtttaatacatagagaaaatgagactcacatagtgggttgaccaggccttcaaagcaaggtaatggggacacctgaataaaagcctcactgtcttcactcccattgctctggtgtcttacatataggcctttcttcttactcctgttaagctgccttgtatttttttgacctatcaaaatcatttttcaattacttgtttcccctagatttcagatgtcacggtatgaaaggttttatatatatttaaaaaataaagtataaacataaagtctttttgaagcgtggttatgcaacatatgctaggcgtaagttggtgaatgcctgctttgcagagtgtaaccccattgaataaaaaaagctttgttttccctttctgcccccctgtatcagtatgggcacaccctgcactctaactttaatctacgtcaccctcacctgtttggtttgggtttaatgtctgngagaaaaccaaatatcttgtgtattgtgaactgtcaaagccatctaaaccaatcccaaggtcaagtggatataaaaattctgccaaaaacatggcataagatggaaaagttccctgaaaactctggaagaaaacaaagtaatgtagacaccttctttttccccacaccattagaaaatgttgcatcccttttgtcccacagcaataatgacgatgaggacctgacaccagagcagaaggcagagcgtgagaaggagcggaggatggccaacaatgcccgagagcgtctgcgggtccgtgacatcaacgaggctttcaaagagctcggccgcatggtgcagctccacctcaagagtgacaagccccagaccaagctcctgatcctccaccaggcggtggccgtcatcctcagtctggagcagcaagtccgagaaaggaatctgaatccgaaagctgcgtgtctgaaaagaagggaggaagagaaggtgtcctcagagcctccccctctctccttggccggcccacaccctggaatgggagacgcatcgaatcacatgggacagatgtaaaagggtccaagttgccacattgcttcattaaaacaagagaccacttccttaacagctgtattatcttaaacccacataaacacttctccttaacccccatttttgtaatataagacaagtctgagtagttatgaatcgcagacgcaagaggtttcagcattcccaattatcaaaaaacagaaaaacaaaaaaaagaaagaaaaaagtgcaacttgagggacgactttctttaacatatcattcagaatgtgcaaagcagtatgtacaggctgagacacagcccagagactgaacggcaatctttccacactgtggaacaatgcatttgtgcctaaacttcttttggaaaaaaaaaatataattaatttgtaagtctgaaaaaaaaatatttaatttaaaaaaaattgtaaacttgcaataatgaaaaagtgtacttctgaagaaaactacatgaacgtttttgttggtattcaagtcagctagtgtttataattactggatattgaattaggggaagctcggctgccctagtaacaaaaccagcaaacgtcctgatgacaacgaagtgatgacattagccattccttagggtaggaggaacagatggatcttatagacctatgacaaatatatatataaatatatatataaatatatattaaaaatttagtgactatggtaagcttttgttcatttgtttcagacttttttctcctgtaaaaaaatagtactgattaacttttttaaaagaaagattttactgtaaatatggatttttttttttttggtcttatttctgtccctttccctggtttgttatcgtaacctgtagtgccaactctgcttccagaggggtagtgcaggatgaaatgctgaccctgatgttgcttctcattcataaataagtagaaagttgtttctccagtcttttgggaacacaggacttaaaagtcacatcatgtgtagatattacaagcagcattaccaagacatggcaaaaagagtttgtctgaattgtaatgttgcgtttgtgaacctattctgggattttcagaggtacaaggttagaatgctacaatgttaccactgtgccttccaatgtttatatcatcggaaacataacataatcaaagtggctgtgatttaacaaaatgattaaagtgttacctacctgtgtagccgaagtagtgtgcagtgaggcgtttctgaatacatggtcagatttttggaaaaaaacaaaaacaaaaaaaacaagtaaagttcaaaaaccgtcaaatgagaaaattgcaagtagtgtgacagagctgattgattttgttgctttcttgattttttttttcaaaatgggtttactaaaatgtagatgacttaactgcctcctccttcgtctgaaaaatgccaatattcaatcatcatgcagcattataacaagccttataagtcctaaagcattaagttgcacttttttgaggaggggtagtgcagtatttctctggccagtatgaatgaagtttatacttaccatatttgatagaaacatagatcaagctatggcacagcgactcatcagatagctagctttgacgtctgggcacaattgaaccaacttccatcgtgaatctttataatgattgactttggtgtatagtgcagtaaacaaatagtgctcctagttaagtatttgtcagcatccttttgtctctaacttgtttctatttttacagccacacaattcttggcatgtattaagaaaaaaaaaaatccctgttcaagtagtttttccacctatcagcactgagtaaatgccataaatccattgaaatggtctaaatgttccatctgttctcctgttttgccagttatatagtaatgaaatacatttgtaaattttatgcaacaaatggcaaacgtatcattattttgaaattgtgtatgtaaaagttatatttttacatgtagactcttgttattatgtgttttaatacattgtatcagtttttgtttttttttaaaaactgtggtttaaaaagaagtctcatttaaatgaaatagctacaagaatcagaattttatgttcatttctgaaaatgtaagaacaaataagatagttaccacgtggtcatcttttacaaacccataaacattttgattagctgtgtgtgtgttgaaaaactgtaaatatgttcagtagcgataaaactaaaataactttgatttgttgataagttcctaaaatgtggaggtggattaaaaccttaggagaatagcagaaatcaaacttcatgaaaagttattttggggctttcctgtgaaatgtatgaacaaagaggctcagagaaggacatggaagacaataatgtatactctctcctcctccctgaataatgaaaaccatgtgtatttgttccctccgtatgttaaagatttccttttagtggtacattctgcactcattttgtatagtctaccaaggcgggtatccctaggaacaatattatataggaagcaggtatactctgatcacattcaggataagtgtacagaagaaaatacggtgtttactctttagggaactggaaacactccctgcattgatgtacattttaagaatggcacttttgatacatgttatcataaaggtgcttaatagagctgaattaaagtttttcaaatctgtaaacaaagcaaaaaagtaaattgtagtcatttgattattttttaaattggtgctttatattttgttctcactcagagtaaaagctgcaatttattgttcaccagctttgatgtattcattactcagtaatgcaatacctctattgttgaattccctttggaaataagtgaaaattctaacggccactgaaagctgctcgctaggttttgcttggtggagaaacataatctgcacctatccatattaattgggttgtatccccattaaaaaagaaaaaaagggaatgtggcctttttagtgtgttttttattgttgttgttttgtaattatcaaacccaggtaagatattggtatcctgcactggattttcaaatgaagttcagcagaagacagttaagattaaagtactatacaaaaatttcaaaagggtccatactacgctatctgtatgacgacacttaggctggggatctctttcagaaactcggactttaaaagcaacttggagcagttgatccacctccacattcaagtaatttatgaatatgcagaatagggatctgttcatctagaaatttttaccatttgtcttctgtgtagctgcaaggaacactaatgtttatacaactgtcagtccacccagtggtgcaactggttctgattcagtcttccgattcctttttatttttcactttttcctatttctgaatttttttttttatttgtgatcttgattttgatgaggggttggggagtggggagggagtcgaaccaagacttggagttaagaggattttcatcttttgcatccaacaggcagaatatgatctgtgtccaaaagtgaacttgagtcaggaatgaatcaatttcagcataaacaagcacaaaaatttagtctgctggctgactggaagcaaaaaagtcaagatggaatatgatgaattccaacacaatggggcaccaaggcctttaggcctctctttttattttgctttggttttgtttgtttttctttagagacatgctctttctcatgggacttgaagtggactcatctttgtgcagtgctggttttgccatactcatttcaagtattatagacatatgtaatggtgaaaatatatgaactgtggcctttttcattcttgttacttgtgatgcaattaagtgaagataagaaaaaaaaaaaaaaagcagagatttaccatgtatcagtgcctggctttttgttataaagctttgtttgtctagtgctcttttgctataaaatagactgtagtacaccctagtaggaaaaaaaaaaaactaaatttaaaaataaaaaatatatttggcttatttttcgcaggagcaatccttttataccatgaatattacaaaaaaattgtcagattctgaatatttcttctttgtagatttttggaatcattatgagtaaaagtttgttactttattttactatttaaaagatgttattttaccatgtgttaccaagatgaaactgtatgggtagcttttttgtttgttttttgttttgtttttgtttttgtttttgtttttagttgtaggtcgcagcggggaaattttttgcgactgtacacatagctgcagcattaaaaacttaaaaaaattgttaaaaaaaaaaaaagggaaaacatttcaaaaaaaaaaaaaaagataaacagttacaccttgttttcaatgtgtggctgagtgcctcgattttttcatgtttttggtgtatttctgatttgtagaagtgtccaaacaggttgtgtgctggagttccttcaagacaaaaacaaacccagcttggtcaaggccattacctgtttcccatctgtagttattcgatgaagtcatgtacatgaccgttctgtagcaataaatgtgccatttttata

SEQ ID NO: 453724 - DNA, 6098 bp, Homo sapiens
  misc_feature (1217)..(1217): n is a, c, g, or t
catgtttattcacaatagtcattcagagctttatagcacgtgctgctctgccttcttgagacaagacgtcgtgcacacttctcttttttacatgacagcccttggaatatttgaaccctgctgctgtgacgacttcctcatatgatatgctttccaggtggctcatcatcctctttgccttccattcaaaagtttctaatttgtcactgtaacactcagaaatggacagaaccgatcttatcttttcagactattctgggcccggccatgcatttgttatgaatcatggaatattttggttttcacaattagaaattaccttttggctttttttttttttttttttgtaagagacagagtctggctgtgttgcccaggctggagtgcagtggcctgatcacatctcactgtagcctccacctcctagattcaagtgagcctcccacctcagcctcctgagtagctgagaccgcaggtgtgcatcactgtgcccagctaatttttttttattttttgtagagacgaggtctcactatatcatccaggctggggttataggcatgagccactgcacccagctttctggcttcatttttgactcacaatgaggtcatggtcattcataagctgcaggtgtttggtttgttgaatcgttttgcatgactgatatcagttcaggtttcccaaacttgttctgtggatcataaacatctataagattaaagaccatggaagtcatgtttttgtaactttttgtttaatacatagagaaaatgagactcacatagtgggttgaccaggccttcaaagcaaggtaatggggacacctgaataaaagcctcactgtcttcactcccattgctctggtgtcttacatataggcctttcttcttactcctgttaagctgccttgtatttttttgacctatcaaaatcatttttcaattacttgtttcccctagatttcagatgtcacggtatgaaaggttttatatatatttaaaaaataaagtataaacataaagtctttttgaagcgtggttatgcaacatatgctaggcgtaagttggtgaatgcctgctttgcagagtgtaaccccattgaataaaaaaagctttgttttccctttctgcccccctgtatcagtatgggcacaccctgcactctaactttaatctacgtcaccctcacctgtttggtttgggtttaatgtctgngagaaaaccaaatatcttgtgtattgtgaactgtcaaagccatctaaaccaatcccaaggtcaagtggatataaaaattctgccaaaaacatggcataagatggaaaagttccctgaaaactctggaagaaaacaaagtaatgtagacaccttctttttccccacaccattagaaaatgttgcatcccttttgtcccacagcaataatgacgatgaggacctgacaccagagcagaaggcagagcgtgagaaggagcggaggatggccaacaatgcccgagagcgtctgcgggtccgtgacatcaacgaggctttcaaagagctcggccgcatggtgcagctccacctcaagagtgacaagccccagaccaagctcctgatcctccaccaggcggtggccgtcatcctcagtctggagcagcaagtccgagaaaggaatctgaatccgaaagctgcgtgtctgaaaagaagggaggaagagaaggtgtcctcagagcctccccctctctccttggccggcccacaccctggaatgggagacgcatcgaatcacatgggacagatgtaaaagggtccaagttgccacattgcttcattaaaacaagagaccacttccttaacagctgtattatcttaaacccacataaacacttctccttaacccccatttttgtaatataagacaagtctgagtagttatgaatcgcagacgcaagaggtttcagcattcccaattatcaaaaaacagaaaaacaaaaaaaagaaagaaaaaagtgcaacttgagggacgactttctttaacatatcattcagaatgtgcaaagcagtatgtacaggctgagacacagcccagagactgaacggcaatctttccacactgtggaacaatgcatttgtgcctaaacttcttttggaaaaaaaaaatataattaatttgtaagtctgaaaaaaaaatatttaatttaaaaaaaattgtaaacttgcaataatgaaaaagtgtacttctgaagaaaactacatgaacgtttttgttggtattcaagtcagctagtgtttataattactggatattgaattaggggaagctcggctgccctagtaacaaaaccagcaaacgtcctgatgacaacgaagtgatgacattagccattccttagggtaggaggaacagatggatcttatagacctatgacaaatatatatataaatatatatataaatatatattaaaaatttagtgactatggtaagcttttgttcatttgtttcagacttttttctcctgtaaaaaaatagtactgattaacttttttaaaagaaagattttactgtaaatatggatttttttttttttggtcttatttctgtccctttccctggtttgttatcgtaacctgtagtgccaactctgcttccagaggggtagtgcaggatgaaatgctgaccctgatgttgcttctcattcataaataagtagaaagttgtttctccagtcttttgggaacacaggacttaaaagtcacatcatgtgtagatattacaagcagcattaccaagacatggcaaaaagagtttgtctgaattgtaatgttgcgtttgtgaacctattctgggattttcagaggtacaaggttagaatgctacaatgttaccactgtgccttccaatgtttatatcatcggaaacataacataatcaaagtggctgtgatttaacaaaatgattaaagtgttacctacctgtgtagccgaagtagtgtgcagtgaggcgtttctgaatacatggtcagatttttggaaaaaaacaaaaacaaaaaaaacaagtaaagttcaaaaaccgtcaaatgagaaaattgcaagtagtgtgacagagctgattgattttgttgctttcttgattttttttttcaaaatgggtttactaaaatgtagatgacttaactgcctcctccttcgtctgaaaaatgccaatattcaatcatcatgcagcattataacaagccttataagtcctaaagcattaagttgcacttttttgaggaggggtagtgcagtatttctctggccagtatgaatgaagtttatacttaccatatttgatagaaacatagatcaagctatggcacagcgactcatcagatagctagctttgacgtctgggcacaattgaaccaacttccatcgtgaatctttataatgattgactttggtgtatagtgcagtaaacaaatagtgctcctagttaagtatttgtcagcatccttttgtctctaacttgtttctatttttacagccacacaattcttggcatgtattaagaaaaaaaaaaatccctgttcaagtagtttttccacctatcagcactgagtaaatgccataaatccattgaaatggtctaaatgttccatctgttctcctgttttgccagttatatagtaatgaaatacatttgtaaattttatgcaacaaatggcaaacgtatcattattttgaaattgtgtatgtaaaagttatatttttacatgtagactcttgttattatgtgttttaatacattgtatcagtttttgtttttttttaaaaactgtggtttaaaaagaagtctcatttaaatgaaatagctacaagaatcagaattttatgttcatttctgaaaatgtaagaacaaataagatagttaccacgtggtcatcttttacaaacccataaacattttgattagctgtgtgtgtgttgaaaaactgtaaatatgttcagtagcgataaaactaaaataactttgatttgttgataagttcctaaaatgtggaggtggattaaaaccttaggagaatagcagaaatcaaacttcatgaaaagttattttggggctttcctgtgaaatgtatgaacaaagaggctcagagaaggacatggaagacaataatgtatactctctcctcctccctgaataatgaaaaccatgtgtatttgttccctccgtatgttaaagatttccttttagtggtacattctgcactcattttgtatagtctaccaaggcgggtatccctaggaacaatattatataggaagcaggtatactctgatcacattcaggataagtgtacagaagaaaatacggtgtttactctttagggaactggaaacactccctgcattgatgtacattttaagaatggcacttttgatacatgttatcataaaggtgcttaatagagctgaattaaagtttttcaaatctgtaaacaaagcaaaaaagtaaattgtagtcatttgattattttttaaattggtgctttatattttgttctcactcagagtaaaagctgcaatttattgttcaccagctttgatgtattcattactcagtaatgcaatacctctattgttgaattccctttggaaataagtgaaaattctaacggccactgaaagctgctcgctaggttttgcttggtggagaaacataatctgcacctatccatattaattgggttgtatccccattaaaaaagaaaaaaagggaatgtggcctttttagtgtgttttttattgttgttgttttgtaattatcaaacccaggtaagatattggtatcctgcactggattttcaaatgaagttcagcagaagacagttaagattaaagtactatacaaaaatttcaaaagggtccatactacgctatctgtatgacgacacttaggctggggatctctttcagaaactcggactttaaaagcaacttggagcagttgatccacctccacattcaagtaatttatgaatatgcagaatagggatctgttcatctagaaatttttaccatttgtcttctgtgtagctgcaaggaacactaatgtttatacaactgtcagtccacccagtggtgcaactggttctgattcagtcttccgattcctttttatttttcactttttcctatttctgaatttttttttttatttgtgatcttgattttgatgaggggttggggagtggggagggagtcgaaccaagacttggagttaagaggattttcatcttttgcatccaacaggcagaatatgatctgtgtccaaaagtgaacttgagtcaggaatgaatcaatttcagcataaacaagcacaaaaatttagtctgctggctgactggaagcaaaaaagtcaagatggaatatgatgaattccaacacaatggggcaccaaggcctttaggcctctctttttattttgctttggttttgtttgtttttctttagagacatgctctttctcatgggacttgaagtggactcatctttgtgcagtgctggttttgccatactcatttcaagtattatagacatatgtaatggtgaaaatatatgaactgtggcctttttcattcttgttacttgtgatgcaattaagtgaagataagaaaaaaaaaaaaaaagcagagatttaccatgtatcagtgcctggctttttgttataaagctttgtttgtctagtgctcttttgctataaaatagactgtagtacaccctagtaggaaaaaaaaaaaactaaatttaaaaataaaaaatatatttggcttatttttcgcaggagcaatccttttataccatgaatattacaaaaaaattgtcagattctgaatatttcttctttgtagatttttggaatcattatgagtaaaagtttgttactttattttactatttaaaagatgttattttaccatgtgttaccaagatgaaactgtatgggtagcttttttgtttgttttttgttttgtttttgtttttgtttttgtttttagttgtaggtcgcagcggggaaattttttgcgactgtacacatagctgcagcattaaaaacttaaaaaaattgtta

SEQ ID NO: 453725 - DNA, 6214 bp, Homo sapiens
catgaggaagcggggcagccggcagctcccagactggagatgctctggggaaagcacttgcttcgatctattctccagatcacactaacaacagcttttcatcaaacccttcaactcctgttggctctcctccatctctctcagcaggcacagctgtttggtctagaaatggaggacaggcctcatcgtctcctaattatgaaggacccttacactctttgcaaagccgaattgaagatcgtttagaaagactggatgatgctattcatgttctccggaaccatgcagtgggcccatccacagctatgcctggtggtcatggggacatgcatggaatcattggaccttctcataatggagccatgggtggtctgggctcagggtatggaaccggccttctttcagccaacagacattcactcatggtggggacccatcgtgaagatggcgtggccctgagaggcagccattctcttctgccaaaccaggttccggttccacagcttcctgtccagtctgcgacttcccctgacctgaacccaccccaggacccttacagaggcatgccaccaggactacaggggcagagtgtctcctctggcagctctgagatcaaatccgatgacgagggtgatgagaacctgcaagacacgaaatcttcggaggacaagaaattagatgacgacaagaaggatatcaaatcaattactaggtcaagatctagcaataatgacgatgaggacctgacaccagagcagaagcagtatgtacaggctgagacacagcccagagactgaacggcaatctttccacactgtggaacaatgcatttgtgcctaaacttcttttggaaaaaaaaaatataattaatttgtaagtctgaaaaaaaaatatttaatttaaaaaaaattgtaaacttgcaataatgaaaaagtgtacttctgaagaaaactacatgaacgtttttgttggtattcaagtcagctagtgtttataattactggatattgaattaggggaagctcggctgccctagtaacaaaaccagcaaacgtcctgatgacaacgaagtgatgacattagccattccttagggtaggaggaacagatggatcttatagacctatgacaaatatatatataaatatatatataaatatatattaaaaatttagtgactatggtaagcttttgttcatttgtttcagacttttttctcctgtaaaaaaatagtactgattaacttttttaaaagaaagattttactgtaaatatggatttttttttttttggtcttatttctgtccctttccctggtttgttatcgtaacctgtagtgccaactctgcttccagaggggtagtgcaggatgaaatgctgaccctgatgttgcttctcattcataaataagtagaaagttgtttctccagtcttttgggaacacaggacttaaaagtcacatcatgtgtagatattacaagcagcattaccaagacatggcaaaaagagtttgtctgaattgtaatgttgcgtttgtgaacctattctgggattttcagaggtacaaggttagaatgctacaatgttaccactgtgccttccaatgtttatatcatcggaaacataacataatcaaagtggctgtgatttaacaaaatgattaaagtgttacctacctgtgtagccgaagtagtgtgcagtgaggcgtttctgaatacatggtcagatttttggaaaaaaacaaaaacaaaaaaaacaagtaaagttcaaaaaccgtcaaatgagaaaattgcaagtagtgtgacagagctgattgattttgttgctttcttgattttttttttcaaaatgggtttactaaaatgtagatgacttaactgcctcctccttcgtctgaaaaatgccaatattcaatcatcatgcagcattataacaagccttataagtcctaaagcattaagttgcacttttttgaggaggggtagtgcagtatttctctggccagtatgaatgaagtttatacttaccatatttgatagaaacatagatcaagctatggcacagcgactcatcagatagctagctttgacgtctgggcacaattgaaccaacttccatcgtgaatctttataatgattgactttggtgtatagtgcagtaaacaaatagtgctcctagttaagtatttgtcagcatccttttgtctctaacttgtttctatttttacagccacacaattcttggcatgtattaagaaaaaaaaaaatccctgttcaagtagtttttccacctatcagcactgagtaaatgccataaatccattgaaatggtctaaatgttccatctgttctcctgttttgccagttatatagtaatgaaatacatttgtaaattttatgcaacaaatggcaaacgtatcattattttgaaattgtgtatgtaaaagttatatttttacatgtagactcttgttattatgtgttttaatacattgtatcagtttttgtttttttttaaaaactgtggtttaaaaagaagtctcatttaaatgaaatagctacaagaatcagaattttatgttcatttctgaaaatgtaagaacaaataagatagttaccacgtggtcatcttttacaaacccataaacattttgattagctgtgtgtgtgttgaaaaactgtaaatatgttcagtagcgataaaactaaaataactttgatttgttgataagttcctaaaatgtggaggtggattaaaaccttaggagaatagcagaaatcaaacttcatgaaaagttattttggggctttcctgtgaaatgtatgaacaaagaggctcagagaaggacatggaagacaataatgtatactctctcctcctccctgaataatgaaaaccatgtgtatttgttccctccgtatgttaaagatttccttttagtggtacattctgcactcattttgtatagtctaccaaggcgggtatccctaggaacaatattatataggaagcaggtatactctgatcacattcaggataagtgtacagaagaaaatacggtgtttactctttagggaactggaaacactccctgcattgatgtacattttaagaatggcacttttgatacatgttatcataaaggtgcttaatagagctgaattaaagtttttcaaatctgtaaacaaagcaaaaaagtaaattgtagtcatttgattattttttaaattggtgctttatattttgttctcactcagagtaaaagctgcaatttattgttcaccagctttgatgtattcattactcagtaatgcaatacctctattgttgaattccctttggaaataagtgaaaattctaacggccactgaaagctgctcgctaggttttgcttggtggagaaacataatctgcacctatccatattaattgggttgtatccccattaaaaaagaaaaaaagggaatgtggcctttttagtgtgttttttattgttgttgttttgtaattatcaaacccaggtaagatattggtatcctgcactggattttcaaatgaagttcagcagaagacagttaagattaaagtactatacaaaaatttcaaaagggtccatactacgctatctgtatgacgacacttaggctggggatctctttcagaaactcggactttaaaagcaacttggagcagttgatccacctccacattcaagtaatttatgaatatgcagaatagggatctgttcatctagaaatttttaccatttgtcttctgtgtagctgcaaggaacactaatgtttatacaactgtcagtccacccagtggtgcaactggttctgattcagtcttccgattcctttttatttttcactttttcctatttctgaatttttttttttatttgtgatcttgattttgatgaggggttggggagtggggagggagtcgaaccaagacttggagttaagaggattttcatcttttgcatccaacaggcagaatatgatctgtgtccaaaagtgaacttgagtcaggaatgaatcaatttcagcataaacaagcacaaaaatttagtctgctggctgactggaagcaaaaaagtcaagatggaatatgatgaattccaacacaatggggcaccaaggcctttaggcctctctttttattttgctttggttttgtttgtttttctttagagacatgctctttctcatgggacttgaagtggactcatctttgtgcagtgctggttttgccatactcatttcaagtattatagacatatgtaatggtgaaaatatatgaactgtggcctttttcattcttgttacttgtgatgcaattaagtgaagataagaaaaaaaaaaaaaaagcagagatttaccatgtatcagtgcctggctttttgttataaagctttgtttgtctagtgctcttttgctataaaatagactgtagtacaccctagtaggaaaaaaaaaaaactaaatttaaaaataaaaaatatatttggcttatttttcgcaggagcaatccttttataccatgaatattacaaaaaaattgtcagattctgaatatttcttctttgtagatttttggaatcattatgagtaaaagtttgttactttattttactatttaaaagatgttattttaccatgtgttaccaagatgaaactgtatgggtagcttttttgtttgttttttgttttgtttttgtttttgtttttgtttttagttgtaggtcgcagcggggaaattttttgcgactgtacacatagctgcagcattaaaaacttaaaaaaattgttaaaaaaaaaaaaagggaaaacatttcaaaaaaaaaaaaaaagataaacagttacaccttgttttcaatgtgtggctgagtgcctcgattttttcatgtttttggtgtatttctgatttgtagaagtgtccaaacaggttgtgtgctggagttccttcaagacaaaaacaaacccagcttggtcaaggccattacctgtttcccatctgtagttattcgatgaagtcatgtacatgaccgttctgtagcaataaatgtgccatttttataaactgtttctgacacttgtttcatttcattttgcattgtccatatagctatgattctcttctgtaagtaaaacgcatctatatttcattttccaagtgttggaggtattgacagcttaacaaacaaaacatacaaaaaaaatcacaaaaacaaattgaaaagcaaagcacatgattgatcaaggaagagatgcccttaatgaaaatggaacgggatgcatgcaaaacaaaaagaaaactgtctagaggattaactaattgaaggaatataattaatgtgtgtgtaacactgaagctatgcatttgaagagctctgaactgcaccagtgttttcggttgtgctgcaggttgctaagtcaagtcagccttaaccttttgcaccagttggtcggctgtttggcagaacattctcagatcttttcagtcaaaaatctaagatgatttattttgtatcactttgttaaaagctgaatattgttaactacagttaatattaacactgtatttatactttctcaaactacatccgccccaccacttctggttgcctctgttgactattaatccagatgtaaacaaccagatgtttttttctaacttgtacaaactgacgtgtgtcaactatcatggaaggaaaaaaatgtacagattaaaattattcagtgttatgtactgtaagttaatatttttgtagaatggacatcaatctactttgcaaaatttggaggctatttcaacattgcactgtagaaatgtaaagtaatgtatgcaatgtaaaggaaagcccgcggtagctgagcgcttcataacagaatgttctaatcaagtacgtggtatttggggatgtctccaatattgctcttgtattctttctaattgggtttagtgactagttgaaggaaaatgttataacgccatttggttcacatgtgaagtgccctccatagccaaatgttgggatttttttttttttcgtttttggttggactgtttgcagatatttaaattttatgaaatttccaaagattttggttgataacccccttttaccttctaaatgatttgagatgttcttatgttcttactgtgtgttttaaatatatataaaagagccacaagcaaaaaaaat

SEQ ID NO: 453726 - DNA, 797 bp, Homo sapiens
catgaggaagcggggcagccggcagctcccagactggagatgctctggggaaagcacttgcttcgatctattctccagatcacactaacaacagcttttcatcaaacccttcaactcctgttggctctcctccatctctctcagcaggcacagctgtttggtctagaaatggaggacaggcctcatcgtctcctaattatgaaggacccttacactctttgcaaagccgaattgaagatcgtttagaaagactggatgatgctattcatgttctccggaaccatgcagtgggcccatccacagctatgcctggtggtcatggggacatgcatggaatcattggaccttctcataatggagccatgggtggtctgggctcagggtatggaaccggccttctttcagccaacagacattcactcatggtggggacccatcgtgaagatggcgtggccctgagaggcagccattctcttctgccaaaccaggttccggttccacagcttcctgtccagtctgcgacttcccctgacctgaacccaccccaggacccttacagaggcatgccaccaggactacaggggcagagtgtctcctctggcagctctgagatcaaatccgatgacgagggtgatgagaacctgcaagacacgaaatcttcggaggacaagaaattagatgacgacaagaaggatatcaaatcaattactaggtcaagatctagcaataatgacgatgaggaccccctccccgcttccctgcctcaccctcaataaataaattaattgttgtcatgg

SEQ ID NO: 453727 - DNA, 5641 bp, Homo sapiens
  misc_feature (1217)..(1217): n is a, c, g, or t
catgtttattcacaatagtcattcagagctttatagcacgtgctgctctgccttcttgagacaagacgtcgtgcacacttctcttttttacatgacagcccttggaatatttgaaccctgctgctgtgacgacttcctcatatgatatgctttccaggtggctcatcatcctctttgccttccattcaaaagtttctaatttgtcactgtaacactcagaaatggacagaaccgatcttatcttttcagactattctgggcccggccatgcatttgttatgaatcatggaatattttggttttcacaattagaaattaccttttggctttttttttttttttttttgtaagagacagagtctggctgtgttgcccaggctggagtgcagtggcctgatcacatctcactgtagcctccacctcctagattcaagtgagcctcccacctcagcctcctgagtagctgagaccgcaggtgtgcatcactgtgcccagctaatttttttttattttttgtagagacgaggtctcactatatcatccaggctggggttataggcatgagccactgcacccagctttctggcttcatttttgactcacaatgaggtcatggtcattcataagctgcaggtgtttggtttgttgaatcgttttgcatgactgatatcagttcaggtttcccaaacttgttctgtggatcataaacatctataagattaaagaccatggaagtcatgtttttgtaactttttgtttaatacatagagaaaatgagactcacatagtgggttgaccaggccttcaaagcaaggtaatggggacacctgaataaaagcctcactgtcttcactcccattgctctggtgtcttacatataggcctttcttcttactcctgttaagctgccttgtatttttttgacctatcaaaatcatttttcaattacttgtttcccctagatttcagatgtcacggtatgaaaggttttatatatatttaaaaaataaagtataaacataaagtctttttgaagcgtggttatgcaacatatgctaggcgtaagttggtgaatgcctgctttgcagagtgtaaccccattgaataaaaaaagctttgttttccctttctgcccccctgtatcagtatgggcacaccctgcactctaactttaatctacgtcaccctcacctgtttggtttgggtttaatgtctgngagaaaaccaaatatcttgtgtattgtgaactgtcaaagccatctaaaccaatcccaaggtcaagtggatataaaaattctgccaaaaacatggcataagatggaaaagttccctgaaaactctggaagaaaacaaagtaatgtagacaccttctttttccccacaccattagaaaatgttgcatcccttttgtcccacagcaataatgacgatgaggacctgacaccagagcagaaggcagagcgtgagaaggagcggaggatggccaacaatgcccgagagcgtctgcgggtccgtgacatcaacgaggctttcaaagagctcggccgcatggtgcagctccacctcaagagtgacaagccccagaccaagctcctgatcctccaccaggcggtggccgtcatcctcagtctggagcagcaagtccgagaaaggaatctgaatccgaaagctgcgtgtctgaaaagaagggaggaagagaaggtgtcctcagagcctccccctctctccttggccggcccacaccctggaatgggagacgcatcgaatcacatgggacagatgtaaaagggtccaagttgccacattgcttcattaaaacaagagaccacttccttaacagctgtattatcttaaacccacataaacacttctccttaacccccatttttgtaatataagacaagtctgagtagttatgaatcgcagacgcaagaggtttcagcattcccaattatcaaaaaacagaaaaacaaaaaaaagaaagaaaaaagtgcaacttgagggacgactttctttaacatatcattcagaatgtgcaaagcagtatgtacaggctgagacacagcccagagactgaacggcaatctttccacactgtggaacaatgcatttgtgcctaaacttcttttggaaaaaaaaaatataattaatttgtaagtctgaaaaaaaaatatttaatttaaaaaaaattgtaaacttgcaataatgaaaaagtgtacttctgaagaaaactacatgaacgtttttgttggtattcaagtcagctagtgtttataattactggatattgaattaggggaagctcggctgccctagtaacaaaaccagcaaacgtcctgatgacaacgaagtgatgacattagccattccttagggtaggaggaacagatggatcttatagacctatgacaaatatatatataaatatatatataaatatatattaaaaatttagtgactatggtaagcttttgttcatttgtttcagacttttttctcctgtaaaaaaatagtactgattaacttttttaaaagaaagattttactgtaaatatggatttttttttttttggtcttatttctgtccctttccctggtttgttatcgtaacctgtagtgccaactctgcttccagaggggtagtgcaggatgaaatgctgaccctgatgttgcttctcattcataaataagtagaaagttgtttctccagtcttttgggaacacaggacttaaaagtcacatcatgtgtagatattacaagcagcattaccaagacatggcaaaaagagtttgtctgaattgtaatgttgcgtttgtgaacctattctgggattttcagaggtacaaggttagaatgctacaatgttaccactgtgccttccaatgtttatatcatcggaaacataacataatcaaagtggctgtgatttaacaaaatgattaaagtgttacctacctgtgtagccgaagtagtgtgcagtgaggcgtttctgaatacatggtcagatttttggaaaaaaacaaaaacaaaaaaaacaagtaaagttcaaaaaccgtcaaatgagaaaattgcaagtagtgtgacagagctgattgattttgttgctttcttgattttttttttcaaaatgggtttactaaaatgtagatgacttaactgcctcctccttcgtctgaaaaatgccaatattcaatcatcatgcagcattataacaagccttataagtcctaaagcattaagttgcacttttttgaggaggggtagtgcagtatttctctggccagtatgaatgaagtttatacttaccatatttgatagaaacatagatcaagctatggcacagcgactcatcagatagctagctttgacgtctgggcacaattgaaccaacttccatcgtgaatctttataatgattgactttggtgtatagtgcagtaaacaaatagtgctcctagttaagtatttgtcagcatccttttgtctctaacttgtttctatttttacagccacacaattcttggcatgtattaagaaaaaaaaaaatccctgttcaagtagtttttccacctatcagcactgagtaaatgccataaatccattgaaatggtctaaatgttccatctgttctcctgttttgccagttatatagtaatgaaatacatttgtaaattttatgcaacaaatggcaaacgtatcattattttgaaattgtgtatgtaaaagttatatttttacatgtagactcttgttattatgtgttttaatacattgtatcagtttttgtttttttttaaaaactgtggtttaaaaagaagtctcatttaaatgaaatagctacaagaatcagaattttatgttcatttctgaaaatgtaagaacaaataagatagttaccacgtggtcatcttttacaaacccataaacattttgattagctgtgtgtgtgttgaaaaactgtaaatatgttcagtagcgataaaactaaaataactttgatttgttgataagttcctaaaatgtggaggtggattaaaaccttaggagaatagcagaaatcaaacttcatgaaaagttattttggggctttcctgtgaaatgtatgaacaaagaggctcagagaaggacatggaagacaataatgtatactctctcctcctccctgaataatgaaaaccatgtgtatttgttccctccgtatgttaaagatttccttttagtggtacattctgcactcattttgtatagtctaccaaggcgggtatccctaggaacaatattatataggaagcaggtatactctgatcacattcaggataagtgtacagaagaaaatacggtgtttactctttagggaactggaaacactccctgcattgatgtacattttaagaatggcacttttgatacatgttatcataaaggtgcttaatagagctgaattaaagtttttcaaatctgtaaacaaagcaaaaaagtaaattgtagtcatttgattattttttaaattggtgctttatattttgttctcactcagagtaaaagctgcaatttattgttcaccagctttgatgtattcattactcagtaatgcaatacctctattgttgaattccctttggaaataagtgaaaattctaacggccactgaaagctgctcgctaggttttgcttggtggagaaacataatctgcacctatccatattaattgggttgtatccccattaaaaaagaaaaaaagggaatgtggcctttttagtgtgttttttattgttgttgttttgtaattatcaaacccaggtaagatattggtatcctgcactggattttcaaatgaagttcagcagaagacagttaagattaaagtactatacaaaaatttcaaaagggtccatactacgctatctgtatgacgacacttaggctggggatctctttcagaaactcggactttaaaagcaacttggagcagttgatccacctccacattcaagtaatttatgaatatgcagaatagggatctgttcatctagaaatttttaccatttgtcttctgtgtagctgcaaggaacactaatgtttatacaactgtcagtccacccagtggtgcaactggttctgattcagtcttccgattcctttttatttttcactttttcctatttctgaatttttttttttatttgtgatcttgattttgatgaggggttggggagtggggagggagtcgaaccaagacttggagttaagaggattttcatcttttgcatccaacaggcagaatatgatctgtgtccaaaagtgaacttgagtcaggaatgaatcaatttcagcataaacaagcacaaaaatttagtctgctggctgactggaagcaaaaaagtcaagatggaatatgatgaattccaacacaatggggcaccaaggcctttaggcctctctttttattttgctttggttttgtttgtttttctttagagacatgctctttctcatgggacttgaagtggactcatctttgtgcagtgctggttttgccatactcatttcaagtattatagacatatgtaatggtgaaaatatatgaactgtggcctttttcattcttgttacttgtgatgcaattaagtgaagataaga

SEQ ID NO: 453728 - DNA, 6309 bp, Homo sapiens
  misc_feature (1217)..(1217): n is a, c, g, or t
catgtttattcacaatagtcattcagagctttatagcacgtgctgctctgccttcttgagacaagacgtcgtgcacacttctcttttttacatgacagcccttggaatatttgaaccctgctgctgtgacgacttcctcatatgatatgctttccaggtggctcatcatcctctttgccttccattcaaaagtttctaatttgtcactgtaacactcagaaatggacagaaccgatcttatcttttcagactattctgggcccggccatgcatttgttatgaatcatggaatattttggttttcacaattagaaattaccttttggctttttttttttttttttttgtaagagacagagtctggctgtgttgcccaggctggagtgcagtggcctgatcacatctcactgtagcctccacctcctagattcaagtgagcctcccacctcagcctcctgagtagctgagaccgcaggtgtgcatcactgtgcccagctaatttttttttattttttgtagagacgaggtctcactatatcatccaggctggggttataggcatgagccactgcacccagctttctggcttcatttttgactcacaatgaggtcatggtcattcataagctgcaggtgtttggtttgttgaatcgttttgcatgactgatatcagttcaggtttcccaaacttgttctgtggatcataaacatctataagattaaagaccatggaagtcatgtttttgtaactttttgtttaatacatagagaaaatgagactcacatagtgggttgaccaggccttcaaagcaaggtaatggggacacctgaataaaagcctcactgtcttcactcccattgctctggtgtcttacatataggcctttcttcttactcctgttaagctgccttgtatttttttgacctatcaaaatcatttttcaattacttgtttcccctagatttcagatgtcacggtatgaaaggttttatatatatttaaaaaataaagtataaacataaagtctttttgaagcgtggttatgcaacatatgctaggcgtaagttggtgaatgcctgctttgcagagtgtaaccccattgaataaaaaaagctttgttttccctttctgcccccctgtatcagtatgggcacaccctgcactctaactttaatctacgtcaccctcacctgtttggtttgggtttaatgtctgngagaaaaccaaatatcttgtgtattgtgaactgtcaaagccatctaaaccaatcccaaggtcaagtggatataaaaattctgccaaaaacatggcataagatggaaaagttccctgaaaactctggaagaaaacaaagtaatgtagacaccttctttttccccacaccattagaaaatgttgcatcccttttgtcccacagcaataatgacgatgaggacctgacaccagagcagaaggcagagcgtgagaaggagcggaggatggccaacaatgcccgagagcgtctgcgggtccgtgacatcaacgaggctttcaaagagctcggccgcatggtgcagctccacctcaagagtgacaagccccagaccaagctcctgatcctccaccaggcggtggccgtcatcctcagtctggagcagcaagtccgagaaaggaatctgaatccgaaagctgcgtgtctgaaaagaagggaggaagagaaggtgtcctcagagcctccccctctctccttggccggcccacaccctggaatgggagacgcatcgaatcacatgggacagatgtaaaagggtccaagttgccacattgcttcattaaaacaagagaccacttccttaacagctgtattatcttaaacccacataaacacttctccttaacccccatttttgtaatataagacaagtctgagtagttatgaatcgcagacgcaagaggtttcagcattcccaattatcaaaaaacagaaaaacaaaaaaaagaaagaaaaaagtgcaacttgagggacgactttctttaacatatcattcagaatgtgcaaagcagtatgtacaggctgagacacagcccagagactgaacggcaatctttccacactgtggaacaatgcatttgtgcctaaacttcttttggaaaaaaaaaatataattaatttgtaagtctgaaaaaaaaatatttaatttaaaaaaaattgtaaacttgcaataatgaaaaagtgtacttctgaagaaaactacatgaacgtttttgttggtattcaagtcagctagtgtttataattactggatattgaattaggggaagctcggctgccctagtaacaaaaccagcaaacgtcctgatgacaacgaagtgatgacattagccattccttagggtaggaggaacagatggatcttatagacctatgacaaatatatatataaatatatatataaatatatattaaaaatttagtgactatggtaagcttttgttcatttgtttcagacttttttctcctgtaaaaaaatagtactgattaacttttttaaaagaaagattttactgtaaatatggatttttttttttttggtcttatttctgtccctttccctggtttgttatcgtaacctgtagtgccaactctgcttccagaggggtagtgcaggatgaaatgctgaccctgatgttgcttctcattcataaataagtagaaagttgtttctccagtcttttgggaacacaggacttaaaagtcacatcatgtgtagatattacaagcagcattaccaagacatggcaaaaagagtttgtctgaattgtaatgttgcgtttgtgaacctattctgggattttcagaggtacaaggttagaatgctacaatgttaccactgtgccttccaatgtttatatcatcggaaacataacataatcaaagtggctgtgatttaacaaaatgattaaagtgttacctacctgtgtagccgaagtagtgtgcagtgaggcgtttctgaatacatggtcagatttttggaaaaaaacaaaaacaaaaaaaacaagtaaagttcaaaaaccgtcaaatgagaaaattgcaagtagtgtgacagagctgattgattttgttgctttcttgattttttttttcaaaatgggtttactaaaatgtagatgacttaactgcctcctccttcgtctgaaaaatgccaatattcaatcatcatgcagcattataacaagccttataagtcctaaagcattaagttgcacttttttgaggaggggtagtgcagtatttctctggccagtatgaatgaagtttatacttaccatatttgatagaaacatagatcaagctatggcacagcgactcatcagatagctagctttgacgtctgggcacaattgaaccaacttccatcgtgaatctttataatgattgactttggtgtatagtgcagtaaacaaatagtgctcctagttaagtatttgtcagcatccttttgtctctaacttgtttctatttttacagccacacaattcttggcatgtattaagaaaaaaaaaaatccctgttcaagtagtttttccacctatcagcactgagtaaatgccataaatccattgaaatggtctaaatgttccatctgttctcctgttttgccagttatatagtaatgaaatacatttgtaaattttatgcaacaaatggcaaacgtatcattattttgaaattgtgtatgtaaaagttatatttttacatgtagactcttgttattatgtgttttaatacattgtatcagtttttgtttttttttaaaaactgtggtttaaaaagaagtctcatttaaatgaaatagctacaagaatcagaattttatgttcatttctgaaaatgtaagaacaaataagatagttaccacgtggtcatcttttacaaacccataaacattttgattagctgtgtgtgtgttgaaaaactgtaaatatgttcagtagcgataaaactaaaataactttgatttgttgataagttcctaaaatgtggaggtggattaaaaccttaggagaatagcagaaatcaaacttcatgaaaagttattttggggctttcctgtgaaatgtatgaacaaagaggctcagagaaggacatggaagacaataatgtatactctctcctcctccctgaataatgaaaaccatgtgtatttgttccctccgtatgttaaagatttccttttagtggtacattctgcactcattttgtatagtctaccaaggcgggtatccctaggaacaatattatataggaagcaggtatactctgatcacattcaggataagtgtacagaagaaaatacggtgtttactctttagggaactggaaacactccctgcattgatgtacattttaagaatggcacttttgatacatgttatcataaaggtgcttaatagagctgaattaaagtttttcaaatctgtaaacaaagcaaaaaagtaaattgtagtcatttgattattttttaaattggtgctttatattttgttctcactcagagtaaaagctgcaatttattgttcaccagctttgatgtattcattactcagtaatgcaatacctctattgttgaattccctttggaaataagtgaaaattctaacggccactgaaagctgctcgctaggttttgcttggtggagaaacataatctgcacctatccatattaattgggttgtatccccattaaaaaagaaaaaaagggaatgtggcctttttagtgtgttttttattgttgttgttttgtaattatcaaacccaggtaagatattggtatcctgcactggattttcaaatgaagttcagcagaagacagttaagattaaagtactatacaaaaatttcaaaagggtccatactacgctatctgtatgacgacacttaggctggggatctctttcagaaactcggactttaaaagcaacttggagcagttgatccacctccacattcaagtaatttatgaatatgcagaatagggatctgttcatctagaaatttttaccatttgtcttctgtgtagctgcaaggaacactaatgtttatacaactgtcagtccacccagtggtgcaactggttctgattcagtcttccgattcctttttatttttcactttttcctatttctgaatttttttttttatttgtgatcttgattttgatgaggggttggggagtggggagggagtcgaaccaagacttggagttaagaggattttcatcttttgcatccaacaggcagaatatgatctgtgtccaaaagtgaacttgagtcaggaatgaatcaatttcagcataaacaagcacaaaaatttagtctgctggctgactggaagcaaaaaagtcaagatggaatatgatgaattccaacacaatggggcaccaaggcctttaggcctctctttttattttgctttggttttgtttgtttttctttagagacatgctctttctcatgggacttgaagtggactcatctttgtgcagtgctggttttgccatactcatttcaagtattatagacatatgtaatggtgaaaatatatgaactgtggcctttttcattcttgttacttgtgatgcaattaagtgaagataagaaaaaaaaaaaaaaagcagagatttaccatgtatcagtgcctggctttttgttataaagctttgtttgtctagtgctcttttgctataaaatagactgtagtacaccctagtaggaaaaaaaaaaaactaaatttaaaaataaaaaatatatttggcttatttttcgcaggagcaatccttttataccatgaatattacaaaaaaattgtcagattctgaatatttcttctttgtagatttttggaatcattatgagtaaaagtttgttactttattttactatttaaaagatgttattttaccatgtgttaccaagatgaaactgtatgggtagcttttttgtttgttttttgttttgtttttgtttttgtttttgtttttagttgtaggtcgcagcggggaaattttttgcgactgtacacatagctgcagcattaaaaacttaaaaaaattgttaaaaaaaaaaaaagggaaaacatttcaaaaaaatttcatgtttttggtgtatttctgatttgtagaagtgtccaaacaggttgtgtgctggagttccttcaagacaaaaacaaacccagcttggtcaaggccattacctgtttcccatctgtagttattcgatgaagtcatgtacatgaccgttctgtagcaataaatgtgccatttttata

SEQ ID NO: 453729 - DNA, 824 bp, Homo sapiens
catgaggaagcggggcagccggcagctcccagactggagatgctctggggaaagcacttgcttcgatctattctccagatcacactaacaacagcttttcatcaaacccttcaactcctgttggctctcctccatctctctcagcaggcacagctgtttggtctagaaatggaggacaggcctcatcgtctcctaattatgaaggacccttacactctttgcaaagccgaattgaagatcgtttagaaagactggatgatgctattcatgttctccggaaccatgcagtgggcccatccacagctatgcctggtggtcatggggacatgcatggaatcattggaccttctcataatggagccatgggtggtctgggctcagggtatggaaccggccttctttcagccaacagacattcactcatggtggggacccatcgtgaagatggcgtggccctgagaggcagccattctcttctgccaaaccaggttccggttccacagcttcctgtccagtctgcgacttcccctgacctgaacccaccccaggacccttacagaggcatgccaccaggactacaggggcagagtgtctcctctggcagctctgagatcaaatccgatgacgagggtgatgagaacctgcaagacacgaaatcttcggaggacaagaaattagatgacgacaagaaggatatcaaatcaattactaggtcaagatctaggacctgacccagagcccatgggcggtgaaggcgcggagagggccacatgcgcggaagcgttgaggccggacccacggcgttcaagacccgcctgggcccc

SEQ ID NO: 453730 - DNA, 1897 bp, Homo sapiens
gtacacagcaacttcagaatggcagccacatggggcgccatggtagtcagggaggcatcgtcatggccatcagtcccagtgaggagaccaagctgcagatgttcatgtggagccgcatcatcttcagcctgggctttgtcattagtggccactacaaggactttgccagggatgtggcagcctccatagcattcaccaatgacctgaacggtgagcacccgcacaaggcagcggacatggagggtctgtacacgctggacacagcagaggtggatgaccgcagctactgggtcaggttccagtcctcatccctggcatcctggagtgggaccaggagcagagtgtcatctatggctccactgactttgtaagatggtggtgtggcccccatcgtgttgcctggatctgctggagcatgagttaactgctcaagaccctgtgccactgcatgctcaaccagtgcaacgatgaggcggagctcttctcggttgagggcaagggtgtcactggcaatgacagatactacctgctgagccccctccccctgacctcagcttcctgcctgtgccccacaaggagctgccagaggagtgctcccatgccagcttcccctgcacccacaggcacaggttctgtcgcttgtgccaggagctggtggatgtctttgtggagcacagttgaggagcagccctgtgaggctgaggctgcagccagctgcactctgctgcgggcacgggcaccctgggttgttctggggctggatcgttgaagagagaagctctggacagtgaagaagagctcgttttggccacaactcactagagcccctttcccatcccccacccacctgccatcaggctcccagatgcagaatctggagctttgtgttggttgcaagccagcaagcagtcaaaccagtgacccagctgagctgtgctgttctcctaaggagcatttggaagtcactgggtgggttgtgaaggtcacagtccctgagtgttggtgctgctggtttttagtgcttaggagttggccatgttaaatttcccacaccacaagtaactcttttccagaagccagtggcattcctgtctctgttggaagtcctggtctgaatgtggaccctctctccccgacctctatactctggctgtcttcttcctgtctggggagatctggcagccaccaccttgttgcctgggtctgtgagagcaaagctgagttctggtccggcttgtagcagaagaaggaatttgacaacatctataaggcccaggtgggctgtggcagggccggtgggttgagctgcgcctgtaggctgtgggcagctaatcctttcctgcctgtgctctctcccctgttttttggtgagaaccacgagaaggaaagctccgagatcctcaagtgcctggcccagcaggccatggcccagcagcacactgtgaatgggagatactggtcggctgcagtgccagcatcctgcccctccagctatatccctgggtggagctgggcccccacccggcctgggtaggatgagcctcactcacagctcatccccccacggcccctcagttcacagcccccagtatggccagcgtcttggagcagctccaggtcatcggtgatgtcctcttcattcttctcagctgaggcccctccatggctccctacttagaagttggcctttagttttttaagatatgtaataggctgacatggctcaaaattgaaaagtgtagccagtgatgagaacttccttgtgaatccttccagaaatactccatgtgatctttatccccctctttttttttctttggaattgtggcatgccacggatgaaggttattattgtttacttcatttaacaacgtatcttggtgatcttccaaaacag

SEQ ID NO: 453731 - DNA, 2061 bp, Homo sapiens
gaaacctgcaatgagcaaattcatgtatcaaaactctctttctgaattgtaatcatatacatgattaaatatcaggtgcgttaatgagtcaaagattgtaaatccagtctcttatgtataaacatatataatttagtgtatacattgtcatagatttttttatacataatatatgcatatatgtgaggttgtttttaaacttaccttacattttacattaaatttctccctaccctcaaatatgaacctatgacttctgtgaatctgtctcattcaaatgtcacttgattccagttatatattcaatttaacaatatcactataatcccaaaatgtccgtgaatgcacggacgcattcaccaatgacctgaacggtgagcacccgcacaaggcagcggacatggagggtctgtacacgctggacacagcagaggtggatgaccgcagctactgggtcaggttccagtcctcatccctggcatcctggagtgggaccaggagcagagtgtcatctatggctccactgactttgtaagatggtggtgtggcccccatcgtgttgcctggatctgctggagcatgagttaactgctcaagaccctgtgccactgcatgctcaaccagtgcaacgatgaggcggagctcttctcggttgagggcaagggtgtcactggcaatgacagatactacctgctgagccccctccccctgacctcagcttcctgcctgtgccccacaaggagctgccagaggagtgctcccatgccagcttcccctgcacccacaggcacaggttctgtcgcttgtgccaggagctggtggatgtctttgtggagcacagttgaggagcagccctgtgaggctgaggctgcagccagctgcactctgctgcgggcacgggcaccctgggttgttctggggctggatcgttgaagagagaagctctggacagtgaagaagagctcgttttggccacaactcactagagcccctttcccatcccccacccacctgccatcaggctcccagatgcagaatctggagctttgtgttggttgcaagccagcaagcagtcaaaccagtgacccagctgagctgtgctgttctcctaaggagcatttggaagtcactgggtgggttgtgaaggtcacagtccctgagtgttggtgctgctggtttttagtgcttaggagttggccatgttaaatttcccacaccacaagtaactcttttccagaagccagtggcattcctgtctctgttggaagtcctggtctgaatgtggaccctctctccccgacctctatactctggctgtcttcttcctgtctggggagatctggcagccaccaccttgttgcctgggtctgtgagagcaaagctgagttctggtccggcttgtagcagaagaaggaatttgacaacatctataaggcccaggtgggctgtggcagggccggtgggttgagctgcgcctgtaggctgtgggcagctaatcctttcctgcctgtgctctctcccctgttttttggtgagaaccacgagaaggaaagctccgagatcctcaagtgcctggcccagcaggccatggcccagcagcacactgtgaatgggagatactggtcggctgcagtgccagcatcctgcccctccagctatatccctgggtggagctgggcccccacccggcctgggtaggatgagcctcactcacagctcatccccccacggcccctcagttcacagcccccagtatggccagcgtcttggagcagctccaggtcatcggtgatgtcctcttcattcttctcagctgaggcccctccatggctccctacttagaagttggcctttagttttttaagatatgtaataggctgacatggctcaaaattgaaaagtgtagccagtgatgagaacttccttgtgaatccttccagaaatactccatgtgatctttatccccctctttttttttctttggaattgtggcatgccacggatgaaggttattattgtttacttcatttaacaacgtatcttggtgatcttccaaaacag

SEQ ID NO: 453732 - DNA, 478 bp, Homo sapiens
ctgaagttacctgccctggtttgcctggcacatagctggtggatcccaaacctgccgcagccctcatactccttggtagccactaaactctgtgcctctttaagcataagtgtttacttttttgtagaaatgattttcttgcccttctctaaatataaggaaactgaggcaagggtctctggctcccaaggcaggcctggttgcctctcccatcttggcgagctggaccaggtggatgtagcctgaggcttttgtgggcatggcctctcaccctcccagccttggtccctcccaggtacacagcaacttcagaatggcagccacatggggcgccatggtagtcagggaggcatcgtcatggccatcagtcccagtgaggagaccaagctgcagatgttcatgtggagccgcatcatcttcagcctgggctttgtcattagtggccactacaaggactttgccagggatgtggcagcct

SEQ ID NO: 453733 - DNA, 398 bp, Homo sapiens
ttgtggagcacagttgaggagcagccctgtgaggctgaggctgcagccagctgcactctgctgcgggcacgggcaccctgggttgttctggggctggatcgttgaagagagaagctctggacagtgaagaagagctcgttttggccacaactcactagagcccctttcccatcccccacccacctgccatcaggctcccagatgcagaatctggagctttgtgttggttgcaagccagcaagcagtcaaaccagtgacccagctgagctgtgctgttctcctaaggagcatttggaagtcactgggtgggttgtgaaggtcacagtccctgagtgttggtgctgctggtttttagtgcttaggagttggccatgttaaatttcccacaccacaagtaa

SEQ ID NO: 453734 - DNA, 4967 bp, Homo sapiens
gcggtgtgtggcaggcggcagcggcgctggcggccgagtgcgcttgtcacgcgtggcggtgcgtggttgctaggggcgcctgaggctgccgggtagcccagcaggccgagggaggaagtagcgtggagccggtgccgagccggggcgaagctggatcccctagatagactgtcttcaagctcactgatattttcctctgcttgatccattgtgctgttgagagcctctagtaaatttttcagactgacagacttcaaggatgcagctgctactaccggaggtgtgtggcaccttacctcagcaaggccatgagaccgtgtggccatgatgtgggcccctcatggcctcagcaggaacacagcactatagtattggcctccgccagaaaaacagcttcaagcagagtggtccctcaggcacagtacctgccacgccacctgagaaaccctcggagggcagagtctggcctcaggcccatcagcaagtgaagccaatctggaagctggaaaagaagcaagtggagacactgtcagcagggttgggcccaggcctcttgggcgtcccaccccagccagcatatttcttttgccccagcactttatgtagctctgggaccacggctgtcattgcaggccacagcagttcctgttacctacactctctcccggacttgttcaacagcaccctgctataccgccgctccagctataggcaaaaaccgtaccagcaactggagtctttctgcttgcgttcgagcccgtcagaaaaaagccctttttctctccctcaaaagagcctccctgtcagtctcactgccaacaaggccacttcttccatggtcttctccatggcccagcccatggcctcctcatccacagaaccatacctctgcttggcagcggctggggaaaacccttcagggaagagcctggcctctgccatctcagggaagatcccatctccactctcttcctcctataagcccatgctgaataataattccttcatgtggccaaatagcacgccagtgcctttattgcagaccacacagggcctgaagccagtatcgccacccaagatccagcctgtctcctggcatcattcagggggtactggagactgtgcaccgcagcctgttgaccataaggtgcccaaaagcattggcactgtcccagctgatgccagtgcccatatcgccttgtctaccgctagctcccacgacacatccaccaccagtgttgcctcttcctggtataaccggaataacttagccatgagggcagagccactttcctgtgctctggatgacagctctgattcccaggatccaactaaggagattcggttcactgaggccgtgaggaaattgaccgcaagaggctttgagaagatgccgaggcaaggctgccagcttgaacagtctagtttcctgaaccccagcttccagtggaatgtcctcaacaggagcaggcggtggaaacctcctgcggtaaatcagcagtttcctcaggaggatgctggatcggtcaggcgggtcctccctggtgcctcagataccttggggttggacaatacagtcttctgtaccaagcgtatcagcattcacctccttgcctcacatgccagtgggctcaatcacaaccctgcctgtgaatctgtaattgactcctcagcatttggagaaggcaaagctccaggtcccccttttcctcaaactcttggcatagccaacgtggccacccgcctctcttccatccagctgggccagtctgagaaggagagacctgaggaggccagggagctggactcatctgatagggatattagttcagctactgacctccagccagatcaggctgagactgaagatacagaagaagaactagtagatggtttggaagactgttgtagccgtgatgagaatgaagaggaggagggagactcagagtgctcctcattaagtgctgtctcccccagcgaatcggtggccatgatctctagaagctgtatggaaattctgaccaaacccctttccaatcatgagaaagttgtccgaccagccctcatctacagtctctttcccaacgttccccctaccatctattttggcactcgggatgagagagtggagaaacttccctgggagcagaggaagttgctccgatggaagatgagcacagtgacccccaacattgtcaagcagaccattggacggtcccacttcaaaatcagcaaaagaaacgatgactggctgggctgctggggtcaccacatgaagtctcctagtttccgatccattcgagagcatcagaagctaaaccatttcccaggctcattccagattgggaggaaggaccggctatggcggaacctgtcacgtatgcagagccgctttggcaagaaggagttcagtttcttcccccagtcctttatcctgccccaggacgccaagctcctgcgcaaagcgtgggagagcagcagccgccaaaagtggattgtgaagccaccagcatcagctcgaggcattggcatccaggttattcacaagtggagtcagctccccaagcgaaggcccctcctggtacagaggtatctacacaaaccctacctcatcagcggcagcaagtttgacctgcggatctatgtttatgtcacttcctacgatcctctgcggatttacctcttttcagatggactggtccgctttgccagttgcaagtattcgccttccatgaagagccttggcaataagttcatgcacctgaccaactacagtgtcaataaaaagaatgccgagtaccaggccaatgcagatgaaatggcttgccagggccacaaatgggcactgaaggctttgtggaactacctgagccagaagggagtcaatagcgacgccatctgggagaagataaaggatgttgttgtcaaaactatcatctcgtcagagccctatgtgaccagcctgctcaagatgtatgtgcgacggccctatagctgccatgaactctttggttttgacatcatgctagacgaaaacctcaagccctgggtcctggaagtcaacatttccccaagcctccactccagctctccactggatatcagcatcaaaggccagatgattcgtgaccttctgaatctggcaggttttgtcctgcccaatgcagaggatatcatttccagccccagcagctgcagcagctccaccaccagcctgcccacctcccctggggacaaatgtcgaatggctccagagcatgtcactgcacagaagatgaagaaagcctattatctgacccagaaaattcctgatcaggacttctatgcatctgtgctggatgtcctgacaccagatgatgttcggattctggttgagatggaagatgagttttctcgccgtggtcagtttgaacgaatttttccttctcatatctcctctcgctatctccgcttttttgagcagccacgatatttcaacattctcaccacccaatgggaacagaaataccatggcaacaagcttaaaggagtagatctgctccggagttggtgctacaaagggttccacatgggagttgtctctgattctgctccagtgtggtctctcccgacatcacttctgactatctcaaaggatgacgtgatactcaatgccttcagcaaatcagagactagcaagctgggaaaacaaagctcctgtgaggttagcctactactctctgaagacgggaccacgcccaaatccaagaagactcaagctggcctttccccttatccccagaaacccagttcctcaaaggacagtgaggacaccagcaaagagcccagcctttctacccagacgttacctgtgatcaagtgctctgggcagacttcaagactttctgcttcctccactttccagtcaatcagtgactccctcctggctgtgagcccataactggcctctctccaaaagcctctgcccaggagcatgggcatcagctacctcacgggaaccagcctgctgttcagaccagtctgaccccctacccctttcaccctgtccctcctcagagtattttttgaagtggttgcattatagagatgggtatttgtagggccggagggatggtagtgatggggagaaggtgaggaagggtcaccctctgtcacctgtctgcctggctggcacctcatatctcagcagagaagccagtggtggccacgcagccttataaagcaggttttggtttctaccttaagtgagccatgtgtggtttgtctgggggccctggtgtggttgctgagttgtagctcaagaggagaaaacatacagaacatatttggaccggaaatcctttgttctgaatttgagggggtcttctgaggtccttatttccttaggtctttcctcacccctctcccaccgctgtcctgaggagaaacccttgaacttcctcagtagacaggcggagaggccacaacatgccgaacccatttcctgtcatcctagtcttgggtcttcaccgcctccttccaaatacccaccctgccagcagccctaggtcttcctgttctgaccccccatcactgctcgttcagccttctagacgtctctctcgtggacatctgttctttagctgttggctttctctgaggtgtgagagggtctatgaactttgtgaatttcccatggccccagtgaaggagcccagataatcccagtagctgttacctgtctccatgtatcaaaggacacagtccagggggagggtggaaggagatgtggtttctctatagtgcaacaaacatggtttctcaatgttctgctgtgcagcaagcagggtctggcggcttggtaggtgggtttcaggagcagtcactattgtaggatgggcttccaatcaaacctcagactaaactcttgtactgaactgattctacctccctcctctagactcagtaaacagtgactattcaataaa

SEQ ID NO: 453735 - DNA, 4281 bp, Homo sapiens
gcggtgtgtggcaggcggcagcggcgctggcggccgagtgcgcttgtcacgcgtggcggtgcgtggttgctaggggcgcctgaggctgccgggtagcccagcaggccgagggaggaagtagcgtggagccggtgccgagccggggcgaagctggatcccctagatagactgtcttcaagctcactgatattttcctctgcttgatccattgtgctgttgagagcctctagtaaatttttcaggtcactacctctttttcaacactagatggcatcttggccccagactgacagacttcaaggatgcagctgctactaccggaggtgtgtggcaccttacctcagcaaggccatgagaccgtgtggccatgatgtgggcccctcatggcctcagcaggaacacagcactatagtattggcctccgccagaaaaacagcttcaagcagagtggtccctcaggcacagtacctgccacgccacctgagaaaccctcggagggcagagtctggcctcaggcccatcagcaagtgaagccaatctggaagctggaaaagaagcaagtggagacactgtcagcagggttgggcccaggcctcttgggcgtcccaccccagccagcatatttcttttgccccagcactttatgtagctctgggaccacggctgtcattgcaggccacagcagttcctgttacctacactctctcccggacttgttcaacagcaccctgctataccgccgctccagctataggcaaaaaccgtaccagcaactggagtctttctgcttgcgttcgagcccgtcagaaaaaagccctttttctctccctcaaaagagcctccctgtcagtctcactgccaacaaggccacttcttccatggtcttctccatggcccagcccatggcctcctcatccacagaaccatacctctgcttggcagcggctggggaaaacccttcagggaagagcctggcctctgccatctcagggaagatcccatctccactctcttcctcctataagcccatgctgaataataattccttcatgtggccaaatagcacgccagtgcctttattgcagaccacacagggcctgaagccagtatcgccacccaagatccagcctgtctcctggcatcattcagggggtactggagactgtgcaccgcagcctgttgaccataaggtgcccaaaagcattggcactgtcccagctgatgccagtgcccatatcgccttgtctaccgctagctcccacgacacatccaccaccagtgttgcctcttcctggtataaccggaataacttagccatgagggcagagccactttcctgtgctctggatgacagctctgattcccaggatccaactaaggagattcggttcactgaggccgtgaggaaattgaccgcaagaggctttgagaagatgccgaggcaaggctgccagcttgaacagtctagtttcctgaaccccagcttccagtggaatgtcctcaacaggagcaggcggtggaaacctcctgcggtaaatcagcagtttcctcaggaggatgctggatcggtcaggcgggtcctccctggtgcctcagataccttggggttggacaatacagtcttctgtaccaagcgtatcagcattcacctccttgcctcacatgccagtgggctcaatcacaaccctgcctgtgaatctgtaattgactcctcagcatttggagaaggcaaagctccaggtcccccttttcctcaaactcttggcatagccaacgtggccacccgcctctcttccatccagctgggccagtctgagaaggagagacctgaggaggccagggagctggactcatctgatagggatattagttcagctactgacctccagccagatcaggctgagactgaagatacagaagaagaactagtagatggtttggaagactgttgtagccgtgatgagaatgaagaggaggagggagactcagagtgctcctcattaagtgctgtctcccccagcgaatcggtggccatgatctctagaagctgtatggaaattctgaccaaacccctttccaatcatgagaaagttgtccgaccagccctcatctacagtctctttcccaacgttccccctaccatctattttggcactcgggatgagagagtggagaaacttccctgggagcagaggaagttgctccgatggaagatgagcacagtgacccccaacattgtcaagcagaccattggacggtcccacttcaaaatcagcaaaagaaacgatgactggctgggctgctggggtcaccacatgaagtctcctagtttccgatccattcgagagcatcagaagctaaaccatttcccaggctcattccagattgggaggaaggaccggctatggcggaacctgtcacgtatgcagagccgctttggcaagaaggagttcagtttcttcccccagtcctttatcctgccccaggacgccaagctcctgcgcaaagcgtgggagagcagcagccgccaaaagtggattgtgaagccaccagcatcagctcgaggcattggcatccaggttattcacaagtggagtcagctccccaagcgaaggcccctcctggtacagaggtatctacacaaaccctacctcatcagcggcagcaagtttgacctgcggatctatgtttatgtcacttcctacgatcctctgcggatttacctcttttcagatggactggtccgctttgccagttgcaagtattcgccttccatgaagagccttggcaataagttcatgcacctgaccaactacagtgtcaataaaaagaatgccgagtaccaggccaatgcagatgaaatggcttgccagggccacaaatgggcactgaaggctttgtggaactacctgagccagaagggagtcaatagcgacgccatctgggagaagataaaggatgttgttgtcaaaactatcatctcgtcagagccctatgtgaccagcctgctcaagatgtatgtgcgacggccctatagctgccatgaactctttggttttgacatcatgctagacgaaaacctcaagccctgggtcctggaagtcaacatttccccaagcctccactccagctctccactggatatcagcatcaaaggccagatgattcgtgaccttctgaatctggcaggttttgtcctgcccaatgcagaggatatcatttccagccccagcagctgcagcagctccaccaccagcctgcccacctcccctggggacaaatgtcgaatggctccagagcatgtcactgcacagaagatgaagaaagcctattatctgacccagaaaattcctgatcaggacttctatgcatctgtgctggatgtcctgacaccagatgatgttcggattctggttgagatggaagatgagttttctcgccgtggtcagtttgaacgaatttttccttctcatatctcctctcgctatctccgcttttttgagcagccacgatatttcaacattctcaccacccaatgggaacagaaataccatggcaacaagcttaaaggagtagatctgctccggagttggtgctacaaagggttccacatgggagttgtctctgattctgctccagtgtggtctctcccgacatcacttctgactatctcaaaggatgacgtgatactcaatgccttcagcaaatcagagactagcaagctgggaaaacaaagctcctgtgaggttagcctactactctctgaagacgggaccacgcccaaatccaagaagactcaagctggcctttccccttatccccagaaacccagttcctcaaaggacagtgaggacaccagcaaagagcccagcctttctacccagacgttacctgtgatcaagtgctctgggcagacttcaagactttctgcttcctccactttccagtcaatcagtgactccctcctggctgtgagcccataactggcctctctccaaaagcctctgcccaggagcatgggcatcagctacctcacgggaaccagcctgctgttcagaccagtctgaccccctacccctttcaccctgtccctcctcagagtattttttgaagtggttgcattatagagatgggtatttgtagggccggagggatggtagtgatggggagaaggtgaggaagggtcaccctctgtcacctgtctgcctggctggcacctcatatctcagcagagaagccagtggtggccacgcagccttataaagcaggttttggtttcta

SEQ ID NO: 453736 - DNA, 4695 bp, Homo sapiens
gcggtgtgtggcaggcggcagcggcgctggcggccgagtgcgcttgtcacgcgtggcggtgcgtggttgctaggggcgcctgaggctgccgggtagcccagcaggccgagggaggaagtagcgtggagccggtgccgagccggggcgaagctggatcccctagatagactgtcttcaagctcactgatattttcctctgcttgatccattgtgctgttgagagcctctagtaaatttttcagactgacagacttcaaggatgcagctgctactaccggaggtgtgtggcaccttacctcagcaaggccatgagaccgtgtggccatgatgtgggcccctcatggcctcagcaggaacacagcactatagtattggcctccgccagaaaaacagcttcaagcagagtggtccctcaggcacagtacctgccacgccacctgagaaaccctcggagggcagagtctggcctcaggcccatcagcaagtgaagccaatctggaagctggaaaagaagcaagtggagacactgtcagcagggttgggcccaggcctcttgggcgtcccaccccagccagcatatttcttttgccccagcactttatgtagctctgggaccacggctgtcattgcaggccacagcagttcctgttacctacactctctcccggacttgttcaacagcaccctgctataccgccgctccagctataggcaaaaaccgtaccagcaactggagtctttctgcttgcgttcgagcccgtcagaaaaaagccctttttctctccctcaaaagagcctccctgtcagtctcactgccaacaaggccacttcttccatggtcttctccatggcccagcccatggcctcctcatccacagaaccatacctctgcttggcagcggctggggaaaacccttcagggaagagcctggcctctgccatctcagggaagatcccatctccactctcttcctcctataagcccatgctgaataataattccttcatgtggccaaatagcacgccagtgcctttattgcagaccacacagggcctgaagccagtatcgccacccaagatccagcctgtctcctggcatcattcagggggtactggagactgtgcaccgcagcctgttgaccataaggtgcccaaaagcattggcactgtcccagctgatgccagtgcccatatcgccttgtctaccgctagctcccacgacacatccaccaccagtgttgcctcttcctggtataaccggaataacttagccatgagggcagagccactttcctgtgctctggatgacagctctgattcccaggatccaactaaggagattcggttcactgaggccgtgaggaaattgaccgcaagaggctttgagaagatgccgaggcaaggctgccagcttgaacagtctagtttcctgaaccccagcttccagtggaatgtcctcaacaggagcaggcggtggaaacctcctgcggtaaatcagcagtttcctcaggaggatgctggatcggtcaggcgggtcctccctggtgcctcagataccttggggttggacaatacagtcttctgtaccaagcgtatcagcattcacctccttgcctcacatgccagtgggctcaatcacaaccctgcctgtgaatctgtaattgactcctcagcatttggagaaggcaaagctccaggtcccccttttcctcaaactcttggcatagccaacgtggccacccgcctctcttccatccagctgggccagtctgagaaggagagacctgaggaggccagggagctggactcatctgatagggatattagttcagctactgacctccagccagatcaggctgagactgaagatacagaagaagaactagtagatggtttggaagactgttgtagccgtgatgagaatgaagaggaggagggagactcagagtgctcctcattaagtgctgtctcccccagcgaatcggtggccatgatctctagaagctgtatggaaattctgaccaaacccctttccaatcatgagaaagttgtccgaccagccctcatctacagtctctttcccaacgttccccctaccatctattttggcactcgggatgagagaggtaaacctggccaagtgtcaaagcccagaagagcccccggggagaaggttgctagctaagttgggaggaggtggcagtaggtaggagagggtttccagaatggctgttgtggcagttgtcacactgtgctcagttccccatgtggtcgtaggtctgatgcaacctttttcttgtctgtcctttagctgacccttttcagccttgccatgtcatgctgagttcatgctcttcaaccttgttgcttttccctttcagtcttccctttctttgttcctcattcctgcacagcccctcttctttcccaaagtgtgctcctctgaaaccctgatctggagcaatagttagtgacttgcctgcccagggaagaatgggcagccatgccatcttttttgtcttctcatcatgactctctgctcctctccatcccccatccccacaccccttgcattcttcccagtggagaaacttccctgggagcagaggaagttgctccgatggaagatgagcacagtgacccccaacattgtcaagcagaccattggacggtcccacttcaaaatcagcaaaagaaacgatgactggctgggctgctggggtcaccacatgaagtctcctagtttccgatccattcgagagcatcagaagctaaaccatttcccaggctcattccagattgggaggaaggaccggctatggcggaacctgtcacgtatgcagagccgctttggcaagaaggagttcagtttcttcccccagtcctttatcctgccccaggacgccaagctcctgcgcaaagcgtgggagagcagcagccgccaaaagtggattgtgaagccaccagcatcagctcgaggcattggcatccaggttattcacaagtggagtcagctccccaagcgaaggcccctcctggtacagaggtatctacacaaaccctacctcatcagcggcagcaagtttgacctgcggatctatgtttatgtcacttcctacgatcctctgcggatttacctcttttcagatggactggtccgctttgccagttgcaagtattcgccttccatgaagagccttggcaataagttcatgcacctgaccaactacagtgtcaataaaaagaatgccgagtaccaggccaatgcagatgaaatggcttgccagggccacaaatgggcactgaaggctttgtggaactacctgagccagaagggagtcaatagcgacgccatctgggagaagataaaggatgttgttgtcaaaactatcatctcgtcagagccctatgtgaccagcctgctcaagatgtatgtgcgacggccctatagctgccatgaactctttggttttgacatcatgctagacgaaaacctcaagccctgggtcctggaagtcaacatttccccaagcctccactccagctctccactggatatcagcatcaaaggccagatgattcgtgaccttctgaatctggcaggttttgtcctgcccaatgcagaggatatcatttccagccccagcagctgcagcagctccaccaccagcctgcccacctcccctggggacaaatgtcgaatggctccagagcatgtcactgcacagaagatgaagaaagcctattatctgacccagaaaattcctgatcaggacttctatgcatctgtgctggatgtcctgacaccagatgatgttcggattctggttgagatggaagatgagttttctcgccgtggtcagtttgaacgaatttttccttctcatatctcctctcgctatctccgcttttttgagcagccacgatatttcaacattctcaccacccaatgggaacagaaataccatggcaacaagcttaaaggagtagatctgctccggagttggtgctacaaagggttccacatgggagttgtctctgattctgctccagtgtggtctctcccgacatcacttctgactatctcaaaggatgacgtgatactcaatgccttcagcaaatcagagactagcaagctgggaaaacaaagctcctgtgaggttagcctactactctctgaagacgggaccacgcccaaatccaagaagactcaagctggcctttccccttatccccagaaacccagttcctcaaaggacagtgaggacaccagcaaagagcccagcctttctacccagacgttacctgtgatcaagtgctctgggcagacttcaagactttctgcttcctccactttccagtcaatcagtgactccctcctggctgtgagcccataactggcctctctccaaaagcctctgcccaggagcatgggcatcagctacctcacgggaaccagcctgctgttcagaccagtctgaccccctacccctttcaccctgtccctcctcagagtattttttgaagtggttgcattatagagatgggtatttgtagggccggagggatggtagtgatggggagaaggtgaggaagggtcaccctctgtcacctgtctgcctggctggcacctcatatctcagcagagaagccagtggtggccacgcagccttataaagcaggttttggtttcta

SEQ ID NO: 453737 - DNA, 4141 bp, Homo sapiens
gcggtgtgtggcaggcggcagcggcgctggcggccgagtgcgcttgtcacgcgtggcggtgcgtggttgctaggggcgcctgaggctgccgggtagcccagcaggccgagggaggaagtagcgtggagccggtgccgagccggggcgaagctggatcccctagatagactgtcttcaagctcactgatattttcctctgcttgatccattgtgctgttgagagcctctagtaaatttttcagactgacagacttcaaggatgcagctgctactaccggaggtgtgtggcaccttacctcagcaaggccatgagaccgtgtggccatgatgtgggcccctcatggcctcagcaggaacacagcactatagtattggcctccgccagaaaaacagcttcaagcagagtggtccctcaggcacagtacctgccacgccacctgagaaaccctcggagggcagagtctggcctcaggcccatcagcaagtgaagccaatctggaagctggaaaagaagcaagtggagacactgtcagcagggttgggcccaggcctcttgggcgtcccaccccagccagcatatttcttttgccccagcactttatgtagctctgggaccacggctgtcattgcaggccacagcagttcctgttacctacactctctcccggacttgttcaacagcaccctgctataccgccgctccagctataggcaaaaaccgtaccagcaactggagtctttctgcttgcgttcgagcccgtcagaaaaaagccctttttctctccctcaaaagagcctccctgtcagtctcactgccaacaaggccacttcttccatggtcttctccatggcccagcccatggcctcctcatccacagaaccatacctctgcttggcagcggctggggaaaacccttcagggaagagcctggcctctgccatctcagggaagatcccatctccactctcttcctcctataagcccatgctgaataataattccttcatgtggccaaatagcacgccagtgcctttattgcagaccacacagggcctgaagccagtatcgccacccaagatccagcctgtctcctggcatcattcagggggtactggagactgtgcaccgcagcctgttgaccataaggtgcccaaaagcattggcactgtcccagctgatgccagtgcccatatcgccttgtctaccgctagctcccacgacacatccaccaccagtgttgcctcttcctggtataaccggaataacttagccatgagggcagagccactttcctgtgctctggatgacagctctgattcccaggatccaactaaggagattcggttcactgaggccgtgaggaaattgaccgcaagaggctttgagaagatgccgaggcaaggctgccagcttgaacagtctagtttcctgaaccccagcttccagtggaatgtcctcaacaggagcaggcggtggaaacctcctgcggtaaatcagcagtttcctcaggaggatgctggatcggtcaggcgggtcctccctggtgcctcagataccttggggttggacaatacagtcttctgtaccaagcgtatcagcattcacctccttgcctcacatgccagtgggctcaatcacaaccctgcctgtgaatctgtaattgactcctcagcatttggagaaggcaaagctccaggtcccccttttcctcaaactcttggcatagccaacgtggccacccgcctctcttccatccagctgggccagtctgagaaggagagacctgaggaggccagggagctggactcatctgatagggatattagttcagctactgacctccagccagatcaggctgagactgaagatacagaagaagaactagtagatggtttggaagactgttgtagccgtgatgagaatgaagaggaggagggagactcagagtgctcctcattaagtgctgtctcccccagcgaatcggtggccatgatctctagaagctgtatggaaattctgaccaaacccctttccaatcatgagaaagttgtccgaccagccctcatctacagtctctttcccaacgttccccctaccatctattttggcactcgggatgagagagtggagaaacttccctgggagcagaggaagttgctccgatggaagatgagcacagtgacccccaacattgtcaagcagaccattggacggtcccacttcaaaatcagcaaaagaaacgatgactggctgggctgctggggtcaccacatgaagtctcctagtttccgatccattcgagagcatcagaagctaaaccatttcccaggctcattccagattgggaggaaggaccggctatggcggaacctgtcacgtatgcagagccgctttggcaagaaggagttcagtttcttcccccagtcctttatcctgccccaggacgccaagctcctgcgcaaagcgtgggagagcagcagccgccaaaagtggattgtgaagccaccagcatcagctcgaggcattggcatccaggttattcacaagtggagtcagctccccaagcgaaggcccctcctggtacagaggtatctacacaaaccctacctcatcagcggcagcaagtttgacctgcggatctatgtttatgtcacttcctacgatcctctgcggatttacctcttttcagatggactggtccgctttgccagttgcaagtattcgccttccatgaagagccttggcaataagttcatgcacctgaccaactacagtgtcaataaaaagaatgccgagtaccaggccaatgcagatgaaatggcttgccagggccacaaatgggcactgaaggctttgtggaactacctgagccagaagggagtcaatagcgacgccatctgggagaagataaaggatgttgttgtcaaaactatcatctcgtcagagccctatgtgaccagcctgctcaagatgtatgtgcgacggccctatagctgccatgaactctttggttttgacatcatgctagacgaaaacctcaagccctgggtcctggaagtcaacatttccccaagcctccactccagctctccactggatatcagcatcaaaggccagatgattcgtgaccttctgaatctggcaggttttgtcctgcccaatgcagaggatatcatttccagccccagcagctgcagcagctccaccaccagcctgcccacctcccctggggacaaatgtcgaatggctccagagcatgtcactgcacagaagatgaagaaagcctattatctgacccagaaaattcctgatcaggacttctatgcatctgtgctggatgtcctgacaccagatgatgttcggattctggttgagatggaagatgagttttctcgccgtggtcagtttgaacgaatttttccttctcatatctcctctcgctatctccgcttttttgagcagccacgatatttcaacattctcaccacccaatgggaacagaaataccatggcaacaagcttaaaggagtagatctgctccggagttggtgctacaaagggttccacatgggagttgtctctgattctgctccagtgtggtctctcccgacatcacttctgactatctcaaaggatgacgtgatactcaatgccttcagcaaatcagagactagcaagctgggaaacccagttcctcaaaggacagtgaggacaccagcaaagagcccagcctttctacccagacgttacctgtgatcaagtgctctgggcagacttcaagactttctgcttcctccactttccagtcaatcagtgactccctcctggctgtgagcccataactggcctctctccaaaagcctctgcccaggagcatgggcatcagctacctcacgggaaccagcctgctgttcagaccagtctgaccccctacccctttcaccctgtccctcctcagagtattttttgaagtggttgcattatagagatgggtatttgtagggccggagggatggtagtgatggggagaaggtgaggaagggtcaccctctgtcacctgtctgcctggctggcacctcatatctcagcagagaagccagtggtggccacgcagccttataaagcaggttttggtttcta

SEQ ID NO: 453738 - DNA, 2060 bp, Homo sapiens
ctctctctgtccctggactgagctgttagcaaggctgattcctgatgtacctcccataggaaacgatgactggctgggctgctggggtcaccacatgaagtctcctagtttccgatccattcgagagcatcagaagctaaaccatttcccaggctcattccagattgggaggaaggaccggctatggcggaacctgtcacgtatgcagagccgctttggcaagaaggagttcagtttcttcccccagtcctttatcctgccccaggacgccaagctcctgcgcaaagcgtgggagagcagcagccgccaaaagtggattgtgaagccaccagcatcagctcgaggcattggcatccaggttattcacaagtggagtcagctccccaagcgaaggcccctcctggtacagaggtatctacacaaaccctacctcatcagcggcagcaagtttgacctgcggatctatgtttatgtcacttcctacgatcctctgcggatttacctcttttcagatggactggtccgctttgccagttgcaagtattcgccttccatgaagagccttggcaataagttcatgcacctgaccaactacagtgtcaataaaaagaatgccgagtaccaggccaatgcagatgaaatggcttgccagggccacaaatgggcactgaaggctttgtggaactacctgagccagaagggagtcaatagcgacgccatctgggagaagataaaggatgttgttgtcaaaactatcatctcgtcagagccctatgtgaccagcctgctcaagatgtatgtgcgacggccctatagctgccatgaactctttggttttgacatcatgctagacgaaaacctcaagccctgggtcctggaagtcaacatttccccaagcctccactccagctctccactggatatcagcatcaaaggccagatgattcgtgaccttctgaatctggcaggttttgtcctgcccaatgcagaggatatcatttccagccccagcagctgcagcagctccaccaccagcctgcccacctcccctggggacaaatgtcgaatggctccagagcatgtcactgcacagaagatgaagaaagcctattatctgacccagaaaattcctgatcaggacttctatgcatctgtgctggatgtcctgacaccagatgatgttcggattctggttgagatggaagatgagttttctcgccgtggtcagtttgaacgaatttttccttctcatatctcctctcgctatctccgcttttttgagcagccacgatatttcaacattctcaccacccaatgggaacagaaataccatggcaacaagcttaaaggagtagatctgctccggagttggtgctacaaagggttccacatgggagttgtctctgattctgctccagtgtggtctctcccgacatcacttctgactatctcaaaggatgacgtgatactcaatgccttcagcaaatcagagactagcaagctgggaaaacaaagctcctgtgaggttagcctactactctctgaagacgggaccacgcccaaatccaagaagactcaagctggcctttccccttatccccagaaacccagttcctcaaaggacagtgaggacaccagcaaagagcccagcctttctacccagacgttacctgtgatcaagtgctctgggcagacttcaagactttctgcttcctccactttccagtcaatcagtgactccctcctggctgtgagcccataactggcctctctccaaaagcctctgcccaggagcatgggcatcagctacctcacgggaaccagcctgctgttcagaccagtctgaccccctacccctttcaccctgtccctcctcagagtattttttgaagtggttgcattatagagatgggtatttgtagggccggagggatggtagtgatggggagaaggtgaggaagggtcaccctctgtcacctgtctgcctggctggcacctcatatctcagcagagaagccagtggtggccacgcagccttataaagcaggttttggtttcta

SEQ ID NO: 453739 - DNA, 3100 bp, Homo sapiens
gcggtgtgtggcaggcggcagcggcgctggcggccgagtgcgcttgtcacgcgtggcggtgcgtggttgctaggggcgcctgaggctgccgggtagcccagcaggccgagggaggaagtagcgtggagccggtgccgagccggggcgaagctggatcccctagatagactgtcttcaagctcactgatattttcctctgcttgatccattgtgctgttgagagcctctagtaaatttttcagactgacagacttcaaggatgcagctgctactaccggaggtgtgtggcaccttacctcagcaaggccatgagaccgtgtggccatgatgtgggcccctcatggcctcagcaggaacacagcactatagtattggcctccgccagaaaaacagcttcaagcagagtggtccctcaggcacagtacctgccacgccacctgagaaaccctcggagggcagagtctggcctcaggcccatcagcaagtgaagccaatctggaagctggaaaagaagcaagtggagacactgtcagcagggttgggcccaggcctcttgggcgtcccaccccagccagcatatttcttttgccccagcactttatgtagctctgggaccacggctgtcattgcaggccacagcagttcctgttacctacactctctcccggacttgttcaacagcaccctgctataccgccgctccagctataggcaaaaaccgtaccagcaactggagtctttctgcttgcgttcgagcccgtcagaaaaaagccctttttctctccctcaaaagagcctccctgtcagtctcactgccaacaaggccacttcttccatggtcttctccatggcccagcccatggcctcctcatccacagaaccatacctctgcttggcagcggctggggaaaacccttcagggaagagcctggcctctgccatctcagggaagatcccatctccactctcttcctcctataagcccatgctgaataataattccttcatgtggccaaatagcacgccagtgcctttattgcagaccacacagggcctgaagccagtatcgccacccaagatccagcctgtctcctggcatcattcagggggtactggagactgtgcaccgcagcctgttgaccataaggtgcccaaaagcattggcactgtcccagctgatgccagtgcccatatcgccttgtctaccgctagctcccacgacacatccaccaccagtgttgcctcttcctggtataaccggaataacttagccatgagggcagagccactttcctgtgctctggatgacagctctgattcccaggatccaactaaggagattcggttcactgaggccgtgaggaaattgaccgcaagaggctttgagaagatgccgaggcaaggctgccagcttgaacagtctagtttcctgaaccccagcttccagtggaatgtcctcaacaggagcaggcggtggaaacctcctgcggtaaatcagcagtttcctcaggaggatgctggatcggtcaggcgggtcctccctggtgcctcagataccttggggttggacaatacagtcttctgtaccaagcgtatcagcattcacctccttgcctcacatgccagtgggctcaatcacaaccctgcctgtgaatctgtaattgactcctcagcatttggagaaggcaaagctccaggtcccccttttcctcaaactcttggcatagccaacgtggccacccgcctctcttccatccagctgggccagtctgagaaggagagacctgaggaggccagggagctggactcatctgatagggatattagttcagctactgacctccagccagatcaggctgagactgaagatacagaagaagaactagtagatggtttggaagactgttgtagccgtgatgagaatgaagaggaggagggagactcagagtgctcctcattaagtgctgtctcccccagcgaatcggtggccatgatctctagaagctgtatggaaattctgaccaaacccctttccaatcatgagaaagttgtccgaccagccctcatctacagtctctttcccaacgttccccctaccatctattttggcactcgggatgagagagtggagaaacttccctgggagcagaggaagttgctccgatggaagatgagcacagtgacccccaacattgtcaagcagaccattggacggtcccacttcaaaatcagcaaaagaaacgatgactggctgggctgctggggtcaccacatgaagtctcctagtttccgatccattcgagagcatcagaagctaaaccatttcccaggctcattccagattgggaggaaggaccggctatggcggaacctgtcacgtatgcagagccgctttggcaagaaggagttcagtttcttcccccagtcctttatcctgccccaggacgccaagctcctgcgcaaagcgtgggagagcagcagccgccaaaagtggattgtgaagccaccagcatcagctcgaggcattggcatccaggttattcacaagtggagtcagctccccaagcgaaggcccctcctggtacagaggtatctacacaaaccctacctcatcagcggcagcaagtttgacctgcggatctatgtttatgtcacttcctacgatcctctgcggatttacctcttttcagatggactggtccgctttgccagttgcaagtattcgccttccatgaagagccttggcaataagttcatgcacctgaccaactacagtgtcaataaaaagaatgccgagtaccaggccaatgcagatgaaatggcttgccagggccacaaatgggcactgaaggctttgtggaactacctgagccagaagggagtcaatagcgacgccatctgggagaagataaaggatgttgttgtcaaaactatcatctcgtcagagccctatgtgaccagcctgctcaagatgtatgtgcgacggccctatagctgccatgaactctttggttttgacatcatgctagacgaaaacctcaagccctgggtcctggaagtcaacatttccccaaggtaggtggtattctcaggacactca

SEQ ID NO: 453740 - DNA, 552 bp, Homo sapiens
gtattcgccttccatgaagagccttggcaataagttcatgcacctgaccaactacagtgtcaataaaaagaatgccgagtaccaggccaatgcagatgaaatggcttgccagggccacaaatggtactgagggcagagtgtcccagtccagtgaaggcctagaggaatacagggttctggggttttgggaggttcaggggcatggcgagtggaggattaatataagacccagagataacacttaccaattcagaattggtctatttgaggccggatgtggtggctcacgcctgtaatcctagcactttgggaggccaaggtgggtggatcacctgagttcaggagtacaggaccagcctggccaacatggcgaagccctgcgtctactaaaaatacaaaaattagctgggtgtggtggcaggcgcctacaatcccagctgctcaggaagttgaggcaggagaatcacttgaacctgggggacggaggttgcagtgagctgagatcgcgccacttcactccagcctgtgtgaaagagtgaaactccatctcaa

SEQ ID NO: 453741 - DNA, 484 bp, Homo sapiens
cattactctgttttgtctgtgttttaatcatcttttggtgagtgctctgcagttggatacttgaggaccattagggtggtgatagtaagatggaacaaaagcttggagtgctgctaaagaagttggaatggtagaatgagtcttgtcatcttcctcatggcctcacctctgccctcttcctgcactcacccttttcccttttgtagctaaaccatttcccaggctcattccagattgggaggaaggaccggctatggcggaacctgtcacgtatgcagagccgctttggcaagaaggagttcagtttcttcccccagtcctttatcctgccccaggacgccaagctcctgcgcaaagcgtgggagagcagcagccgccaaaagtggattgtgaagccagtgagtgaatcacagtgggcaggagactatggtctgtgagtgggaacaacagagtattggacctggagcaaatctcatctcctttc

SEQ ID NO: 453742 - DNA, 524 bp, Homo sapiens
ggactttcccagccaatgtcttgtcacgggaaattttggagctgtattgcagaatgaagtgttggaaaaccttgtctttaggtgacatttaatggtgtggttgtatgtaggttagcctagtaccttatggattaatatgtacaaaataattattaattattgagcacctggctttttagaatcacaagttaaaagacagcacttggaaataaatcgtacgtcgtagtaacgacgcttcagggctgttgctttttccctttctctactccatgtttgtttttcgtcttagaagctgtatggaaattctgaccaaacccctttccaatcatgagaaagttgtccgaccagccctcatctacagtctctttcccaacgttccccctaccatctattttggcactcgggatgagagaggtaaacctggccaagtgtcaaagcccagaagagcccccggggagaaggttgctagctaagttgggaggaggtggcagtaggtaggagagggtttccagaatggctgttgt

SEQ ID NO: 453743 - DNA, 4238 bp, Homo sapiens
gcggtgtgtggcaggcggcagcggcgctggcggccgagtgcgcttgtcacgcgtggcggtgcgtggttgctaggggcgcctgaggctgccgggtagcccagcaggccgagggaggaagtagcgtggagccggtgccgagccggggcgaagctggatcccctagatagactgtcttcaagctcactgatattttcctctgcttgatccattgtgctgttgagagcctctagtaaatttttcagactgacagacttcaaggatgcagctgctactaccggaggtgtgtggcaccttacctcagcaaggccatgagaccgtgtggccatgatgtgggcccctcatggcctcagcaggaacacagcactatagtattggcctccgccagaaaaacagcttcaagcagagtggtccctcaggcacagtacctgccacgccacctgagaaaccctcggagggcagagtctggcctcaggcccatcagcaagtgaagccaatctggaagctggaaaagaagcaagtggagacactgtcagcagggttgggcccaggcctcttgggcgtcccaccccagccagcatatttcttttgccccagcactttatgtagctctgggaccacggctgtcattgcaggccacagcagttcctgttacctacactctctcccggacttgttcaacagcaccctgctataccgccgctccagctataggcaaaaaccgtaccagcaactggagtctttctgcttgcgttcgagcccgtcagaaaaaagccctttttctctccctcaaaagagcctccctgtcagtctcactgccaacaaggccacttcttccatggtcttctccatggcccagcccatggcctcctcatccacagaaccatacctctgcttggcagcggctggggaaaacccttcagggaagagcctggcctctgccatctcagggaagatcccatctccactctcttcctcctataagcccatgctgaataataattccttcatgtggccaaatagcacgccagtgcctttattgcagaccacacagggcctgaagccagtatcgccacccaagatccagcctgtctcctggcatcattcagggggtactggagactgtgcaccgcagcctgttgaccataaggtgcccaaaagcattggcactgtcccagctgatgccagtgcccatatcgccttgtctaccgctagctcccacgacacatccaccaccagtgttgcctcttcctggtataaccggaataacttagccatgagggcagagccactttcctgtgctctggatgacagctctgattcccaggatccaactaaggagattcggttcactgaggccgtgaggaaattgaccgcaagaggctttgagaagatgccgaggcaaggctgccagcttgaacagtctagtttcctgaaccccagcttccagtggaatgtcctcaacaggagcaggcggtggaaacctcctgcggtaaatcagcagtttcctcaggaggatgctggatcggtcaggcgggtcctccctggtgcctcagataccttggggttggacaatacagtcttctgtaccaagcgtatcagcattcacctccttgcctcacatgccagtgggctcaatcacaaccctgcctgtgaatctgtaattgactcctcagcatttggagaaggcaaagctccaggtcccccttttcctcaaactcttggcatagccaacgtggccacccgcctctcttccatccagctgggccagtctgagaaggagagacctgaggaggccagggagctggactcatctgatagggatattagttcagctactgacctccagccagatcaggctgagactgaagatacagaagaagaactagtagatggtttggaagactgttgtagccgtgatgagaatgaagaggaggagggagactcagagtgctcctcattaagtgctgtctcccccagcgaatcggtggccatgatctctagaagctgtatggaaattctgaccaaacccctttccaatcatgagaaagttgtccgaccagccctcatctacagtctctttcccaacgttccccctaccatctattttggcactcgggatgagagagtggagaaacttccctgggagcagaggaagttgctccgatggaagatgagcacagtgacccccaacattgtcaagcagaccattggacggtcccacttcaaaatcagcaaaagaaacgatgactggctgggctgctggggtcaccacatgaagtctcctagtttccgatccattcgagagcatcagaagctaaaccatttcccaggctcattccagattgggaggaaggaccggctatggcggaacctgtcacgtatgcagagccgctttggcaagaaggagttcagtttcttcccccagtcctttatcctgccccaggacgccaagctcctgcgcaaagcgtgggagagcagcagccgccaaaagtggattgtgaagccaccagcatcagctcgaggcattggcatccaggttattcacaagtggagtcagctccccaagcgaaggcccctcctggtacagaggtatctacacaaaccctacctcatcagcggcagcaagtttgacctgcggatctatgtttatgtcacttcctacgatcctctgcggatttacctcttttcagatggactggtccgctttgccagttgcaagtattcgccttccatgaagagccttggcaataagttcatgcacctgaccaactacagtgtcaataaaaagaatgccgagtaccaggccaatgcagatgaaatggcttgccagggccacaaatgggcactgaaggctttgtggaactacctgagccagaagggagtcaatagcgacgccatctgggagaagataaaggatgttgttgtcaaaactatcatctcgtcagagccctatgtgaccagcctgctcaagatgtatgtgcgacggccctatagctgccatgaactctttggttttgacatcatgctagacgaaaacctcaagccctgggtcctggaagtcaacatttccccaagcctccactccagctctccactggatatcagcatcaaaggccagatgattcgtgaccttctgaatctggcaggttttgtcctgcccaatgcagaggatatcatttccagccccagcagctgcagcagctccaccaccagcctgcccacctcccctggggacaaatgtcgaatggctccagagcatgtcactgcacagaagatgaagaaagcctattatctgacccagaaaattcctgatcaggacttctatgcatctgtgctggatgtcctgacaccagatgatgttcggattctggttgagatggaagatgagttttctcgccgtggtcagtttgaacgaatttttccttctcatatctcctctcgctatctccgcttttttgagcagccacgatatttcaacattctcaccacccaatgggaacagaaataccatggcaacaagcttaaaggagtagatctgctccggagttggtgctacaaagggttccacatgggagttgtctctgattctgctccagtgtggtctctcccgacatcacttctgactatctcaaaggatgacgtgatactcaatgccttcagcaaatcagagactagcaagctgggaaaacaaagctcctgtgaggttagcctactactctctgaagacgggaccacgcccaaatccaagaagactcaagctggcctttccccttatccccagaaacccagttcctcaaaggacagtgaggacaccagcaaagagcccagcctttctacccagacgttacctgtgatcaagtgctctgggcagacttcaagactttctgcttcctccactttccagtcaatcagtgactccctcctggctgtgagcccataactggcctctctccaaaagcctctgcccaggagcatgggcatcagctacctcacgggaaccagcctgctgttcagaccagtctgaccccctacccctttcaccctgtccctcctcagagtattttttgaagtggttgcattatagagatgggtatttgtagggccggagggatggtagtgatggggagaaggtgaggaagggtcaccctctgtcacctgtctgcctggctggcacctcatatctcagcagagaagccagtggtggccacgcagccttataaagcaggttttggtttcta

SEQ ID NO: 453744 - DNA, 4189 bp, Homo sapiens
gcggtgtgtggcaggcggcagcggcgctggcggccgagtgcgcttgtcacgcgtggcggtgcgtggttgctaggggcgcctgaggctgccgggtagcccagcaggccgagggaggaagtagcgtggagccggtgccgagccggggcgaagctggatcccctagatagactgtcttcaagctcactgatattttcctctgcttgatccattgtgctgttgagagcctctagtaaatttttcagactgacagacttcaaggatgcagctgctactaccggaggtgtgtggcaccttacctcagcaggaacacagcactatagtattggcctccgccagaaaaacagcttcaagcagagtggtccctcaggcacagtacctgccacgccacctgagaaaccctcggagggcagagtctggcctcaggcccatcagcaagtgaagccaatctggaagctggaaaagaagcaagtggagacactgtcagcagggttgggcccaggcctcttgggcgtcccaccccagccagcatatttcttttgccccagcactttatgtagctctgggaccacggctgtcattgcaggccacagcagttcctgttacctacactctctcccggacttgttcaacagcaccctgctataccgccgctccagctataggcaaaaaccgtaccagcaactggagtctttctgcttgcgttcgagcccgtcagaaaaaagccctttttctctccctcaaaagagcctccctgtcagtctcactgccaacaaggccacttcttccatggtcttctccatggcccagcccatggcctcctcatccacagaaccatacctctgcttggcagcggctggggaaaacccttcagggaagagcctggcctctgccatctcagggaagatcccatctccactctcttcctcctataagcccatgctgaataataattccttcatgtggccaaatagcacgccagtgcctttattgcagaccacacagggcctgaagccagtatcgccacccaagatccagcctgtctcctggcatcattcagggggtactggagactgtgcaccgcagcctgttgaccataaggtgcccaaaagcattggcactgtcccagctgatgccagtgcccatatcgccttgtctaccgctagctcccacgacacatccaccaccagtgttgcctcttcctggtataaccggaataacttagccatgagggcagagccactttcctgtgctctggatgacagctctgattcccaggatccaactaaggagattcggttcactgaggccgtgaggaaattgaccgcaagaggctttgagaagatgccgaggcaaggctgccagcttgaacagtctagtttcctgaaccccagcttccagtggaatgtcctcaacaggagcaggcggtggaaacctcctgcggtaaatcagcagtttcctcaggaggatgctggatcggtcaggcgggtcctccctggtgcctcagataccttggggttggacaatacagtcttctgtaccaagcgtatcagcattcacctccttgcctcacatgccagtgggctcaatcacaaccctgcctgtgaatctgtaattgactcctcagcatttggagaaggcaaagctccaggtcccccttttcctcaaactcttggcatagccaacgtggccacccgcctctcttccatccagctgggccagtctgagaaggagagacctgaggaggccagggagctggactcatctgatagggatattagttcagctactgacctccagccagatcaggctgagactgaagatacagaagaagaactagtagatggtttggaagactgttgtagccgtgatgagaatgaagaggaggagggagactcagagtgctcctcattaagtgctgtctcccccagcgaatcggtggccatgatctctagaagctgtatggaaattctgaccaaacccctttccaatcatgagaaagttgtccgaccagccctcatctacagtctctttcccaacgttccccctaccatctattttggcactcgggatgagagagtggagaaacttccctgggagcagaggaagttgctccgatggaagatgagcacagtgacccccaacattgtcaagcagaccattggacggtcccacttcaaaatcagcaaaagaaacgatgactggctgggctgctggggtcaccacatgaagtctcctagtttccgatccattcgagagcatcagaagctaaaccatttcccaggctcattccagattgggaggaaggaccggctatggcggaacctgtcacgtatgcagagccgctttggcaagaaggagttcagtttcttcccccagtcctttatcctgccccaggacgccaagctcctgcgcaaagcgtgggagagcagcagccgccaaaagtggattgtgaagccaccagcatcagctcgaggcattggcatccaggttattcacaagtggagtcagctccccaagcgaaggcccctcctggtacagaggtatctacacaaaccctacctcatcagcggcagcaagtttgacctgcggatctatgtttatgtcacttcctacgatcctctgcggatttacctcttttcagatggactggtccgctttgccagttgcaagtattcgccttccatgaagagccttggcaataagttcatgcacctgaccaactacagtgtcaataaaaagaatgccgagtaccaggccaatgcagatgaaatggcttgccagggccacaaatgggcactgaaggctttgtggaactacctgagccagaagggagtcaatagcgacgccatctgggagaagataaaggatgttgttgtcaaaactatcatctcgtcagagccctatgtgaccagcctgctcaagatgtatgtgcgacggccctatagctgccatgaactctttggttttgacatcatgctagacgaaaacctcaagccctgggtcctggaagtcaacatttccccaagcctccactccagctctccactggatatcagcatcaaaggccagatgattcgtgaccttctgaatctggcaggttttgtcctgcccaatgcagaggatatcatttccagccccagcagctgcagcagctccaccaccagcctgcccacctcccctggggacaaatgtcgaatggctccagagcatgtcactgcacagaagatgaagaaagcctattatctgacccagaaaattcctgatcaggacttctatgcatctgtgctggatgtcctgacaccagatgatgttcggattctggttgagatggaagatgagttttctcgccgtggtcagtttgaacgaatttttccttctcatatctcctctcgctatctccgcttttttgagcagccacgatatttcaacattctcaccacccaatgggaacagaaataccatggcaacaagcttaaaggagtagatctgctccggagttggtgctacaaagggttccacatgggagttgtctctgattctgctccagtgtggtctctcccgacatcacttctgactatctcaaaggatgacgtgatactcaatgccttcagcaaatcagagactagcaagctgggaaaacaaagctcctgtgaggttagcctactactctctgaagacgggaccacgcccaaatccaagaagactcaagctggcctttccccttatccccagaaacccagttcctcaaaggacagtgaggacaccagcaaagagcccagcctttctacccagacgttacctgtgatcaagtgctctgggcagacttcaagactttctgcttcctccactttccagtcaatcagtgactccctcctggctgtgagcccataactggcctctctccaaaagcctctgcccaggagcatgggcatcagctacctcacgggaaccagcctgctgttcagaccagtctgaccccctacccctttcaccctgtccctcctcagagtattttttgaagtggttgcattatagagatgggtatttgtagggccggagggatggtagtgatggggagaaggtgaggaagggtcaccctctgtcacctgtctgcctggctggcacctcatatctcagcagagaagccagtggtggccacgcagccttataaagcaggttttggtttcta

SEQ ID NO: 453745 - DNA, 3752 bp, Homo sapiens
ctgtcaggtcttattagtaggtacgaaacagttgctcctccacctcaccccagccccatggagcttgctttttccaggccaccgtagtcctcaccactgccactttgcttcgaggtatctgaatttgagacccttgtccttcctgcgctgaccctcctctgcagctgccgcccctccctgtgtccttccaagaagtgccacatgcactgatctcttgtgtccccagatggtcatcatgggccagtgctactacaacgagacctgagcaagccatgcctggcttgctcaggtctctctccctcaaaagagcctccctgtcagtctcactgccaacaaggccacttcttccatggtcttctccatggcccagcccatggcctcctcatccacagaaccatacctctgcttggcagcggctggggaaaacccttcagggaagagcctggcctctgccatctcagggaagatcccatctccactctcttcctcctataagcccatgctgaataataattccttcatgtggccaaatagcacgccagtgcctttattgcagaccacacagggcctgaagccagtatcgccacccaagatccagcctgtctcctggcatcattcagggggtactggagactgtgcaccgcagcctgttgaccataaggtgcccaaaagcattggcactgtcccagctgatgccagtgcccatatcgccttgtctaccgctagctcccacgacacatccaccaccagtgttgcctcttcctggtataaccggaataacttagccatgagggcagagccactttcctgtgctctggatgacagctctgattcccaggatccaactaaggagattcggttcactgaggccgtgaggaaattgaccgcaagaggctttgagaagatgccgaggcaaggctgccagcttgaacagtctagtttcctgaaccccagcttccagtggaatgtcctcaacaggagcaggcggtggaaacctcctgcggtaaatcagcagtttcctcaggaggatgctggatcggtcaggcgggtcctccctggtgcctcagataccttggggttggacaatacagtcttctgtaccaagcgtatcagcattcacctccttgcctcacatgccagtgggctcaatcacaaccctgcctgtgaatctgtaattgactcctcagcatttggagaaggcaaagctccaggtcccccttttcctcaaactcttggcatagccaacgtggccacccgcctctcttccatccagctgggccagtctgagaaggagagacctgaggaggccagggagctggactcatctgatagggatattagttcagctactgacctccagccagatcaggctgagactgaagatacagaagaagaactagtagatggtttggaagactgttgtagccgtgatgagaatgaagaggaggagggagactcagagtgctcctcattaagtgctgtctcccccagcgaatcggtggccatgatctctagaagctgtatggaaattctgaccaaacccctttccaatcatgagaaagttgtccgaccagccctcatctacagtctctttcccaacgttccccctaccatctattttggcactcgggatgagagagtggagaaacttccctgggagcagaggaagttgctccgatggaagatgagcacagtgacccccaacattgtcaagcagaccattggacggtcccacttcaaaatcagcaaaagaaacgatgactggctgggctgctggggtcaccacatgaagtctcctagtttccgatccattcgagagcatcagaagctaaaccatttcccaggctcattccagattgggaggaaggaccggctatggcggaacctgtcacgtatgcagagccgctttggcaagaaggagttcagtttcttcccccagtcctttatcctgccccaggacgccaagctcctgcgcaaagcgtgggagagcagcagccgccaaaagtggattgtgaagccaccagcatcagctcgaggcattggcatccaggttattcacaagtggagtcagctccccaagcgaaggcccctcctggtacagaggtatctacacaaaccctacctcatcagcggcagcaagtttgacctgcggatctatgtttatgtcacttcctacgatcctctgcggatttacctcttttcagatggactggtccgctttgccagttgcaagtattcgccttccatgaagagccttggcaataagttcatgcacctgaccaactacagtgtcaataaaaagaatgccgagtaccaggccaatgcagatgaaatggcttgccagggccacaaatgggcactgaaggctttgtggaactacctgagccagaagggagtcaatagcgacgccatctgggagaagataaaggatgttgttgtcaaaactatcatctcgtcagagccctatgtgaccagcctgctcaagatgtatgtgcgacggccctatagctgccatgaactctttggttttgacatcatgctagacgaaaacctcaagccctgggtcctggaagtcaacatttccccaagcctccactccagctctccactggatatcagcatcaaaggccagatgattcgtgaccttctgaatctggcaggttttgtcctgcccaatgcagaggatatcatttccagccccagcagctgcagcagctccaccaccagcctgcccacctcccctggggacaaatgtcgaatggctccagagcatgtcactgcacagaagatgaagaaagcctattatctgacccagaaaattcctgatcaggacttctatgcatctgtgctggatgtcctgacaccagatgatgttcggattctggttgagatggaagatgagttttctcgccgtggtcagtttgaacgaatttttccttctcatatctcctctcgctatctccgcttttttgagcagccacgatatttcaacattctcaccacccaatgggaacagaaataccatggcaacaagcttaaaggagtagatctgctccggagttggtgctacaaagggttccacatgggagttgtctctgattctgctccagtgtggtctctcccgacatcacttctgactatctcaaaggatgacgtgatactcaatgccttcagcaaatcagagactagcaagctgggaaaacaaagctcctgtgaggttagcctactactctctgaagacgggaccacgcccaaatccaagaagactcaagctggcctttccccttatccccagaaacccagttcctcaaaggacagtgaggacaccagcaaagagcccagcctttctacccagacgttacctgtgatcaagtgctctgggcagacttcaagactttctgcttcctccactttccagtcaatcagtgactccctcctggctgtgagcccataactggcctctctccaaaagcctctgcccaggagcatgggcatcagctacctcacgggaaccagcctgctgttcagaccagtctgaccccctacccctttcaccctgtccctcctcagagtattttttgaagtggttgcattatagagatgggtatttgtagggccggagggatggtagtgatggggagaaggtgaggaagggtcaccctctgtcacctgtctgcctggctggcacctcatatctcagcagagaagccagtggtggccacgcagccttataaagcaggttttggtttcta

SEQ ID NO: 453746 - DNA, 4911 bp, Homo sapiens
gcggtgtgtggcaggcggcagcggcgctggcggccgagtgcgcttgtcacgcgtggcggtgcgtggttgctaggggcgcctgaggctgccgggtagcccagcaggccgagggaggaagtagcgtggagccggtgccgagccggggcgaagctggatcccctagatagactgtcttcaagctcactgatattttcctctgcttgatccattgtgctgttgagagcctctagtaaatttttcagactgacagacttcaaggatgcagctgctactaccggaggtgtgtggcaccttacctcagcaaggccatgagaccgtgtggccatgatgtgggcccctcatggcctcagcaggaacacagcactatagtattggcctccgccagaaaaacagcttcaagcagagtggtccctcaggcacagtacctgccacgccacctgagaaaccctcggagggcagagtctggcctcaggcccatcagcaagtgaagccaatctggaagctggaaaagaagcaagtggagacactgtcagcagggttgggcccaggcctcttgggcgtcccaccccagccagcatatttcttttgccccagcactttatgtagctctgggaccacggctgtcattgcaggccacagcagttcctgttacctacactctctcccggacttgttcaacagcaccctgctataccgccgctccagctataggcaaaaaccgtaccagcaactggagtctttctgcttgcgttcgagcccgtcagaaaaaagccctttttctctccctcaaaagagcctccctgtcagtctcactgccaacaaggccacttcttccatggtcttctccatggcccagcccatggcctcctcatccacagaaccatacctctgcttggcagcggctggggaaaacccttcagggaagagcctggcctctgccatctcagggaagatcccatctccactctcttcctcctataagcccatgctgaataataattccttcatgtggccaaatagcacgccagtgcctttattgcagaccacacagggcctgaagccagtatcgccacccaagatccagcctgtctcctggcatcattcagggggtactggagactgtgcaccgcagcctgttgaccataaggtgcccaaaagcattggcactgtcccagctgatgccagtgcccatatcgccttgtctaccgctagctcccacgacacatccaccaccagtgttgcctcttcctggtataaccggaataacttagccatgagggcagagccactttcctgtgctctggatgacagctctgattcccaggatccaactaaggagattcggttcactgaggccgtgaggaaattgaccgcaagaggctttgagaagatgccgaggcaaggctgccagcttgaacagtctagtttcctgaaccccagcttccagtggaatgtcctcaacaggagcaggcggtggaaacctcctgcggtaaatcagcagtttcctcaggaggatgctggatcggtcaggcgggtcctccctggtgcctcagataccttggggttggacaatacagtcttctgtaccaagcgtatcagcattcacctccttgcctcacatgccagtgggctcaatcacaaccctgcctgtgaatctgtaattgactcctcagcatttggagaaggcaaagctccaggtcccccttttcctcaaactcttggcatagccaacgtggccacccgcctctcttccatccagctgggccagtctgagaaggagagacctgaggaggccagggagctggactcatctgatagggatattagttcagctactgacctccagccagatcaggctgagactgaagatacagaagaagaactagtagatggtttggaagactgttgtagccgtgatgagaatgaagaggaggagggagactcagagtgctcctcattaagtgctgtctcccccagcgaatcggtggccatgatctctagaagctgtatggaaattctgaccaaacccctttccaatcatgagaaagttgtccgaccagccctcatctacagtctctttcccaacgttccccctaccatctattttggcactcgggatgagagagtggagaaacttccctgggagcagaggaagttgctccgatggaagatgagcacagtgacccccaacattgtcaagcagaccattggacggtcccacttcaaaatcagcaaaagaaacgatgactggctgggctgctggggtcaccacatgaagtctcctagtttccgatccattcgagagcatcagaagctaaaccatttcccaggctcattccagattgggaggaaggaccggctatggcggaacctgtcacgtatgcagagccgctttggcaagaaggagttcagtttcttcccccagtcctttatcctgccccaggacgccaagctcctgcgcaaagcgtgggagagcagcagccgccaaaagtggattgtgaagccaccagcatcagctcgaggcattggcatccaggttattcacaagtggagtcagctccccaagcgaaggcccctcctggtacagaggtatctacacaaaccctacctcatcagcggcagcaagtttgacctgcggatctatgtttatgtcacttcctacgatcctctgcggatttacctcttttcagatggactggtccgctttgccagttgcaagtattcgccttccatgaagagccttggcaataagttcatgcacctgaccaactacagtgtcaataaaaagaatgccgagtaccaggccaatgcagatgaaatggcttgccagggccacaaatgggcactgaaggctttgtggaactacctgagccagaagggagtcaatagcgacgccatctgggagaagataaaggatgttgttgtcaaaactatcatctcgtcagagccctatgtgaccagcctgctcaagatgtatgtgcgacggccctatagctgccatgaactctttggttttgacatcatgctagacgaaaacctcaagccctgggtcctggaagtcaacatttccccaagcctccactccagctctccactggatatcagcatcaaaggccagatgattcgtgaccttctgaatctggcaggttttgtcctgcccaatgcagaggatatcatttccagccccagcagctgcagcagctccaccaccagcctgcccacctcccctggggacaaatgtcgaatggctccagagcatgtcactgcacagaagatgaagaaagcctattatctgacccagaaaattcctgatcaggacttctatgcatctgtgctggatgtcctgacaccagatgatgttcggattctggttgagatggaagatgagttttctcgccgtggtcagtttgaacgaatttttccttctcatatctcctctcgctatctccgcttttttgagcagccacgatatttcaacattctcaccacccaatgggaacagaaataccatggcaacaagcttaaaggagtagatctgctccggagttggtgctacaaagggttccacatgggagttgtctctgattctgctccagtgtggtctctcccgacatcacttctgactatctcaaaggatgacgtgatactcaatgccttcagcaaatcagagactagcaagctgggaaaacaaagctcctgtgaggttagcctactactctctgaagacgggaccacgcccaaatccaagaagactcaagctggcctttccccttatccccagaaacccagttcctcaaaggacagtgaggacaccagcaaagagcccagcctttctacccagacgttacctgtgatcaagtgctctgggcagacttcaagactttctgcttcctccactttccagtcaatcagtgactccctcctggctgtgagcccataactggcctctgctgttcagaccagtctgaccccctacccctttcaccctgtccctcctcagagtattttttgaagtggttgcattatagagatgggtatttgtagggccggagggatggtagtgatggggagaaggtgaggaagggtcaccctctgtcacctgtctgcctggctggcacctcatatctcagcagagaagccagtggtggccacgcagccttataaagcaggttttggtttctaccttaagtgagccatgtgtggtttgtctgggggccctggtgtggttgctgagttgtagctcaagaggagaaaacatacagaacatatttggaccggaaatcctttgttctgaatttgagggggtcttctgaggtccttatttccttaggtctttcctcacccctctcccaccgctgtcctgaggagaaacccttgaacttcctcagtagacaggcggagaggccacaacatgccgaacccatttcctgtcatcctagtcttgggtcttcaccgcctccttccaaatacccaccctgccagcagccctaggtcttcctgttctgaccccccatcactgctcgttcagccttctagacgtctctctcgtggacatctgttctttagctgttggctttctctgaggtgtgagagggtctatgaactttgtgaatttcccatggccccagtgaaggagcccagataatcccagtagctgttacctgtctccatgtatcaaaggacacagtccagggggagggtggaaggagatgtggtttctctatagtgcaacaaacatggtttctcaatgttctgctgtgcagcaagcagggtctggcggcttggtaggtgggtttcaggagcagtcactattgtaggatgggcttccaatcaaacctcagactaaactcttgtactgaactgattctacctccctcctctagactcagtaaacagtgactattcaataaa

SEQ ID NO: 453747 - DNA, 2033 bp, Homo sapiens
ctctctctgtccctggactgagctgttagcaaggctgattcctgatgtacctcccataggaaacgatgactggctgggctgctggggtcaccacatgaagtctcctagtttccgatccattcgagagcatcagaagattgggaggaaggaccggctatggcggaacctgtcacgtatgcagagccgctttggcaagaaggagttcagtttcttcccccagtcctttatcctgccccaggacgccaagctcctgcgcaaagcgtgggagagcagcagccgccaaaagtggattgtgaagccaccagcatcagctcgaggcattggcatccaggttattcacaagtggagtcagctccccaagcgaaggcccctcctggtacagaggtatctacacaaaccctacctcatcagcggcagcaagtttgacctgcggatctatgtttatgtcacttcctacgatcctctgcggatttacctcttttcagatggactggtccgctttgccagttgcaagtattcgccttccatgaagagccttggcaataagttcatgcacctgaccaactacagtgtcaataaaaagaatgccgagtaccaggccaatgcagatgaaatggcttgccagggccacaaatgggcactgaaggctttgtggaactacctgagccagaagggagtcaatagcgacgccatctgggagaagataaaggatgttgttgtcaaaactatcatctcgtcagagccctatgtgaccagcctgctcaagatgtatgtgcgacggccctatagctgccatgaactctttggttttgacatcatgctagacgaaaacctcaagccctgggtcctggaagtcaacatttccccaagcctccactccagctctccactggatatcagcatcaaaggccagatgattcgtgaccttctgaatctggcaggttttgtcctgcccaatgcagaggatatcatttccagccccagcagctgcagcagctccaccaccagcctgcccacctcccctggggacaaatgtcgaatggctccagagcatgtcactgcacagaagatgaagaaagcctattatctgacccagaaaattcctgatcaggacttctatgcatctgtgctggatgtcctgacaccagatgatgttcggattctggttgagatggaagatgagttttctcgccgtggtcagtttgaacgaatttttccttctcatatctcctctcgctatctccgcttttttgagcagccacgatatttcaacattctcaccacccaatgggaacagaaataccatggcaacaagcttaaaggagtagatctgctccggagttggtgctacaaagggttccacatgggagttgtctctgattctgctccagtgtggtctctcccgacatcacttctgactatctcaaaggatgacgtgatactcaatgccttcagcaaatcagagactagcaagctgggaaaacaaagctcctgtgaggttagcctactactctctgaagacgggaccacgcccaaatccaagaagactcaagctggcctttccccttatccccagaaacccagttcctcaaaggacagtgaggacaccagcaaagagcccagcctttctacccagacgttacctgtgatcaagtgctctgggcagacttcaagactttctgcttcctccactttccagtcaatcagtgactccctcctggctgtgagcccataactggcctctctccaaaagcctctgcccaggagcatgggcatcagctacctcacgggaaccagcctgctgttcagaccagtctgaccccctacccctttcaccctgtccctcctcagagtattttttgaagtggttgcattatagagatgggtatttgtagggccggagggatggtagtgatggggagaaggtgaggaagggtcaccctctgtcacctgtctgcctggctggcacctcatatctcagcagagaagccagtggtggccacgcagccttataaagcaggttttggtttcta

SEQ ID NO: 453748 - DNA, 561 bp, Homo sapiens
taaatgaatgtttttctttgtaatcagaaaaaaaagcctcgaagaaacactttttcttatgtatacaacagaactgcatgcacttagtggagttttatgggcatattctgtgatgttgagtgtctagtctataaaagacagggggcttggggaacctttgaatgcccccattggttttggagaggtggtgagacttttgggctcaagtgatggctagctgtgatattaactgtctttattgatttacagaagctaccaatggtgcggtgccccagggccagcgaccaccgcctcgtatcaagaatttccagataaacaaccagattgtgaaactgaaatactgttacacatgcaagatcttccggcctccccgggcctcccattgcagcatctgtgacaactgtgtgggtgagtaaaactacggggacattgcctagggaaaaggctgagttgaactagaaagtcagggtggtcaccaattttgggaggagggaagatagatttagatgagaaatgaactagatttagatagggaaatttagataggcaacaagctcctga

SEQ ID NO: 453749 - DNA, 2948 bp, Homo sapiens
cgacctggtgacgtgaggagcgttccatttggccagtggtgggcggttgccacagctggtttagggccccgaccactggggccccttgtcaggaggagacagcctcccggcccggggaggacaagtcgctgccacctttggctgccgacgtgattccctgggacggtccgtttcctgccgtcagctgccggccgagttgggtctccgtggttcaggccggctcccccttcctggtctcccttctcccgctgggccggtttatcgggaggagattgtcttccagggctagcaattggacttttgatgatgtttgacccagcggcaggaatagcaggcaacgtgatttcaaagctgggctcagcctctgtttcttctctcgtgtaatcgcaaaacccattttggagcaggaattccaatcatgtctgtgatggtggtgagaaagaaggtgacacggaaatgggagaaactcccaggcaggaacaccttttgctgtgatggccgcgtcatgatggcccggcaaaagggcattttctacctgacccttttcctcatcctggggacatgtacactcttcttcgcctttgagtgccgctacctggctgttcagctgtctcctgccatccctgtatttgctgccatgctcttccttttctccatggctacactgttgaggaccagcttcagtgaccctggagtgattcctcgggcgctaccagatgaagcagctttcatagaaatggagatagaagctaccaatggtgcggtgccccagggccagcgaccaccgcctcgtatcaagaatttccagataaacaaccagattgtgaaactgaaatactgttacacatgcaagatcttccggcctccccgggcctcccattgcagcatctgtgacaactgtgtggagcgcttcgaccatcactgcccctgggtggggaattgtgttggaaagaggaactaccgctacttctacctcttcatcctttctctctccctcctcacaatctatgtcttcgccttcaacatcgtctatgtggccctcaaatctttgaaaattggcttcttggagacattgaaagaaactcctggaactgttctagaagtcctcatttgcttctttacactctggtccgtcgtgggactgactggatttcatactttcctcgtggctctcaaccagacaaccaatgaagacatcaaaggatcatggacagggaagaatcgcgtccagaatccctacagccatggcaatattgtgaagaactgctgtgaagtgctgtgtggccccttgccccccagtgtgctggatcgaaggggtattttgccactggaggaaagtggaagtcgacctcccagtactcaagagaccagtagcagcctcttgccacagagcccagcccccacagaacacctgaactcaaatgagatgccggaggacagcagcactcccgaagagatgccacctccagagcccccagagccaccacaggaggcagctgaagctgagaagtagcctatctatggaagagacttttgtttgtgtttaattagggctatgagagatttcaggtgagaagttaaacctgagacagagagcaagtaagctgtcccttttaactgtttttctttggtctttagtcacccagttgcacactggcattttcttgctgcaagcttttttaaatttctgaactcaaggcagtggcagaagatgtcagtcacctctgataactggaaaaatgggtctcttgggccctggcactggttctccatggcctcagccacagggtccccttggaccccctctcttccctccagatcccagccctcctgcttggggtcactggtctcattctggggctaaaagtttttgagactggctcaaatcctcccaagctgctgcacgtgctgagtccagaggcagtcacagagacctctggccaggggatcctaactgggttcttggggtcttcaggactgaagaggagggagagtggggtcagaagattctcctggccaccaagtgccagcattgcccacaaatccttttaggaatgggacaggtaccttccacttgttgtatttattagtgtagcttctcctttgtctcccatccactctgacacctaagccccactcttttcccattagatatatgtaagtagttgtagtagagataataattgacatttctcgtagactacccagaaacttttttaatacctgtgccattctcaataagaatttatgagatgccagcggcatagcccttcacactctctgtctcatctctcctcctttctcattagccccttttaatttgtttttccttttgactcctgctcccattaggagcaggaatggcagtaataaaagtctgcactttggtcatttcttttcctcagaggaagcctgagtgctcacttaaacactatcccctcagactccctgtgtgaggcctgcagaggccctgaatgcacaaatgggaaaccaaggcacagagaggctctcctctcctctcctctcccccgatgtaccctcaaaaaaaaaaaaaatgctaaccagttcttccattaagcctcggctgagtgagggaaagcccagcactgctgccctctcgggtaactcaccctaaggcctcggcccacctctggctatggtaaccacactgggggcttcctccaagccccgctcttccagcacttccaccggcagagtcccagagccacttcaccctgggggtgggctgtggcccccagtcagctctgctcaggacctgctctatttcagggaagaagatttatgtattatatgtggctatatttcctagagcacctgtgttttcctctttctaagccagggtcctgtctggatgacttatgcggtgggggagtgtaaaccggaacttttcatctatttgaaggcgattaaactgtgtctaatgcaaa

SEQ ID NO: 453750 - DNA, 4599 bp, Homo sapiens
cgacctggtgacgtgaggagcgttccatttggccagtggtgggcggttgccacagctggtttagggccccgaccactggggccccttgtcaggaggagacagcctcccggcccggggaggacaagtcgctgccacctttggctgccgacgtgattccctgggacggtccgtttcctgccgtcagctgccggccgagttgggtctccgtggttcaggccggctcccccttcctggtctcccttctcccgctgggccggtttatcgggaggagattgtcttccagggctagcaattggacttttgatgatgtttgacccagcggcaggaatagcaggcaacgtgatttcaaagctgggctcagcctctgtttcttctctcgtgtaatcgcaaaacccattttggagcaggaattccaatcatgtctgtgatggtggtgagaaagaaggtgacacggaaatgggagaaactcccaggcaggaacaccttttgctgtgatggccgcgtcatgatggcccggcaaaagggcattttctacctgacccttttcctcatcctggggacatgtacactcttcttcgcctttgagtgccgctacctggctgttcagctgtctcctgccatccctgtatttgctgccatgctcttccttttctccatggctacactgttgaggaccagcttcagtgaccctggagtgattcctcgggcgctaccagatgaagcagctttcatagaaatggagatagaagctaccaatggtgcggtgccccagggccagcgaccaccgcctcgtatcaagaatttccagataaacaaccagattgtgaaactgaaatactgttacacatgcaagatcttccggcctccccgggcctcccattgcagcatctgtgacaactgtgtggagcgcttcgaccatcactgcccctgggtggggaattgtgttggaaagaggaactaccgctacttctacctcttcatcctttctctctccctcctcacaatctatgtcttcgccttcaacatcgtctatgtggccctcaaatctttgaaaattggcttcttggagacattgaaagaaactcctggaactgttctagaagtcctcatttgcttctttacactctggtccgtcgtgggactgactggatttcatactttcctcgtggctctcaaccagacaaccaatgaagacatcaaaggatcatggacagggaagaatcgcgtccagaatccctacagccatggcaatattgtgaagaactgctgtgaagtgctgtgtggccccttgccccccagtgtgctggatcgaaggggtattttgccactggaggaaagtggaagtcgacctcccagtactcaagagaccagtagcagcctcttgccacagagcccagcccccacagaacacctgaactcaaatgagatgccggaggacagcagcactcccgaagagatgccacctccagagcccccagagccaccacaggaggcagctgaagctgagaagtagcctatctatggaagagacttttgtttgtgtttaattagggctatgagagatttcaggtgagaagttaaacctgagacagagagcaagtaagctgtcccttttaactgtttttctttggtctttagtcacccagttgcacactggcattttcttgctgcaagcttttttaaatttctgaactcaaggcagtggcagaagatgtcagtcacctctgataactggaaaaatgggtctcttgggccctggcactggttctccatggcctcagccacagggtccccttggaccccctctcttccctccagatcccagccctcctgcttggggtcactggtctcattctggggctaaaagtttttgagactggctcaaatcctcccaagctgctgcacgtgctgagtccagaggcagtcacagagacctctggccaggggatcctaactgggttcttggggtcttcaggactgaagaggagggagagtggggtcagaagattctcctggccaccaagtgccagcattgcccacaaatccttttaggaatgggacaggtaccttccacttgttgtatttattagtgtagcttctcctttgtctcccatccactctgacacctaagccccactcttttcccattagatatatgtaagtagttgtagtagagataataattgacatttctcgtagactacccagaaacttttttaatacctgtgccattctcaataagaatttatgagatgccagcggcatagcccttcacactctctgtctcatctctcctcctttctcattagccccttttaatttgtttttccttttgactcctgctcccattaggagcaggaatggcagtaataaaagtctgcactttggtcatttcttttcctcagaggaagcctgagtgctcacttaaacactatcccctcagactccctgtgtgaggcctgcagaggccctgaatgcacaaatgggaaaccaaggcacagagaggctctcctctcctctcctctcccccgatgtaccctcaaaaaaaaaaaaaatgctaaccagttcttccattaagcctcggctgagtgagggaaagcccagcactgctgccctctcgggtaactcaccctaaggcctcggcccacctctggctatggtaaccacactgggggcttcctccaagccccgctcttccagcacttccaccggcagagtcccagagccacttcaccctgggggtgggctgtggcccccagtcagctctgctcaggacctgctctatttcagggaagaagatttatgtattatatgtggctatatttcctagagcacctgtgttttcctctttctaagccagggtcctgtctggatgacttatgcggtgggggagtgtaaaccggaacttttcatctatttgaaggcgattaaactgtgtctaatgcaaacttcctgcctcctccttcccccttccatttcaagaatatgtttgtgtgtagggtgggggtgggggttggaaggggttgcttgttactccccaaacttccattaaccagggcacccttgggttggagaggtagttccaaactctccattgatctatactacattctgggctgaaggttttcttattctggactatgaagaaaggactttcaaggagatatagtgtgaacaggatcaggaaggtagagggattatatttacttaagagaacaagctctatattaggatattgttttgaagcagatggatgccgttaattgctaataagtcttagttattaacgcaggctcatcagggcccccccttggaaatatttgatcagtggtcttttacaagtgatggtatatatttctttctaggtggtgtataatcaagactccctatcaattcccatctcatacttcccagttaattggaattaatgaaatttggctgctcccagacctttttccatgtcttcctttttccttttaacaggatttaagttgagcattcttgagagagagagagagagagagattggaagagagatggggagagactgactcagatccctctcctgtctgcttctttttctggttctctcagttttttttcttgaagttataaagccaaacctggagaatttgtaagttgttaggtttccccaggtaacttggcactcatatgaaccccattttaataagtactcagcccatctcctctcctgggctcagatggctctctctcctccctcaccttacctcaagtgttctcctgaggacccttaggtcagacagagaagctttctctttctgatgggaagggtcaaagtggaaatctcttatctctagtgtgaaatgattttctgctttttcatactccctgccctctttcttttccttaataaatcttccatgtttaagatgttggcctgaagatctgtcccattcataccatgcaccagctgggactgtccctatctgatcagaggggagattaaagaatcaatgttcccaggggaaaagggccttaaattgtttggtcttttcaatggctgacactgtctccaactctccccttcctccttcttcctcaagcttcctatgcaccctactttcccaggccaggatggttggcactgatcccaaacctctgggggcaggtggaaattggctgtggtgagccatttcttcatgtccattcagctctgaggccttcctggccctagctgagatcatcatctcctcctttgcttttaccccaggagtgaggttgggttagaggtggattctgattccgtagcagctaaattccattctccctgtcctgaccatcctgcctttacccataaagcacccgttcctactgaccaaatctctttactttgttggagaaaaaaagtattttgtttttaaatctattttctaatttaaatgcaatttaatatgtaaatctctgcacttttgtgtgagcctacaaatgtgtatgtgttgggggtttttcactctctggtatttcttaataaagaaatctttcttttggggggaagccaattaatgaaggagccttgaatggttttagaaatacagggctgtctgtttctttgtgaat

SEQ ID NO: 453751 - DNA, 4645 bp, Homo sapiens
cgacctggtgacgtgaggagcgttccatttggccagtggtgggcggttgccacagctggtttagggccccgaccactggggccccttgtcaggaggagacagcctcccggcccggggaggacaagtcgctgccacctttggctgccgacgtgattccctgggacggtccgtttcctgccgtcagctgccggccgagttgggtctccgtggttcaggccggctcccccttcctggtctcccttctcccgctgggccggtttatcgggaggagattgtcttccagggctagcaattggacttttgatgatgtttgacccagcggcaggaatagcaggcaacgtgatttcaaagctgggctcagcctctgtttcttctctcgtgtaatcgcaaaacccattttggagcaggaattccaatcatgtctgtgatggtggtgagaaagaaggtgacacggaaatgggagaaactcccaggcaggaacaccttttgctgtgatggccgcgtcatgatggcccggcaaaagggcattttctacctgacccttttcctcatcctggggacatgtacactcttcttcgcctttgagtgccgctacctggctgttcagctgtctcctgccatccctgtatttgctgccatgctcttccttttctccatggctacactgttgaggaccagcttcagtgaccctggagtgattcctcgggcgctaccagatgaagcagctttcatagaaatggagatagaagctaccaatggtgcggtgccccagggccagcgaccaccgcctcgtatcaagaatttccagataaacaaccagattgtgaaactgaaatactgttacacatgcaagatcttccggcctccccgggcctcccattgcagcatctgtgacaactgtgtggagcgcttcgaccatcactgcccctgggtggggaattgtgttggaaagaggaactaccgctacttctacctcttcatcctttctctctccctcctcacaatctatgtcttcgccttcaacatcgtctatgtggccctcaaatctttgaaaattggcttcttggagacattgaaagaaactcctggaactgttctagaagtcctcatttgcttctttacactctggtccgtcgtgggactgactggatttcatactttcctcgtggctctcaaccagacaaccaatgaagacatcaaaggatcatggacagggaagaatcgcgtccagaatccctacagccatggcaatattgtgaagaactgctgtgaagtgctgtgtggccccttgccccccagtgtgctggatcgaaggggtattttgccactggaggaaagtggaagtcgacctcccagtactcaagagaccagtagcagcctcttgccacagagcccagcccccacagaacacctgaactcaaatgagatgccggaggacagcagcactcccgaagagatgccacctccagagcccccagagccaccacaggaggcagctgaagctgagaagtagcctatctatggaagagacttttgtttgtgtttaattagggctatgagagatttcaggtgagaagttaaacctgagacagagagcaagtaagctgtcccttttaactgtttttctttggtctttagtcacccagttgcacactggcattttcttgctgcaagcttttttaaatttctgaactcaaggcagtggcagaagatgtcagtcacctctgataactggaaaaatgggtctcttgggccctggcactggttctccatggcctcagccacagggtccccttggaccccctctcttccctccagatcccagccctcctgcttggggtcactggtctcattctggggctaaaagtttttgagactggctcaaatcctcccaagctgctgcacgtgctgagtccagaggcagtcacagagacctctggccaggggatcctaactgggttcttggggtcttcaggactgaagaggagggagagtggggtcagaagattctcctggccaccaagtgccagcattgcccacaaatccttttaggaatgggacaggtaccttccacttgttgtatttattagtgtagcttctcctttgtctcccatccactctgacacctaagccccactcttttcccattagatatatgtaagtagttgtagtagagataataattgacatttctcgtagactacccagaaacttttttaatacctgtgccattctcaataagaatttatgagatgccagcggcatagcccttcacactctctgtctcatctctcctcctttctcattagccccttttaatttgtttttccttttgactcctgctcccattaggagcaggaatggcagtaataaaagtctgcactttggtcatttcttttcctcagaggaagcctgagtgctcacttaaacactatcccctcagactccctgtgtgaggcctgcagaggccctgaatgcacaaatgggaaaccaaggcacagagaggctctcctctcctctcctctcccccgatgtaccctcaaaaaaaaaaaaaatgctaaccagttcttccatttaagcctcggctgagtgagggaaagcccagcactgctgccctcattaagcctcggctgagtgagggaaagcccagcactgctgccctctcgggtaactcaccctaaggcctcggcccacctctggctatggtaaccacactgggggcttcctccaagccccgctcttccagcacttccaccggcagagtcccagagccacttcaccctgggggtgggctgtggcccccagtcagctctgctcaggacctgctctatttcagggaagaagatttatgtattatatgtggctatatttcctagagcacctgtgttttcctctttctaagccagggtcctgtctggatgacttatgcggtgggggagtgtaaaccggaacttttcatctatttgaaggcgattaaactgtgtctaatgcaaacttcctgcctcctccttcccccttccatttcaagaatatgtttgtgtgtagggtgggggtgggggttggaaggggttgcttgttactccccaaacttccattaaccagggcacccttgggttggagaggtagttccaaactctccattgatctatactacattctgggctgaaggttttcttattctggactatgaagaaaggactttcaaggagatatagtgtgaacaggatcaggaaggtagagggattatatttacttaagagaacaagctctatattaggatattgttttgaagcagatggatgccgttaattgctaataagtcttagttattaacgcaggctcatcagggcccccccttggaaatatttgatcagtggtcttttacaagtgatggtatatatttctttctaggtggtgtataatcaagactccctatcaattcccatctcatacttcccagttaattggaattaatgaaatttggctgctcccagacctttttccatgtcttcctttttccttttaacaggatttaagttgagcattcttgagagagagagagagagagagattggaagagagatggggagagactgactcagatccctctcctgtctgcttctttttctggttctctcagttttttttcttgaagttataaagccaaacctggagaatttgtaagttgttaggtttccccaggtaacttggcactcatatgaaccccattttaataagtactcagcccatctcctctcctgggctcagatggctctctctcctccctcaccttacctcaagtgttctcctgaggacccttaggtcagacagagaagctttctctttctgatgggaagggtcaaagtggaaatctcttatctctagtgtgaaatgattttctgctttttcatactccctgccctctttcttttccttaataaatcttccatgtttaagatgttggcctgaagatctgtcccattcataccatgcaccagctgggactgtccctatctgatcagaggggagattaaagaatcaatgttcccaggggaaaagggccttaaattgtttggtcttttcaatggctgacactgtctccaactctccccttcctccttcttcctcaagcttcctatgcaccctactttcccaggccaggatggttggcactgatcccaaacctctgggggcaggtggaaattggctgtggtgagccatttcttcatgtccattcagctctgaggccttcctggccctagctgagatcatcatctcctcctttgcttttaccccaggagtgaggttgggttagaggtggattctgattccgtagcagctaaattccattctccctgtcctgaccatcctgcctttacccataaagcacccgttcctactgaccaaatctctttactttgttggagaaaaaaagtattttgtttttaaatctattttctaatttaaatgcaatttaatatgtaaatctctgcacttttgtgtgagcctacaaatgtgtatgtgttgggggtttttcactctctggtatttcttaataaagaaatctttcttttggggggaagccaattaatgaaggagccttgaatggttttagaaatacagggctgtctgtttctttgtgaat

SEQ ID NO: 453752 - DNA, 2952 bp, Homo sapiens
ggcgtgtgtgagtgtgtacgagcgtgtggctgcgtgtgcgtgtggatgtggcgcgcgtcccaacctgcctggggcggtggtccgcggcgtggcggagtcagggcgggcctcgagaggccgcgcccgcggctcggccccggactccggcctccggcctccggccccccgctggggagccggtcgctgcttcccgacggattttgatctttgttcttccaggccggctcccccttcctggtctcccttctcccgctgggccggtttatcgggaggagattgtcttccagggctagcaattggacttttgatgatgtttgacccagcggcaggaatagcaggcaacgtgatttcaaagctgggctcagcctctgtttcttctctcgtgtaatcgcaaaacccattttggagcaggaattccaatcatgtctgtgatggtggtgagaaagaaggtgacacggaaatgggagaaactcccaggcaggaacaccttttgctgtgatggccgcgtcatgatggcccggcaaaagggcattttctacctgacccttttcctcatcctggggacatgtacactcttcttcgcctttgagtgccgctacctggctgttcagctgtctcctgccatccctgtatttgctgccatgctcttccttttctccatggctacactgttgaggaccagcttcagtgaccctggagtgattcctcgggcgctaccagatgaagcagctttcatagaaatggagatagaagctaccaatggtgcggtgccccagggccagcgaccaccgcctcgtatcaagaatttccagataaacaaccagattgtgaaactgaaatactgttacacatgcaagatcttccggcctccccgggcctcccattgcagcatctgtgacaactgtgtggagcgcttcgaccatcactgcccctgggtggggaattgtgttggaaagaggaactaccgctacttctacctcttcatcctttctctctccctcctcacaatctatgtcttcgccttcaacatcgtctatgtggccctcaaatctttgaaaattggcttcttggagacattgaaagaaactcctggaactgttctagaagtcctcatttgcttctttacactctggtccgtcgtgggactgactggatttcatactttcctcgtggctctcaaccagacaaccaatgaagacatcaaaggatcatggacagggaagaatcgcgtccagaatccctacagccatggcaatattgtgaagaactgctgtgaagtgctgtgtggccccttgccccccagtgtgctggatcgaaggggtattttgccactggaggaaagtggaagtcgacctcccagtactcaagagaccagtagcagcctcttgccacagagcccagcccccacagaacacctgaactcaaatgagatgccggaggacagcagcactcccgaagagatgccacctccagagcccccagagccaccacaggaggcagctgaagctgagaagtagcctatctatggaagagacttttgtttgtgtttaattagggctatgagagatttcaggtgagaagttaaacctgagacagagagcaagtaagctgtcccttttaactgtttttctttggtctttagtcacccagttgcacactggcattttcttgctgcaagcttttttaaatttctgaactcaaggcagtggcagaagatgtcagtcacctctgataactggaaaaatgggtctcttgggccctggcactggttctccatggcctcagccacagggtccccttggaccccctctcttccctccagatcccagccctcctgcttggggtcactggtctcattctggggctaaaagtttttgagactggctcaaatcctcccaagctgctgcacgtgctgagtccagaggcagtcacagagacctctggccaggggatcctaactgggttcttggggtcttcaggactgaagaggagggagagtggggtcagaagattctcctggccaccaagtgccagcattgcccacaaatccttttaggaatgggacaggtaccttccacttgttgtatttattagtgtagcttctcctttgtctcccatccactctgacacctaagccccactcttttcccattagatatatgtaagtagttgtagtagagataataattgacatttctcgtagactacccagaaacttttttaatacctgtgccattctcaataagaatttatgagatgccagcggcatagcccttcacactctctgtctcatctctcctcctttctcattagccccttttaatttgtttttccttttgactcctgctcccattaggagcaggaatggcagtaataaaagtctgcactttggtcatttcttttcctcagaggaagcctgagtgctcacttaaacactatcccctcagactccctgtgtgaggcctgcagaggccctgaatgcacaaatgggaaaccaaggcacagagaggctctcctctcctctcctctcccccgatgtaccctcaaaaaaaaaaaaaatgctaaccagttcttccattaagcctcggctgagtgagggaaagcccagcactgctgccctctcgggtaactcaccctaaggcctcggcccacctctggctatggtaaccacactgggggcttcctccaagccccgctcttccagcacttccaccggcagagtcccagagccacttcaccctgggggtgggctgtggcccccagtcagctctgctcaggacctgctctatttcagggaagaagatttatgtattatatgtggctatatttcctagagcacctgtgttttcctctttctaagccagggtcctgtctggatgacttatgcggtgggggagtgtaaaccggaacttttcatctatttgaaggcgattaaactgtgtctaatgcaaa

SEQ ID NO: 453753 - DNA, 2756 bp, Homo sapiens
cgacctggtgacgtgaggagcgttccatttggccagtggtgggcggttgccacagctggtttagggccccgaccactggggccccttgtcaggaggagacagcctcccggcccggggaggacaagtcgctgccacctttggctgccgacgtgattccctgggacggtccgtttcctgccgtcagctgccggccgagttgggtctccgtggttcaggaattccaatcatgtctgtgatggtggtgagaaagaaggtgacacggaaatgggagaaactcccaggcaggaacaccttttgctgtgatggccgcgtcatgatggcccggcaaaagggcattttctacctgacccttttcctcatcctggggacatgtacactcttcttcgcctttgagtgccgctacctggctgttcagctgtctcctgccatccctgtatttgctgccatgctcttccttttctccatggctacactgttgaggaccagcttcagtgaccctggagtgattcctcgggcgctaccagatgaagcagctttcatagaaatggagatagaagctaccaatggtgcggtgccccagggccagcgaccaccgcctcgtatcaagaatttccagataaacaaccagattgtgaaactgaaatactgttacacatgcaagatcttccggcctccccgggcctcccattgcagcatctgtgacaactgtgtggagcgcttcgaccatcactgcccctgggtggggaattgtgttggaaagaggaactaccgctacttctacctcttcatcctttctctctccctcctcacaatctatgtcttcgccttcaacatcgtctatgtggccctcaaatctttgaaaattggcttcttggagacattgaaagaaactcctggaactgttctagaagtcctcatttgcttctttacactctggtccgtcgtgggactgactggatttcatactttcctcgtggctctcaaccagacaaccaatgaagacatcaaaggatcatggacagggaagaatcgcgtccagaatccctacagccatggcaatattgtgaagaactgctgtgaagtgctgtgtggccccttgccccccagtgtgctggatcgaaggggtattttgccactggaggaaagtggaagtcgacctcccagtactcaagagaccagtagcagcctcttgccacagagcccagcccccacagaacacctgaactcaaatgagatgccggaggacagcagcactcccgaagagatgccacctccagagcccccagagccaccacaggaggcagctgaagctgagaagtagcctatctatggaagagacttttgtttgtgtttaattagggctatgagagatttcaggtgagaagttaaacctgagacagagagcaagtaagctgtcccttttaactgtttttctttggtctttagtcacccagttgcacactggcattttcttgctgcaagcttttttaaatttctgaactcaaggcagtggcagaagatgtcagtcacctctgataactggaaaaatgggtctcttgggccctggcactggttctccatggcctcagccacagggtccccttggaccccctctcttccctccagatcccagccctcctgcttggggtcactggtctcattctggggctaaaagtttttgagactggctcaaatcctcccaagctgctgcacgtgctgagtccagaggcagtcacagagacctctggccaggggatcctaactgggttcttggggtcttcaggactgaagaggagggagagtggggtcagaagattctcctggccaccaagtgccagcattgcccacaaatccttttaggaatgggacaggtaccttccacttgttgtatttattagtgtagcttctcctttgtctcccatccactctgacacctaagccccactcttttcccattagatatatgtaagtagttgtagtagagataataattgacatttctcgtagactacccagaaacttttttaatacctgtgccattctcaataagaatttatgagatgccagcggcatagcccttcacactctctgtctcatctctcctcctttctcattagccccttttaatttgtttttccttttgactcctgctcccattaggagcaggaatggcagtaataaaagtctgcactttggtcatttcttttcctcagaggaagcctgagtgctcacttaaacactatcccctcagactccctgtgtgaggcctgcagaggccctgaatgcacaaatgggaaaccaaggcacagagaggctctcctctcctctcctctcccccgatgtaccctcaaaaaaaaaaaaaatgctaaccagttcttccattaagcctcggctgagtgagggaaagcccagcactgctgccctctcgggtaactcaccctaaggcctcggcccacctctggctatggtaaccacactgggggcttcctccaagccccgctcttccagcacttccaccggcagagtcccagagccacttcaccctgggggtgggctgtggcccccagtcagctctgctcaggacctgctctatttcagggaagaagatttatgtattatatgtggctatatttcctagagcacctgtgttttcctctttctaagccagggtcctgtctggatgacttatgcggtgggggagtgtaaaccggaacttttcatctatttgaaggcgattaaactgtgtctaatgcaaa

SEQ ID NO: 453754 - DNA, 2578 bp, Homo sapiens
cgacctggtgacgtgaggagcgttccatttggccagtggtgggcggttgccacagctggtttagggccccgaccactggggccccttgtcaggaggagacagcctcccggcccggggaggacaagtcgctgccacctttggctgccgacgtgattccctgggacggtccgtttcctgccgtcagctgccggccgagttgggtctccgtggttcaggtgccgctacctggctgttcagctgtctcctgccatccctgtatttgctgccatgctcttccttttctccatggctacactgttgaggaccagcttcagtgaccctggagtgattcctcgggcgctaccagatgaagcagctttcatagaaatggagatagaagctaccaatggtgcggtgccccagggccagcgaccaccgcctcgtatcaagaatttccagataaacaaccagattgtgaaactgaaatactgttacacatgcaagatcttccggcctccccgggcctcccattgcagcatctgtgacaactgtgtggagcgcttcgaccatcactgcccctgggtggggaattgtgttggaaagaggaactaccgctacttctacctcttcatcctttctctctccctcctcacaatctatgtcttcgccttcaacatcgtctatgtggccctcaaatctttgaaaattggcttcttggagacattgaaagaaactcctggaactgttctagaagtcctcatttgcttctttacactctggtccgtcgtgggactgactggatttcatactttcctcgtggctctcaaccagacaaccaatgaagacatcaaaggatcatggacagggaagaatcgcgtccagaatccctacagccatggcaatattgtgaagaactgctgtgaagtgctgtgtggccccttgccccccagtgtgctggatcgaaggggtattttgccactggaggaaagtggaagtcgacctcccagtactcaagagaccagtagcagcctcttgccacagagcccagcccccacagaacacctgaactcaaatgagatgccggaggacagcagcactcccgaagagatgccacctccagagcccccagagccaccacaggaggcagctgaagctgagaagtagcctatctatggaagagacttttgtttgtgtttaattagggctatgagagatttcaggtgagaagttaaacctgagacagagagcaagtaagctgtcccttttaactgtttttctttggtctttagtcacccagttgcacactggcattttcttgctgcaagcttttttaaatttctgaactcaaggcagtggcagaagatgtcagtcacctctgataactggaaaaatgggtctcttgggccctggcactggttctccatggcctcagccacagggtccccttggaccccctctcttccctccagatcccagccctcctgcttggggtcactggtctcattctggggctaaaagtttttgagactggctcaaatcctcccaagctgctgcacgtgctgagtccagaggcagtcacagagacctctggccaggggatcctaactgggttcttggggtcttcaggactgaagaggagggagagtggggtcagaagattctcctggccaccaagtgccagcattgcccacaaatccttttaggaatgggacaggtaccttccacttgttgtatttattagtgtagcttctcctttgtctcccatccactctgacacctaagccccactcttttcccattagatatatgtaagtagttgtagtagagataataattgacatttctcgtagactacccagaaacttttttaatacctgtgccattctcaataagaatttatgagatgccagcggcatagcccttcacactctctgtctcatctctcctcctttctcattagccccttttaatttgtttttccttttgactcctgctcccattaggagcaggaatggcagtaataaaagtctgcactttggtcatttcttttcctcagaggaagcctgagtgctcacttaaacactatcccctcagactccctgtgtgaggcctgcagaggccctgaatgcacaaatgggaaaccaaggcacagagaggctctcctctcctctcctctcccccgatgtaccctcaaaaaaaaaaaaaatgctaaccagttcttccattaagcctcggctgagtgagggaaagcccagcactgctgccctctcgggtaactcaccctaaggcctcggcccacctctggctatggtaaccacactgggggcttcctccaagccccgctcttccagcacttccaccggcagagtcccagagccacttcaccctgggggtgggctgtggcccccagtcagctctgctcaggacctgctctatttcagggaagaagatttatgtattatatgtggctatatttcctagagcacctgtgttttcctctttctaagccagggtcctgtctggatgacttatgcggtgggggagtgtaaaccggaacttttcatctatttgaaggcgattaaactgtgtctaatgcaaa

SEQ ID NO: 453755 - DNA, 2309 bp, Homo sapiens
aaataaagcgtttattgattagtagaagcatgaacagtgtgcataatattttcaatacaatatcagggagggatgatgggaacccctcaaaaggcactagaggcgcagatcttcgggacaagagggaagagatgcgccagagaccagggctggggcagctgggggtccctgagtgccaggcgccaccacacgtcctgtgggtcaaggcccctcctctggggagcaggtctacggcacggaggatgcagggctgggaggggaccccaagcgcttcgaccatcactgcccctgggtggggaattgtgttggaaagaggaactaccgctacttctacctcttcatcctttctctctccctcctcacaatctatgtcttcgccttcaacatcgtctatgtggccctcaaatctttgaaaattggcttcttggagacattgaaagaaactcctggaactgttctagaagtcctcatttgcttctttacactctggtccgtcgtgggactgactggatttcatactttcctcgtggctctcaaccagacaaccaatgaagacatcaaaggatcatggacagggaagaatcgcgtccagaatccctacagccatggcaatattgtgaagaactgctgtgaagtgctgtgtggccccttgccccccagtgtgctggatcgaaggggtattttgccactggaggaaagtggaagtcgacctcccagtactcaagagaccagtagcagcctcttgccacagagcccagcccccacagaacacctgaactcaaatgagatgccggaggacagcagcactcccgaagagatgccacctccagagcccccagagccaccacaggaggcagctgaagctgagaagtagcctatctatggaagagacttttgtttgtgtttaattagggctatgagagatttcaggtgagaagttaaacctgagacagagagcaagtaagctgtcccttttaactgtttttctttggtctttagtcacccagttgcacactggcattttcttgctgcaagcttttttaaatttctgaactcaaggcagtggcagaagatgtcagtcacctctgataactggaaaaatgggtctcttgggccctggcactggttctccatggcctcagccacagggtccccttggaccccctctcttccctccagatcccagccctcctgcttggggtcactggtctcattctggggctaaaagtttttgagactggctcaaatcctcccaagctgctgcacgtgctgagtccagaggcagtcacagagacctctggccaggggatcctaactgggttcttggggtcttcaggactgaagaggagggagagtggggtcagaagattctcctggccaccaagtgccagcattgcccacaaatccttttaggaatgggacaggtaccttccacttgttgtatttattagtgtagcttctcctttgtctcccatccactctgacacctaagccccactcttttcccattagatatatgtaagtagttgtagtagagataataattgacatttctcgtagactacccagaaacttttttaatacctgtgccattctcaataagaatttatgagatgccagcggcatagcccttcacactctctgtctcatctctcctcctttctcattagccccttttaatttgtttttccttttgactcctgctcccattaggagcaggaatggcagtaataaaagtctgcactttggtcatttcttttcctcagaggaagcctgagtgctcacttaaacactatcccctcagactccctgtgtgaggcctgcagaggccctgaatgcacaaatgggaaaccaaggcacagagaggctctcctctcctctcctctcccccgatgtaccctcaaaaaaaaaaaaaatgctaaccagttcttccattaagcctcggctgagtgagggaaagcccagcactgctgccctctcgggtaactcaccctaaggcctcggcccacctctggctatggtaaccacactgggggcttcctccaagccccgctcttccagcacttccaccggcagagtcccagagccacttcaccctgggggtgggctgtggcccccagtcagctctgctcaggacctgctctatttcagggaagaagatttatgtattatatgtggctatatttcctagagcacctgtgttttcctctttctaagccagggtcctgtctggatgacttatgcggtgggggagtgtaaaccggaacttttcatctatttgaaggcgattaaactgtgtctaatgcaaa

SEQ ID NO: 453756 - DNA, 1048 bp, Homo sapiens
ttcacatgtattattgtgtagttttactactcatgttttcaagcatccctccaacaaaacagcagagataaccatttgtggctaggaaatgggaatttacagaagagatggcatttgacttggatcttgaggagtgtgtgggagtttatcatgtagacacagtagaagtgtcacagaccaagggaaacaccggtgcttctcctttgtctcccatccactctgacacctaagccccactcttttcccattagatatatgtaagtagttgtagtagagataataattgacatttctcgtagactacccagaaacttttttaatacctgtgccattctcaataagaatttatgagatgccagcggcatagcccttcacactctctgtctcatctctcctcctttctcattagccccttttaatttgtttttccttttgactcctgctcccattaggagcaggaatggcagtaataaaagtctgcactttggtcatttcttttcctcagaggaagcctgagtgctcacttaaacactatcccctcagactccctgtgtgaggcctgcagaggccctgaatgcacaaatgggaaaccaaggcacagagaggctctcctctcctctcctctcccccgatgtaccctcaaaaaaaaaaaaaatgctaaccagttcttccattaagcctcggctgagtgagggaaagcccagcactgctgccctctcgggtaactcaccctaaggcctcggcccacctctggctatggtaaccacactgggggcttcctccaagccccgctcttccagcacttccaccggcagagtcccagagccacttcaccctgggggtgggctgtggcccccagtcagctctgctcaggacctgctctatttcagggaagaagatttatgtattatatgtggctatatttcctagagcacctgtgttttcctctttctaagccagggtcctgtctggatgacttatgcggtgggggagtgtaaaccggaacttttcatctatttgaaggcgattaaactgtgtctaatgcaaa

SEQ ID NO: 453757 - DNA, 2524 bp, Homo sapiens
cgacctggtgacgtgaggagcgttccatttggccagtggtgggcggttgccacagctggtttagggccccgaccactggggccccttgtcaggaggagacagcctcccggcccggggaggacaagtcgctgccacctttggctgccgacgtgattccctgggacggtccgtttcctgccgtcagctgccggccgagttgggtctccgtggttcaggccggctcccccttcctggtctcccttctcccgctgggccggtttatcgggaggagattgtcttccagggctagcaattggacttttgatgatgtttgacccagcggcaggaatagcaggcaacgtgatttcaaagctgggctcagcctctgtttcttctctcgtgtaatcgcaaaacccattttggagcaggaattccaatcatgtctgtgatggtggtgagaaagaaggtgacacggaaatgggagaaactcccaggcaggaacaccttttgctgtgatggccgcgtcatgatggcccggcaaaagggcattttctacctgacccttttcctcatcctggggacatgtacactcttcttcgcctttgagtgccgctacctggctgttcagctgtctcctgccatccctgtatttgctgccatgctcttccttttctccatggctacactgttgaggaccagcttcagtgaccctggagtgattcctcgggcgctaccagatgaagcagctttcatagaaatggagatagaagctaccaatggtgcggtgccccagggccagcgaccaccgcctcgtatcaagaatttccagataaacaaccagattgtgaaactgaaatactgttacacatgcaagatcttccggcctccccgggcctcccattgcagcatctgtgacaactgtgtggagcgcttcgaccatcactgcccctgggtgggggttggaaggggttgcttgttactccccaaacttccattaaccagggcacccttgggttggagaggtagttccaaactctccattgatctatactacattctgggctgaaggttttcttattctggactatgaagaaaggactttcaaggagatatagtgtgaacaggatcaggaaggtagagggattatatttacttaagagaacaagctctatattaggatattgttttgaagcagatggatgccgttaattgctaataagtcttagttattaacgcaggctcatcagggcccccccttggaaatatttgatcagtggtcttttacaagtgatggtatatatttctttctaggtggtgtataatcaagactccctatcaattcccatctcatacttcccagttaattggaattaatgaaatttggctgctcccagacctttttccatgtcttcctttttccttttaacaggatttaagttgagcattcttgagagagagagagagagagagattggaagagagatggggagagactgactcagatccctctcctgtctgcttctttttctggttctctcagttttttttcttgaagttataaagccaaacctggagaatttgtaagttgttaggtttccccaggtaacttggcactcatatgaaccccattttaataagtactcagcccatctcctctcctgggctcagatggctctctctcctccctcaccttacctcaagtgttctcctgaggacccttaggtcagacagagaagctttctctttctgatgggaagggtcaaagtggaaatctcttatctctagtgtgaaatgattttctgctttttcatactccctgccctctttcttttccttaataaatcttccatgtttaagatgttggcctgaagatctgtcccattcataccatgcaccagctgggactgtccctatctgatcagaggggagattaaagaatcaatgttcccaggggaaaagggccttaaattgtttggtcttttcaatggctgacactgtctccaactctccccttcctccttcttcctcaagcttcctatgcaccctactttcccaggccaggatggttggcactgatcccaaacctctgggggcaggtggaaattggctgtggtgagccatttcttcatgtccattcagctctgaggccttcctggccctagctgagatcatcatctcctcctttgcttttaccccaggagtgaggttgggttagaggtggattctgattccgtagcagctaaattccattctccctgtcctgaccatcctgcctttacccataaagcacccgttcctactgaccaaatctctttactttgttggagaaaaaaagtattttgtttttaaatctattttctaatttaaatgcaatttaatatgtaaatctctgcacttttgtgtgagcctacaaatgtgtatgtgttgggggtttttcactctctggtatttcttaataaagaaatctttcttttggggggaagccaattaatgaaggagccttgaatggttttagaaatacagggctgtctgtttctttgtgaat

SEQ ID NO: 453758 - DNA, 1420 bp, Homo sapiens
cgacctggtgacgtgaggagcgttccatttggccagtggtgggcggttgccacagctggtttagggccccgaccactggggccccttgtcaggaggagacagcctcccggcccggggaggacaagtcgctgccacctttggctgccgacgtgattccctgggacggtccgtttcctgccgtcagctgccggccgagttgggtctccgtggttcaggccggctcccccttcctggtctcccttctcccgctgggccggtttatcgggaggagattgtcttccagggctagcaattggacttttgatgatgtttgacccagcggcaggaatagcaggcaacgtgatttcaaagctgggctcagcctctgtttcttctctcgtgtaatcgcaaaacccattttggagcaggaattccaatcatgtctgtgatggtggtgagaaagaaggtgacacggaaatgggagaaactcccaggcaggaacaccttttgctgtgatggccgcgtcatgatggcccggcaaaagggcattttctacctgacccttttcctcatcctggggacatgtacactcttcttcgcctttgagtgccgctacctggctgttcagctgtctcctgccatccctgtatttgctgccatgctcttccttttctccatggctacactgttgaggaccagcttcagtgaccctggagtgattcctcgggcgctaccagatgaagcagctttcatagaaatggagatagaagctaccaatggtgcggtgccccagggccagcgaccaccgcctcgtatcaagaatttccagataaacaaccagattgtgaaactgaaatactgttacacatgcaagatcttccggcctccccgggcctcccattgcagcatctgtgacaactgtgtggattttcctgtactggattttcatgtgggacccaccttacatagtgggaggagacacctagtccactggagggcagcattgaggaaggaaggtctgtctaagacgcaacccaagaagaggaaagttgctagcatttattgagtttctactacatattgggcactgtgctaagtgatttacctttctctcatttaagacttgtaacagccccatgagattggtattatccccattttacggatgaggaaataggtgaagcaccagtatgtaagttcacataattagtatgagattaagctagagcaggtctgattccaaactgcttatttcttctctttgctgctgctgcaagagggtcaggtatatgtgtgtctaatacagtggtctgtacttccatccacatatatgtggctttgttgtaatcactgcctactgtgtgctaaaccctggccaagatgagaaatgggccataaagattcctgttgataggcctatatgtgaaattgcttatatcat

SEQ ID NO: 453759 - DNA, 424 bp, Homo sapiens
attcgcgggcaatgctggcacttggaggccaggagaatcttctgaccccactctccctcctcttcagtcctgaagaccccaagaacccagttaggatcccctggccagaggtctctgtgactgcctctggctatggtaaccacactgggggcttcctccaagccccgctcttccagcacttccaccggcagagtcccagagccacttcaccctgggggtgggctgtggcccccagtcagctctgctcaggacctgctctatttcagggaagaagatttatgtattatatgtggctatatttcctagagcacctgtgttttcctctttctaagccagggtcctgtctggatgacttatgcggtgggggagtgtaaaccggaacttttcatctatttgaaggcgattaaactgtgtctaatgcaaa

SEQ ID NO: 453760 - DNA, 4670 bp, Homo sapiens
cgacctggtgacgtgaggagcgttccatttggccagtggtgggcggttgccacagctggtttagggccccgaccactggggccccttgtcaggaggagacagcctcccggcccggggaggacaagtcgctgccacctttggctgccgacgtgattccctgggacggtccgtttcctgccgtcagctgccggccgagttgggtctccgtggttcaggccggctcccccttcctggtctcccttctcccgctgggccggtttatcgggaggagattgtcttccagggctagcaattggacttttgatgatgtttgacccagcggcaggaatagcaggcaacgtgatttcaaagctgggctcagcctctgtttcttctctcgtgtaatcgcaaaacccattttggagcaggaattccaatcatgtctgtgatggtggtgagaaagaaggtgacacggaaatgggagaaactcccaggcaggaacaccttttgctgtgatggccgcgtcatgatggcccggcaaaagggcattttctacctgacccttttcctcatcctggggacatgtacactcttcttcgcctttgagtgccgctacctggctgttcagctgtctcctgccatccctgtatttgctgccatgctcttccttttctccatggctacactgttgaggaccagcttcagtgaccctggagtgattcctcgggcgctaccagatgaagcagctttcatagaaatggagatagaagctaccaatggtgcggtgccccagggccagcgaccaccgcctcgtatcaagaatttccagataaacaaccagattgtgaaactgaaatactgttacacatgcaagatcttccggcctccccgggcctcccattgcagcatctgtgacaactgtgtggagcgcttcgaccatcactgcccctgggtggggaattgtgttggaaagaggaactaccgctacttctacctcttcatcctttctctctccctcctcacaatctatgtcttcgccttcaacatcgtctatgtggccctcaaatctttgaaaattggcttcttggagacattgaaagaaactcctggaactgttctagaagtcctcatttgcttctttacactctggtccgtcgtgggactgactggatttcatactttcctcgtggctctcaaccagacaaccaatgaagacatcaaaggatcatggacagggaagaatcgcgtccagaatccctacagccatggcaatattgtgaagaactgctgtgaagtgctgtgtggccccttgccccccagtgtgctggatcgaaggggtattttgccactggaggaaagtggaagtcgacctcccagtactcaagagaccagtagcagcctcttgccacagagcccagcccccacagaacacctgaactcaaatgagatgccggaggacagcagcactcccgaagagatgccacctccagagcccccagagccaccacaggaggcagctgaagctgagaagtagcctatctatggaagagacttttgtttgtgtttaattagggctatgagagatttcaggtgagaagttaaacctgagacagagagcaagtaagctgtcccttttaactgtttttctttggtctttagtcacccagttgcacactggcattttcttgctgcaagcttttttaaatttctgaactcaaggcagtggcagaagatgtcagtcacctctgataactggaaaaatgggtctcttgggccctggcactggttctccatggcctcagccacagggtccccttggaccccctctcttccctccagatcccagccctcctgcttggggtcactggtctcattctggggctaaaagtttttgagactggctcaaatcctcccaagctgctgcacgtgctgagtccagaggcagtcacagagacctctggccaggggatcctaactgggttcttggggtcttcaggactgaagaggagggagagtggggtcagaagattctcctggccaccaagtgccagcattgcccacaaatccttttaggaatgggacaggtaccttccacttgttgtatttattagtgtagcttctcctttgtctcccatccactctgacacctaagccccactcttttcccattagatatatgtaagtagttgtagtagagataataattgacatttctcgtagactacccagaaacttttttaatacctgtgccattctcaataagaatttatgagatgccagcggcatagcccttcacactctctgtctcatctctcctcctttctcattagccccttttaatttgtttttccttttgactcctgctcccattaggagcaggaatggcagtaataaaagtctgcactttggtcatttcttttcctcagaggaagcctgagtgctcacttaaacactatcccctcagactccctgtgtgaggcctgcagaggccctgaatgcacaaatgggaaaccaaggcacagagaggctctcctctcctctcctctcccccgatgtaccctcaaaaaaaaaaaaaatgctaaccagttcttccattaagcctcggctgagtgagggaaagcccagcactgctgccctctcgggtaactcaccctaaggcctcggcccacctctggctatggtaaccacactgggggcttcctccaagccccgctcttccagcacttccaccggcagagtcccagagccacttcaccctgggggtgggctgtggcccccagtcagctctgctcaggacctgctctatttcagggaagaagatttatgtattatatgtggctatatttcctagagcacctgtgttttcctctttctaagccagggtcctgtctggatgacttatgcggtgggggagtgtaaaccggaacttttcatctatttgaaggcgattaaactgtgtctaatgcaaacttcctgcctcctccttcccccttccatttcaagaatatgtttgtgtgtagggtgggggtgggggttggaaggggttgcttgttactccccaaacttccattaaccagggcacccttgggttggagaggtagttccaaactctccattgatctatactacattctgggctgaaggttttcttattctggactatgaagaaaggactttcaaggagatatagtgtgaacaggatcaggaaggtagagggattatatttacttaagagaacaagctctatattaggatattgttttgaagcagatggatgccgttaattgctaataagtcttagttattaacgcaggctcatcagggcccccccttggaaatatttgatcagtggtcttttacaagtgatggtatatatttctttctaggtggtgtataatcaagactccctatcaattcccatctcatacttcccagttaattggaattaatgaaatttggctgctcccagacctttttccatgtcttcctttttccttttaacaggatttaagttgagcattcttgagagagagagagagagagagattggaagagagatggggagagactgactcagatccctctcctgtctgcttctttttctggttctctcagttttttttcttgaagttataaagccaaacctggagaatttgtaagttgttaggtttccccaggtaacttggcactcatatgaaccccattttaataagtactcagcccatctcctctcctgggctcagatggctctctctcctccctcaccttacctcaagtgttctcctgaggacccttaggtcagacagagaagctttctctttctgatgggaagggtcaaagtggaaatctcttatctctagtgtgaaatgattttctgctttttcatactccctgccctctttcttttccttaataaatcttccatgtttaagatgttggcctgaagatctgtcccattcataccatgcaccagctgggactgtccctatctgatcagaggggagattaaagaatcaatgttcccaggggaaaagggccttaaattgtttggtcttttcaatggctgacactgtctccaactctccccttcctccttcttcctcaagcttcctatgcaccctactttcccaggccaggatggttggcactgatcccaaacctctgggggcaggtggaaattggctgtggtgagccatttcttcatgtccattcagctctgaggccttcctggccctagctgagatcatcatctcctcctttgcttttaccccaggagtgaggttgggttagaggtggattctgattccgtagcagctaaattccattctccctgtcctgaccatcctgcctttacccataaagcacccgttcctactgaccaaatctctttactttgttggagaaaaaaagtattttgtttttaaatctattttctaatttaaatgcaatttaatatgtaaatctctgcacttttgtgtgagcctacaaatgtgtatgtgttgggggtttttcactctctggtatttcttaataaagaaatctttcttttggggggaagccaattaatgaaggagccttgaatggttttagaaaaaaaatattatatattcaaaaaacgaaggcgggccgaaggcttattccctttagtggaggttaatttttactttggtacctggcccgcctttttccaa

SEQ ID NO: 453761 - DNA, 3467 bp, Homo sapiens
cgacctggtgacgtgaggagcgttccatttggccagtggtgggcggttgccacagctggtttagggccccgaccactggggccccttgtcaggaggagacagcctcccggcccggggaggacaagtcgctgccacctttggctgccgacgtgattccctgggacggtccgtttcctgccgtcagctgccggccgagttgggtctccgtggttcaggccggctcccccttcctggtctcccttctcccgctgggccggtttatcgggaggagattgtcttccagggctagcaattggacttttgatgatgtttgacccagcggcaggaatagcaggcaacgtgatttcaaagctgggctcagcctctgtttcttctctcgtgtaatcgcaaaacccattttggagcaggaattccaatcatgtctgtgatggtggtgagaaagaaggtgacacggaaatgggagaaactcccaggcaggaacaccttttgctgtgatggccgcgtcatgatggcccggcaaaagggcattttctacctgacccttttcctcatcctggggacatgtacactcttcttcgcctttgagtgccgctacctggctgttcagctgtctcctgccatccctgtatttgctgccatgctcttccttttctccatggctacactgttgaggaccagcttcagtgaccctggagtgattcctcgggcgctaccagatgaagcagctttcatagaaatggagatagaagctaccaatggtgcggtgccccagggccagcgaccaccgcctcgtatcaagaatttccagataaacaaccagattgtgaaactgaaatactgttacacatgcaagatcttccggcctccccgggcctcccattgcagcatctgtgacaactgtgtggagcgcttcgaccatcactgcccctgggtggggaattgtgttggaaagaggaactaccgctacttctacctcttcatcctttctctctccctcctcacaatctatgtcttcgccttcaacatcgtctatgtggccctcaaatctttgaaaattggcttcttggagacattgaaagaaactcctggaactgttctagaagtcctcatttgcttctttacactctggtccgtcgtgggactgactggatttcatactttcctcgtggctctcaaccagacaaccaatgaagacatcaaaggatcatggacagggaagaatcgcgtccagaatccctacagccatggcaatattgtgaagaactgctgtgaagtgctgtgtggccccttgccccccagtgtgctggatcgaaggggtattttgccactggaggaaagtggaagtcgacctcccagtactcaagagaccagtagcagcctcttgccacagagcccagcccccacagaacacctgaactcaaatgagatgccggaggacagcagcactcccgaagagatgccacctccagagcccccagagccaccacaggaggcagctgaagctgagaagtagcctatctatggaagagacttttgtttgtgtttaattagggctatgagagatttcaggtgagaagttaaacctgagacagagagcaagtaagctgtcccttttaactgtttttctttggtctttagtcacccagttgcacactggcattttcttgctgcaagcttttttaaatttctgaactcaaggcagtggcagaagatgtcagtcacctctgataactggaaaaatgggtctcttgggccctggcactggttctccatggcctcagccacagggtccccttggaccccctctcttccctccagatcccagccctcctgcttggggtcactggtctcattctggggctaaaagtttttgagactggctcaaatcctcccaagctgctgcacgtgctgagtccagaggcagtcacagagacctctggccaggggatcctaactgggttcttggggtcttcaggactgaagaggagggagagtggggtcagaagattctcctggccaccaagtgccagcattgcccacaaatccttttaggaatgggacaggtaccttccacttgttgtatttattagtgtagcttctcctttgtctcccatccactctgacacctaagccccactcttttcccattagatatatgtaagtagttgtagtagagataataattgacatttctcgtagactacccagaaacttttttaatacctgtgccattctcaataagaatttatgagatgccagcggcatagcccttcacactctctgtctcatctctcctcctttctcattagccccttttaatttgtttttccttttgactcctgctcccattaggagcaggaatggcagtaataaaagtctgcactttggtcatttcttttcctcagaggaagcctgagtgctcacttaaacactatcccctcagactccctgtgtgaggcctgcagaggccctgaatgcacaaatgggaaaccaaggcacagagaggctctcctctcctctcctctcccccgatgtaccctcaaaaaaaaaaaaaatgctaaccagttcttccattaagcctcggctgagtgagggaaagcccagcactgctgccctctcgggtaactcaccctaaggcctcggcccacctctggctatggtaaccacactgggggcttcctccaagccccgctcttccagcacttccaccggcagagtcccagagccacttcaccctgggggtgggctgtggcccccagtcagctctgctcaggacctgctctatttcagggaagaagatttatgtattatatgtggctatatttcctagagcacctgtgttttcctctttctaagccagggtcctgtctggatgacttatgcggtgggggagtgtaaaccggaacttttcatctatttgaaggcgattaaactgtgtctaatgcaaaaaaaaaaaaaaaaaaaaaaaaaaaaaagaaagaacaaccaacaaaggggggcgggggcgcgccactaggagatgctcccctcgacggggggcgccgcgaagtattgccgcggcaccccagcgtgttcttggtgcgcaaaacagggggggcccactgaatagaggagagccgtcgagatatatacaacacaacgaccgaagccaccgcgcggcggcggaggtttgacacagacgggctcgtgacaggggaaacatcggggacctatccgggcaggcgccatcctgtggcggagcaagagagacaccccacacccacaagcgcggcgggggggcagcacaaccacgttgcgccggcacacacccgccgccaagaacaccaaagatttccaaaacggccccgaggaggcggaacaatacacaacagacgctttgacagaggtgggatacacagggggttggtaaacaccaagcgcaggccatatgtccgcggcgcgcagaagaaagaacgttgccgcacaca

SEQ ID NO: 453762 - DNA, 2480 bp, Homo sapiens
cgacctggtgacgtgaggagcgttccatttggccagtggtgggcggttgccacagctggtttagggccccgaccactggggccccttgtcaggaggagacagcctcccggcccggggaggacaagtcgctgccacctttggctgccgacgtgattccctgggacggtccgtttcctgccgtcagctgccggccgagttgggtctccgtggttcaggccggctcccccttcctggtctcccttctcccgctgggccggtttatcgggaggagattgtcttccagggctagcaattggacttttgatgatgtttgacccagcggcaggaatagcaggcaacgtgatttcaaagctgggctcagcctctgtttcttctctcgtgtaatcgcaaaacccattttggagcaggaattccaatcatgtctgtgatggtggtgagaaagaaggtgacacggaaatgggagaaactcccaggcaggaacaccttttgctgtgatggccgcgtcatgatggcccggcaaaagggcattttctacctgacccttttcctcatcctggggacatgtacactcttcttcgcctttgagtgccgctacctggctgttcagctgtctcctgccatccctgtatttgctgccatgctcttccttttctccatggctacactgttgaggaccagcttcagtgaccctggagtgattcctcgggcgctaccagatgaagcagctttcatagaaatggagatagaagctaccaatggtgcggtgccccagggccagcgaccaccgcctcgtatcaagaatttccagataaacaaccagattgtgaaactgaaatactgttacacatgcaagatcttccggcctccccgggcctcccattgcagcatctgtgacaactgtgtggagcgcttcgaccatcactgcccctgggtggggaattgtgttggaaagaggaactaccgctacttctacctcttcatcctttctctctccctcctcacaatctatgtcttcgccttcaacatcgtctatgtggccctcaaatctttgaaaattggcttcttggagacattgaaagaaactcctggaactgttctagaagtcctcatttgcttctttacactctggtccgtcgtgggactgactggatttcatactttcctcgtggctctcaaccagacaaccaatgaagacatcaaaggatcatggacagggaagaatcgcgtccagaatccctacagccatggcaatattgtgaagaactgctgtgaagtgctgtgtggccccttgccccccagtgtgctggatcgaaggggtattttgccactggaggaaagtggaagtcgacctcccagtactcaagagaccagtagcagcctcttgccacagagcccagcccccacagaacacctgaactcaaatgagatgccggaggacagcagcactcccgaagagatgccacctccagagcccccagagccaccacaggaggcagctgaagctgagaagtagcctatctatggaagagacttttgtttgtgtttaattagggctatgagagatttcaggtgagaagttaaacctgagacagagagcaagtaagctgtcccttttaactgtttttctttggtctttagtcacccagttgcacactggcattttcttgctgcaagcttttttaaatttctgaactcaaggcagtggcagaagatgtcagtcacctctgataactggaaaaatgggtctcttgggccctggcactggttctccatggcctcagccacagggtccccttggaccccctctcttccctccagatcccagccctcctgcttggggtcactggtctcattctggggctaaaagtttttgagactggctcaaatcctcccaagctgctgcacgtgctgagtccagaggcagtcacagagacctctggccaggggatcctaactgggttcttggggtcttcaggactgaagaggagggagagtggggtcagaagattctcctggccaccaagtgccagcattgcccacaaatccttttaggaatgggacaggtaccttccacttgttgtatttattagtgtagcttctcctttgtctcccatccactctgacacctaagccccactcttttcccattagatatatgtaagtagttgtagtagagataataattgacatttctcgtagactacccagaaacttttttaatacctgtgccattctcaataagaatttatgagatgccagcggcatagcccttcacactctctgtctcatctctcctcctttctcattagccccttttaatttgtttttccttttgactcctgctcccattaggagcaggaatggcagtaataaaagtctgcactttggtcatttcttttcctcagaggaagcctgagtgctcacttaaacactatcccctcagacaaaggaacaccggagatcctcgagagtcacctgca

SEQ ID NO: 453763 - DNA, 2350 bp, Homo sapiens
tcctattagacacagcattgctacctaaggagtcatattctctccctcctgaccttccccgccttcccggggcatcctctgcgccacgcccaggacgagggaggttaccaaaattaatctcccgctgggatgtgaagtcattggcgggtttacggaaaacatgggaatcgtcctcatagtcatcttttaccatcgtgaaacacaattacagcatcaaacacgcacaagtccacagccatcccagctggagattaattttggtaacctccccgggcctcccattgcagcatctgtgacaactgtgtggagcgcttcgaccatcactgcccctgggtggggaattgtgttggaaagaggaactaccgctacttctacctcttcatcctttctctctccctcctcacaatctatgtcttcgccttcaacatcgtctatgtggccctcaaatctttgaaaattggcttcttggagacattgaaagaaactcctggaactgttctagaagtcctcatttgcttctttacactctggtccgtcgtgggactgactggatttcatactttcctcgtggctctcaaccagacaaccaatgaagacatcaaaggatcatggacagggaagaatcgcgtccagaatccctacagccatggcaatattgtgaagaactgctgtgaagtgctgtgtggccccttgccccccagtgtgctggatcgaaggggtattttgccactggaggaaagtggaagtcgacctcccagtactcaagagaccagtagcagcctcttgccacagagcccagcccccacagaacacctgaactcaaatgagatgccggaggacagcagcactcccgaagagatgccacctccagagcccccagagccaccacaggaggcagctgaagctgagaagtagcctatctatggaagagacttttgtttgtgtttaattagggctatgagagatttcaggtgagaagttaaacctgagacagagagcaagtaagctgtcccttttaactgtttttctttggtctttagtcacccagttgcacactggcattttcttgctgcaagcttttttaaatttctgaactcaaggcagtggcagaagatgtcagtcacctctgataactggaaaaatgggtctcttgggccctggcactggttctccatggcctcagccacagggtccccttggaccccctctcttccctccagatcccagccctcctgcttggggtcactggtctcattctggggctaaaagtttttgagactggctcaaatcctcccaagctgctgcacgtgctgagtccagaggcagtcacagagacctctggccaggggatcctaactgggttcttggggtcttcaggactgaagaggagggagagtggggtcagaagattctcctggccaccaagtgccagcattgcccacaaatccttttaggaatgggacaggtaccttccacttgttgtatttattagtgtagcttctcctttgtctcccatccactctgacacctaagccccactcttttcccattagatatatgtaagtagttgtagtagagataataattgacatttctcgtagactacccagaaacttttttaatacctgtgccattctcaataagaatttatgagatgccagcggcatagcccttcacactctctgtctcatctctcctcctttctcattagccccttttaatttgtttttccttttgactcctgctcccattaggagcaggaatggcagtaataaaagtctgcactttggtcatttcttttcctcagaggaagcctgagtgctcacttaaacactatcccctcagactccctgtgtgaggcctgcagaggccctgaatgcacaaatgggaaaccaaggcacagagaggctctcctctcctctcctctcccccgatgtaccctcaaaaaaaaaaaaaatgctaaccagttcttccattaagcctcggctgagtgagggaaagcccagcactgctgccctctcgggtaactcaccctaaggcctcggcccacctctggctatggtaaccacactgggggcttcctccaagccccgctcttccagcacttccaccggcagagtcccagagccacttcaccctgggggtgggctgtggcccccagtcagctctgctcaggacctgctctatttcagggaagaagatttatgtattatatgtggctatatttcctagagcacctgtgttttcctctttctaagccagggtcctgtctggatgacttatgcggtgggggagtgtaaaccggaacttttcatctatttgaaggcgattaaactgtgtctaatgcaaa

SEQ ID NO: 453764 - DNA, 2379 bp, Homo sapiens
cgacctggtgacgtgaggagcgttccatttggccagtggtgggcggttgccacagctggtttagggccccgaccactggggccccttgtcaggaggagacagcctcccggcccggggaggacaagtcgctgccacctttggctgccgacgtgattccctgggacggtccgtttcctgccgtcagctgccggccgagttgggtctccgtggttcaggccggctcccccttcctggtctcccttctcccgctgggccggtttatcgggaggagattgtcttccagggctagcaattggacttttgatgatgtttgacccagcggcaggaatagcaggcaacgtgatttcaaagctgggctcagcctctgtttcttctctcgtgtaatcgcaaaacccattttggagcaggaattccaatcatgtctgtgatggtggtgagaaagaaggtgacacggaaatgggagaaactcccaggcaggaacaccttttgctgtgatggccgcgtcatgatggcccggcaaaagggcattttctacctgacccttttcctcatcctggggacatgtacactcttcttcgcctttgagtgccgctacctggctgttcagctgtctcctgccatccctgtatttgctgccatgctcttccttttctccatggctacactgttgaggaccagcttcagtgaccctggagtgattcctcgggcgctaccagatgaagcagctttcatagaaatggagatagaagctaccaatggtgcggtgccccagggccagcgaccaccgcctcgtatcaagaatttccagataaacaaccagattgtgaaactgaaatactgttacacatgcaagatcttccggcctccccgggcctcccattgcagcatctgtgacaactgtgtggagcgcttcgaccatcactgcccctgggtggggaattgtgttggaaagaggaactaccgctacttctacctcttcatcctttctctctccctcctcacaatctatgtcttcgccttcaacatcgtctatgtggccctcaaatctttgaaaattggcttcttggagacattgaaagaaactcctggaactgttctagaagtcctcatttgcttctttacactctggtccgtcgtgggactgactggatttcatactttcctcgtggctctcaaccagacaaccaatgaagacatcaaaggatcatggacagggaagaatcgcgtccagaatccctacagccatggcaatattgtgaagaactgctgtgaagtgctgtgtggccccttgccccccagtgtgctggatcgaaggggtattttgccactggaggaaagtggaagtcgacctcccagtactcaagagaccagtagcagcctcttgccacagagcccagcccccacagaacacctgaactcaaatgagatgccggaggacagcagcactcccgaagagatgccacctccagagcccccagagccaccacaggaggcagctgaagctgagaagtagcctatctatggaagagacttttgtttgtgtttaattagggctatgagagatttcaggtgagaagttaaacctgagacagagagcaagtaagctgtcccttttaactgtttttctttggtctttagtcacccagttgcacactggcattttcttgctgcaagcttttttaaatttctgaactcaaggcagtggcagaagatgtcagtcacctctgataactggaaaaatgggtctcttgggccctggcactggttctccatggcctcagccacagggtccccttggaccccctctcttccctccagatcccagccctcctgcttggggtcactggtctcattctggggctaaaagtttttgagactggctcaaatcctcccaagctgctgcacgtgctgagtccagaggcagtcacagagacctctggccaggggatcctaactgggttcttggggtcttcaggactgaagaggagggagagtggggtcagaagattctcctggccaccaagtgccagcattgcccacaaatccttttaggaatgggacaggtaccttccacttgttgtatttattagtgtagcttctcctttgtctcccatccactctgacacctaagccccactcttttcccattagatatatgtaagtagttgtagtagagataataattgacatttctcgtagactacccagaaacttttttaatacctgtgccattctcaataagaatttatgagatgccagcggcatagcccttcactatccctcaacttctttctcctttcagtcttggtgccacacttcaatctctcccttcttttaatttcaattcctttcattttctggtagagacaaagggaaaca

SEQ ID NO: 453765 - DNA, 1058 bp, Homo sapiens
cgacctggtgacgtgaggagcgttccatttggccagtggtgggcggttgccacagctggtttagggccccgaccactggggccccttgtcaggaggagacagcctcccggcccggggaggacaagtcgctgccacctttggctgccgacgtgattccctgggacggtccgtttcctgccgtcagctgccggccgagttgggtctccgtggttcaggccggctcccccttcctggtctcccttctcccgctgggccggtttatcgggaggagattgtcttccagggctagcaattggacttttgatgatgtttgacccagcggcaggaatagcaggcaacgtgatttcaaagctgggctcagcctctgtttcttctctcgtgtaatcgcaaaacccattttggagcaggaattccaatcatgtctgtgatggtggtgagaaagaaggtgacacggaaatgggagaaactcccaggcaggaacaccttttgctgtgatggccgcgtcatgatggcccggcaaaagggcattttctacctgacccttttcctcatcctggggacatgtacactcttcttcgcctttgagtgccgctacctggctgttcagctgtctcctgccatccctgtatttgctgccatgctcttccttttctccatggctacactgttgaggaccagcttcagtgaccctggagtgattcctcgggcgctaccagatgaagcagctttcatagaaatggagatagaagctaccaatggtgcggtgccccagggccagcgaccaccgcctcgtatcaagaatttccagataaacaaccagattgtgaaactgaaatactgttacacatgcaagatcttccggcctccccgggcctcccattgcagcatctgtgacaactgtgtgggtgagtaaaactacggggacattgcctagggaaaaggctgagttgaactagaaagtcagggtggtcaccaattttgggaggagggaagatagatttagatgagaaatgaactagatttagatagggaaatttagataggcaacaagctcctga

SEQ ID NO: 453766 - DNA, 516 bp, Homo sapiens
gactctagaggaccgcgttatccgtccagtaaaagttactgttactagaaaatttttatcaattaactgacaaatagtttctttttaaagtagtttcttccatctttattctgactagcttccaaaatgtgttccctttttgaatcgaggtttttttgttttgttttgttttctgaaaaaatcatacaactttgtgcttctattgcttttttgtgttttgttaagcatgtcccttggcccaaatggaagaggaaatgtttaattaatgctttttagtttaaataaattgaatcatttataataatcagtgttaacaatttagtgacccttggtaggttaaaggttgcattatttatacttgagatttttttcccctaactattctgttttttgtactttaaaactatgggggaaatatcactggtctgtcaagaaacagcagtaattattactgagttaaattgaaaagtccagtggaccaggcatttcttatataaataaaattggtggtactaa

SEQ ID NO: 453767 - DNA, 479 bp, Homo sapiens
cagtgaaagtcagaaattattaaaatgaaatctttaatgtgctgaaagaaaataactgcttacctagactctgcccagtgtagatatctttcacaaataagacgatataaagatattttcagataggtgtataacattcgtctaagtcaagatcgacaaacactgcctgttaaaataagacagaagctggaaacggaagataaacctgagagagaaagcatgactctggaatccacctgccatcagagctctctccagaccagtgctccttcccttcctcaccttcctgaatgcctcggcctggcacctgaactccccatcgctgctgccaccttcccccacccacttctttctctttcatgtgtgctacttcatcaattttttaaaagaaattctagtaaaaaaagaaaaatacctcatgacgattttctttttaaaatcatttgcttactaactaaatcaaatgttctatcccattt

SEQ ID NO: 453768 - DNA, 6143 bp, Homo sapiens
ggcggggaggggcggggctatggagaggaggaggaagatggcgggcgggctgctctgaagagacctcggcggcggcggaggaggagagaagcgcagcgccgcgccgcgccggggcccatgtggggaggagtcggagtcgctgttgccgccgccgcctgtagctgctggacccgagtgggagtgagggggaaacggcaggatgaagttcgccgagcacctctccgcgcacatcactcccgagtggaggaagcaatacatccagtatgaggctttcaaggatatgctgtattcagctcaggaccaggcaccttctgtggaagttacagatgaggacacagtaaagaggtattttgccaagtttgaagagaagtttttccaaacctgtgaaaaagaacttgccaaaatcaacacattttattcagagaagctcgcagaggctcagcgcaggtttgctacacttcagaatgagcttcagtcatcactggatgcacagaaagaaagcactggtgttactacgctgcgacaacgcagaaagccagtcttccacttgtcccatgaggaacgtgtccaacatagaaatattaaagaccttaaactggccttcagtgagttctacctcagtctaatcctgctgcagaactatcagaatctgaattttacagggtttcgaaaaatcctgaaaaagcatgacaagatcctggaaacatctcgtggagcagattggcgagtggctcacgtagaggtggccccattttatacatgcaagaaaatcaaccagcttatctctgaaactgaggctgtagtgaccaatgaacttgaagatggtgacagacaaaaggctatgaagcgtttacgtgtcccccctttgggagctgctcagcctgcaccagcatggactacttttagagttggcctattttgtggaatattcattgtactgaatattacccttgtgcttgccgctgtatttaaacttgaaacagatagaagtatatggcccttgataagaatctatcggggtggctttcttctgattgaattcctttttctactgggcatcaacacgtatggttggagacaggctggagtaaaccatgtactcatctttgaacttaatccgagaagcaatttgtctcatcaacatctctttgagattgctggattcctcgggatattgtggtgcctgagccttctggcatgcttctttgctccaattagtgtcatccccacatatgtgtatccacttgccctttatggatttatggttttcttccttatcaaccccaccaaaactttctactataaatcccggttttggctgcttaaactgctgtttcgagtatttacagcccccttccataaggtaggctttgctgatttctggctggcggatcagctgaacagcctgtcagtgatactgatggacctggaatatatgatctgcttctacagtttggagctcaaatgggatgaaagtaagggcctgttgccaaataattcagaagaatcaggaatttgccacaaatatacatatggtgtgcgggccattgttcagtgcattcctgcttggcttcgcttcatccagtgcctgcgccgatatcgagacacaaaaagggcctttcctcatttagttaatgctggcaaatactccacaactttcttcatggtgacgtttgcagccctttacagcactcacaaagaacgaggtcactcggacactatggtgttcttttacctgtggattgtcttttatatcatcagttcctgctataccctcatctgggatctcaagatggactggggtctcttcgataagaatgctggagagaacactttcctccgggaagagattgtatacccccaaaaagcctactactactgtgccataatagaggatgtgattctgcgctttgcttggactatccaaatctcgattacctctacaactttgttgcctcattctggggacatcattgctactgtctttgccccacttgaggttttccggcgatttgtgtggaacttcttccgcctggagaatgaacatctgaataactgtggtgaattccgtgctgtgcgggacatctctgtggcccccctgaacgcagatgatcagactctcctagaacagatgatggaccaggatgatggggtacgaaaccgccagaagaatcggtcatggaagtacaaccagagcatatccctgcgccggcctcgcctcgcttctcaatccaaggctcgtgacactaaggtattgatagaagacacagatgatgaagctaacacttgaattttctgaagtctagcttaacatctttggttttcctactctacaatcctttcctcgaccaacgcaacctctagtacctttccagccgaaaacaggagaaaacacataacacattttccgagctcttccggatcggatcctatggactccaaacaagctcactgtgtttcttttcttttcttctggtttaattttaattttctattttcaaaacaaatatttacttcatttgccaatcagaggatgttttaagaaacaaaacatagtatcttatggattgtttacaatcacaaggacatagatacctatcaggatgaagaacaggcattgcaaggaccctctgatgggacggtactgagatatctcggcttccgctcagcccggttttgactggttgaaaccggacattggtttttaaattttttgtcagtttatgtggagaatttttttctttccttcatacccagcgcaaaggcactggccgcacttgcaggaaaagtgcaacttaaagcagtaccttcattcatgaagctactttttaatttgatgtaacttttcttattttgggaagggttgctgggtgggtgggaaatatgatgtatttgttacacatagttttctcattatttatgaaacttaaccatacagaatgatataactcctgtgcaatgaaggtgataacagtaaaagaaggcaggggaaacttacgttggatgacatttatgagggtcagtcccacatacctctttcaggagacaacttgcaccagtttgaccttttcttttctttgtttttattttaagccaaagtttcattgctaacttcttaagttgctgctgctttagagtcctgagcatatctctcgtaacaaggaatcccacacttcacaccaccggctgaatttcatggaagaggttctgataatttttttaactttttaaggaacagatgtggaatacactggcccatatttcaaccttaacagctgaagctatgccttattatgcatccacatgtatggtccctgtagcgtgacctttactagctctgaatcagaagacagagctatttcagaggctctgtgtgccctcactagatagtttttcttctgggttcaaccactttagccagaatttgatcaaattaaaagtctgtcatggggaaactatatttttgagcacatggaacaaattatacttcctcattcatattatgttgatacaaaagaccttggcagccatttctcccagcagttttaaaggatgaacattggatttcatgccatcccatagaaaacctgttttaaaattttagggatctttacttggtcatacatgaaaagtacactgcttagaaattatagactattatgatctgtccacagtgcccattgtcacttctttgtctcatttcttccctttgttccttagtcatccaaataagcctgaaaaccataagagatattactttattgaatatggttggcattaaatttagcatttcattatctaacaaaattaatataaattccaggacatggtaaaatgtgttttaataacccccagacccaaatgaaaatttcaaagtcaataccagcagattcatgaaagtaaatttagtcctataattttcagcttaattataaacaaaggaacaaataagtggaagggcagctattaccattcgcttagtcaaaacattcggttactgccctttaatacactcctatcatcagcacttccaccatgtattacaagtcttgacccatccctgtcgtaactccagtaaaagttactgttactagaaaatttttatcaattaactgacaaatagtttctttttaaagtagtttcttccatctttattctgactagcttccaaaatgtgttccctttttgaatcgaggtttttttgttttgttttgttttctgaaaaaatcatacaactttgtgcttctattgcttttttgtgttttgttaagcatgtcccttggcccaaatggaagaggaaatgtttaattaatgctttttagtttaaataaattgaatcatttataataatcagtgttaacaatttagtgacccttggtaggttaaaggttgcattatttatacttgagatttttttcccctaactattctgttttttgtactttaaaactatgggggaaatatcactggtctgtcaagaaacagcagtaattattactgagttaaattgaaaagtccagtggaccaggcatttcttatataaataaaattggtggtactaatgtgtatccagagacatttgaattattaactttattctttattagtgaatctctatgatggcacacataaaatcttacagttgacttctgctgtttgaattccccagtgtttttacattaatgtatcctatggccagtttagtctttcttcaactgttacagttctaggccctaatcggtcttattctttcacatatgatgcatgatagatgtaatccttttctgaaggtttgtcggattggcatagtctattcaaaaataaggcttatgtaactttcagcttgctatgtgacagaagtttaaatgtgtatttaagtacacagctttatgttcctcttaaagctgtaaagagaaaagaggacttttcctcatcaagagagcttgggagacaaagcatacatttaatttttttctttcaaaaaaggcaatgtgcactttcctctcctaaattttatatgccctagcagttgcgaatgttgtgtccaccttacaatttgattggaggctcccatacactgaaactctcaatagaattcttaaaaatgaacatcagctgggcgcagtggctcacgtctgtaatcccagcactttgggaggccaaggtgggcagatcacgagctcaggagttcgagaccagcctgaccaacatggtgaaaccccgtctctactaaaaatacaaaaattagctgggcgtggtggcgcatgcctgtaatcccagctactcaggagactgaggcaggagaattgcttaaacctgggaagcagaggttgcagtgagactagatcatgccactgcactccactgccactgcctgggcaacagagcaagactccatctcaaaaacaaacaaaaaaaatcacagactcattttaaaggagcagcaacctaaccaaatacaaacttcatttgattttaggtttagaaattctagttttattttggagaatcactcagtttttaatatcaattaaaatagtcctcaaaggaatgaagaggaagtctaaataaatgaataaaactcatttttcattttatggtagtatagaaagcattgatgtgtgtagagaaattaaaagacaagagtggtttactgtctatgcacaaatgagtgcctatatttaaggctgcctataccattacagtggcgtaattggtgatttcatagcatacagagaaacaatgaaatcaaagattaaatcattaggttatgatggtcatttgtaagattggaaagtagtcaaaaacccatgtgcaactttttttcagcactctaccattaggctccttaggcaagctgcttaacttccgtcagaagcaaaggtgtgggagaacaccattcacctcagtagtaacttataaaaaccgtttaaagaaggaaaatgggccccagcccctaggatccctgacttcctgatattctaaacatgagagttctgtgactttaactgagctctttaccagaagtaacgtgttgatgtatattatctttccaccatgctttgaccaaagtacattcacagtaactagagaaagcagatcatccatttctggataggtgaactacggcaaggtaagaacag

SEQ ID NO: 453769 - DNA, 4349 bp, Homo sapiens
ggcggggaggggcggggctatggagaggaggaggaagatggcgggcgggctgctctgaagagacctcggcggcggcggaggaggagagaagcgcagcgccgcgccgcgccggggcccatgtggggaggagtcggagtcgctgttgccgccgccgcctgtagctgctggacccgagtgggagtgagggggaaacggcaggatgaagttcgccgagcacctctccgcgcacatcactcccgagtggaggaagcaatacatccagtatgaggctttcaaggatatgctgtattcagctcaggaccaggcaccttctgtggaagttacagatgaggacacagtaaagaggtattttgccaagtttgaagagaagtttttccaaacctgtgaaaaagaacttgccaaaatcaacacattttattcagagaagctcgcagaggctcagcgcaggtttgctacacttcagaatgagcttcagtcatcactggatgcacagaaagaaagcactggtgttactacgctgcgacaacgcagaaagccagtcttccacttgtcccatgaggaacgtgtccaacatagaaatattaaagaccttaaactggccttcagtgagttctacctcagtctaatcctgctgcagaactatcagaatctgaattttacagggtttcgaaaaatcctgaaaaagcatgacaagatcctggaaacatctcgtggagcagattggcgagtggctcacgtagaggtggccccattttatacatgcaagaaaatcaaccagcttatctctgaaactgaggctgtagtgaccaatgaacttgaagatggtgacagacaaaaggctatgaagcgtttacgtgtcccccctttgggagctgctcagcctgcaccagcatggactacttttagagttggcctattttgtggaatattcattgtactgaatattacccttgtgcttgccgctgtatttaaacttgaaacagatagaagtatatggcccttgataagaatctatcggggtggctttcttctgattgaattcctttttctactgggcatcaacacgtatggttggagacaggctggagtaaaccatgtactcatctttgaacttaatccgagaagcaatttgtctcatcaacatctctttgagattgctggattcctcgggatattgtggtgcctgagccttctggcatgcttctttgctccaattagtgtcatccccacatatgtgtatccacttgccctttatggatttatggttttcttccttatcaaccccaccaaaactttctactataaatcccggttttggctgcttaaactgctgtttcgagtatttacagcccccttccataaggtaggctttgctgatttctggctggcggatcagctgaacagcctgtcagtgatactgatggacctggaatatatgatctgcttctacagtttggagctcaaatgggatgaaagtaagggcctgttgccaaataattcagaagaatcaggaatttgccacaaatatacatatggtgtgcgggccattgttcagtgcattcctgcttggcttcgcttcatccagtgcctgcgccgatatcgagacacaaaaagggcctttcctcatttagttaatgctggcaaatactccacaactttcttcatggtgacgtttgcagccctttacagcactcacaaagaacgaggtcactcggacactatggtgttcttttacctgtggattgtcttttatatcatcagttcctgctataccctcatctgggatctcaagatggactggggtctcttcgataagaatgctggagagaacactttcctccgggaagagattgtatacccccaaaaagcctactactactgtgccataatagaggatgtgattctgcgctttgcttggactatccaaatctcgattacctctacaactttgttgcctcattctggggacatcattgctactgtctttgccccacttgaggttttccggcgatttgtgtggaacttcttccgcctggagaatgaacatctgaataactgtggtgaattccgtgctgtgcgggacatctctgtggcccccctgaacgcagatgatcagactctcctagaacagatgatggaccaggatgatggggtacgaaaccgccagaagaatcggtcatggaagtacaaccagagcatatccctgcgccggcctcgcctcgcttctcaatccaaggctcgtgacactaaggtattgatagaagacacagatgatgaagctaacacttgaattttctgaagtctagcttaacatctttggttttcctactctacaatcctttcctcgaccaacgcaacctctagtacctttccagccgaaaacaggagaaaacacataacacattttccgagctcttccggatcggatcctatggactccaaacaagctcactgtgtttcttttcttttcttctggtttaattttaattttctattttcaaaacaaatatttacttcatttgccaatcagaggatgttttaagaaacaaaacatagtatcttatggattgtttacaatcacaaggacatagatacctatcaggatgaagaacaggcattgcaaggaccctctgatgggacggtactgagatatctcggcttccgctcagcccggttttgactggttgaaaccggacattggtttttaaattttttgtcagtttatgtggagaatttttttctttccttcatacccagcgcaaaggcactggccgcacttgcaggaaaagtgcaacttaaagcagtaccttcattcatgaagctactttttaatttgatgtaacttttcttattttgggaagggttgctgggtgggtgggaaatatgatgtatttgttacacatagttttctcattatttatgaaacttaaccatacagaatgatataactcctgtgcaatgaaggtgataacagtaaaagaaggcaggggaaacttacgttggatgacatttatgagggtcagtcccacatacctctttcaggagacaacttgcaccagtttgaccttttcttttctttgtttttattttaagccaaagtttcattgctaacttcttaagttgctgctgctttagagtcctgagcatatctctcgtaacaaggaatcccacacttcacaccaccggctgaatttcatggaagaggttctgataatttttttaactttttaaggaacagatgtggaatacactggcccatatttcaaccttaacagctgaagctatgccttattatgcatccacatgtatggtccctgtagcgtgacctttactagctctgaatcagaagacagagctatttcagaggctctgtgtgccctcactagatagtttttcttctgggttcaaccactttagccagaatttgatcaaattaaaagtctgtcatggggaaactatatttttgagcacatggaacaaattatacttcctcattcatattatgttgatacaaaagaccttggcagccatttctcccagcagttttaaaggatgaacattggatttcatgccatcccatagaaaacctgttttaaaattttagggatctttacttggtcatacatgaaaagtacactgcttagaaattatagactattatgatctgtccacagtgcccattgtcacttctttgtctcatttcttccctttgttccttagtcatccaaataagcctgaaaaccataagagatattactttattgaatatggttggcattaaatttagcatttcattatctaacaaaattaatataaattccaggacatggtaaaatgtgttttaataacccccagacccaaatgaaaatttcaaagtcaataccagcagattcatgaaagtaaatttagtcctataattttcagcttaattataaacaaaggaacaaataagtggaagggcagctattaccattcgcttagtcaaaacattcggttactgccctttaatacactcctatcatcagcacttccaccatgtattacaagtcttgacccatccctgtcgtaactccagtaaaagttactgttactagaaaatttttatcaattaactgacaaatagtttctttttaaagtagtttcttccatctttattctgactagcttccaaaatgtgttccctttttgaatcgaggtttttttgttttgttttgttttctgaaaaaatcatacaactttgtgcttctattgcttttttgtgttttgttaagcatgtcccttggcccaaatggaagaggaaatgtttaattaatgctttttagtttaaataaattgaatcatttataata

SEQ ID NO: 453770 - DNA, 4508 bp, Homo sapiens
ggcggggaggggcggggctatggagaggaggaggaagatggcgggcgggctgctctgaagagacctcggcggcggcggaggaggagagaagcgcagcgccgcgccgcgccggggcccatgtggggaggagtcggagtcgctgttgccgccgccgcctgtagctgctggacccgagtgggagtgagggggaaacggcaggatgaagttcgccgagcacctctccgcgcacatcactcccgagtggaggaagcaatacatccagtatgaggctttcaaggatatgctgtattcagctcaggaccaggcaccttctgtggaagttacagatgaggacacagtaaagaggtattttgccaagtttgaagagaagtttttccaaacctgtgaaaaagaacttgccaaaatcaacacattttattcagagaagctcgcagaggctcagcgcaggtttgctacacttcagaatgagcttcagtcatcactggatgcacagaaagaaagcactggtgttactacgctgcgacaacgcagaaagccagtcttccacttgtcccatgaggaacgtgtccaacatagaaatattaaagaccttaaactggccttcagtgagttctacctcagtctaatcctgctgcagaactatcagaatctgaattttacagggtttcgaaaaatcctgaaaaagcatgacaagatcctggaaacatctcgtggagcagattggcgagtggctcacgtagaggtggccccattttatacatgcaagaaaatcaaccagcttatctctgaaactgaggctgtagtgaccaatgaacttgaagatggtgacagacaaaaggctatgaagcgtttacgtgtcccccctttgggagctgctcagcctgcaccagcatggactacttttagagttggcctattttgtggaatattcattgtactgaatattacccttgtgcttgccgctgtatttaaacttgaaacagatagaagtatatggcccttgataagaatctatcggggtggctttcttctgattgaattcctttttctactgggcatcaacacgtatggttggagacaggctggagtaaaccatgtactcatctttgaacttaatccgagaagcaatttgtctcatcaacatctctttgagattgctggattcctcgggatattgtggtgcctgagccttctggcatgcttctttgctccaattagtgtcatccccacatatgtgtatccacttgccctttatggatttatggttttcttccttatcaaccccaccaaaactttctactataaatcccggttttggctgcttaaactgctgtttcgagtatttacagcccccttccataaggtaggctttgctgatttctggctggcggatcagctgaacagcctgtcagtgatactgatggacctggaatatatgatctgcttctacagtttggagctcaaatgggatgaaagtaagggcctgttgccaaataattcagaagaatcaggaatttgccacaaatatacatatggtgtgcgggccattgttcagtgcattcctgcttggcttcgcttcatccagtgcctgcgccgatatcgagacacaaaaagggcctttcctcatttagttaatgctggcaaatactccacaactttcttcatggtgacgtttgcagccctttacagcactcacaaagaacgaggtcactcggacactatggtgttcttttacctgtggattgtcttttatatcatcagttcctgctataccctcatctgggatctcaagatggactggggtctcttcgataagaatgctggagagaacactttcctccgggaagagattgtatacccccaaaaagcctactactactgtgccataatagaggatgtgattctgcgctttgcttggactatccaaatctcgattacctctacaactttgttgcctcattctggggacatcattgctactgtctttgccccacttgaggttttccggcgatttgtgtggaacttcttccgcctggagaatgaacatctgaataactgtggtgaattccgtgctgtgcgggacatctctgtggcccccctgaacgcagatgatcagactctcctagaacagatgatggaccaggatgatggggtacgaaaccgccagaagaatcggtcatggaagtacaaccagagcatatccctgcgccggcctcgcctcgcttctcaatccaaggctcgtgacactaaggtattgatagaagacacagatgatgaagctaacacttgaattttctgaagtctagcttaacatctttggttttcctactctacaatcctttcctcgaccaacgcaacctctagtacctttccagccgaaaacaggagaaaacacataacacattttccgagctcttccggatcggatcctatggactccaaacaagctcactgtgtttcttttcttttcttctggtttaattttaattttctattttcaaaacaaatatttacttcatttgccaatcagaggatgttttaagaaacagatgaagaacaggcattgcaaggaccctctgatgggacggtactgagatatctcggcttccgctcagcccggttttgactggttgaaaccggacattggtttttaaattttttgtcagtttatgtggagaatttttttctttccttcatacccagcgcaaaggcactggccgcacttgcaggaaaagtgcaacttaaagcagtaccttcattcatgaagctactttttaatttgatgtaacttttcttattttgggaagggttgctgggtgggtgggaaatatgatgtatttgttacacatagttttctcattatttatgaaacttaaccatacagaatgatataactcctgtgcaatgaaggtgataacagtaaaagaaggcaggggaaacttacgttggatgacatttatgagggtcagtcccacatacctctttcaggagacaacttgcaccagtttgaccttttcttttctttgtttttattttaagccaaagtttcattgctaacttcttaagttgctgctgctttagagtcctgagcatatctctcgtaacaaggaatcccacacttcacaccaccggctgaatttcatggaagaggttctgataatttttttaactttttaaggaacagatgtggaatacactggcccatatttcaaccttaacagctgaagctatgccttattatgcatccacatgtatggtccctgtagcgtgacctttactagctctgaatcagaagacagagctatttcagaggctctgtgtgccctcactagatagtttttcttctgggttcaaccactttagccagaatttgatcaaattaaaagtctgtcatggggaaactatatttttgagcacatggaacaaattatacttcctcattcatattatgttgatacaaaagaccttggcagccatttctcccagcagttttaaaggatgaacattggatttcatgccatcccatagaaaacctgttttaaaattttagggatctttacttggtcatacatgaaaagtacactgcttagaaattatagactattatgatctgtccacagtgcccattgtcacttctttgtctcatttcttccctttgttccttagtcatccaaataagcctgaaaaccataagagatattactttattgaatatggttggcattaaatttagcatttcattatctaacaaaattaatataaattccaggacatggtaaaatgtgttttaataacccccagacccaaatgaaaatttcaaagtcaataccagcagattcatgaaagtaaatttagtcctataattttcagcttaattataaacaaaggaacaaataagtggaagggcagctattaccattcgcttagtcaaaacattcggttactgccctttaatacactcctatcatcagcacttccaccatgtattacaagtcttgacccatccctgtcgtaactccagtaaaagttactgttactagaaaatttttatcaattaactgacaaatagtttctttttaaagtagtttcttccatctttattctgactagcttccaaaatgtgttccctttttgaatcgaggtttttttgttttgttttgttttctgaaaaaatcatacaactttgtgcttctattgcttttttgtgttttgttaagcatgtcccttggcccaaatggaagaggaaatgtttaattaatgctttttagtttaaataaattgaatcatttataataatcagtgttaacaatttagtgacccttggtaggttaaaggttgcattatttatacttgagatttttttcccctaactattctgttttttgtactttaaaactatgggggaaatatcactggtctgtcaagaaacagcagtaattattactgagttaaattgaaaagtccagtggaccaggcatttcttatataaataaaattggtggtactaa

SEQ ID NO: 453771 - DNA, 3633 bp, Homo sapiens
tctttaggctcaaatacttgaaaagtcagtatgaatatggaaagatttgtttacataaacgtgtatatttttagatgaaaaatcagggggtagtggcatctccctgatcccttaacaatatttggatttttgcaaagaattagcagcatccatgctgttttctaactatagttattcctgctttttttcctcctttacttcctttcttagttatccattcagctcattcctttcactgctaattctcaacctagccactgttgccaggtctctgtatttatgattggttctttggtttccattttatcaactaaagtaatcatgctgaatggtcagacatgaaatggagacatttaatacgacttttcttgtttctgtgttttctgattttttttttctttcagtttcgagtatttacagcccccttccataaggtaggctttgctgatttctggctggcggatcagctgaacagcctgtcagtgatactgatggacctggaatatatgatctgcttctacagtttggagctcaaatgggatgaaagtaagggcctgttgccaaataattcagaagaatcaggaatttgccacaaatatacatatggtgtgcgggccattgttcagtgcattcctgcttggcttcgcttcatccagtgcctgcgccgatatcgagacacaaaaagggcctttcctcatttagttaatgctggcaaatactccacaactttcttcatggtgacgtttgcagccctttacagcactcacaaagaacgaggtcactcggacactatggtgttcttttacctgtggattgtcttttatatcatcagttcctgctataccctcatctgggatctcaagatggactggggtctcttcgataagaatgctggagagaacactttcctccgggaagagattgtatacccccaaaaagcctactactactgtgccataatagaggatgtgattctgcgctttgcttggactatccaaatctcgattacctctacaactttgttgcctcattctggggacatcattgctactgtctttgccccacttgaggttttccggcgatttgtgtggaacttcttccgcctggagaatgaacatctgaataactgtggtgaattccgtgctgtgcgggacatctctgtggcccccctgaacgcagatgatcagactctcctagaacagatgatggaccaggatgatggggtacgaaaccgccagaagaatcggtcatggaagtacaaccagagcatatccctgcgccggcctcgcctcgcttctcaatccaaggctcgtgacactaaggtattgatagaagacacagatgatgaagctaacacttgaattttctgaagtctagcttaacatctttggttttcctactctacaatcctttcctcgaccaacgcaacctctagtacctttccagccgaaaacaggagaaaacacataacacattttccgagctcttccggatcggatcctatggactccaaacaagctcactgtgtttcttttcttttcttctggtttaattttaattttctattttcaaaacaaatatttacttcatttgccaatcagaggatgttttaagaaacaaaacatagtatcttatggattgtttacaatcacaaggacatagatacctatcaggatgaagaacaggcattgcaaggaccctctgatgggacggtactgagatatctcggcttccgctcagcccggttttgactggttgaaaccggacattggtttttaaattttttgtcagtttatgtggagaatttttttctttccttcatacccagcgcaaaggcactggccgcacttgcaggaaaagtgcaacttaaagcagtaccttcattcatgaagctactttttaatttgatgtaacttttcttattttgggaagggttgctgggtgggtgggaaatatgatgtatttgttacacatagttttctcattatttatgaaacttaaccatacagaatgatataactcctgtgcaatgaaggtgataacagtaaaagaaggcaggggaaacttacgttggatgacatttatgagggtcagtcccacatacctctttcaggagacaacttgcaccagtttgaccttttcttttctttgtttttattttaagccaaagtttcattgctaacttcttaagttgctgctgctttagagtcctgagcatatctctcgtaacaaggaatcccacacttcacaccaccggctgaatttcatggaagaggttctgataatttttttaactttttaaggaacagatgtggaatacactggcccatatttcaaccttaacagctgaagctatgccttattatgcatccacatgtatggtccctgtagcgtgacctttactagctctgaatcagaagacagagctatttcagaggctctgtgtgccctcactagatagtttttcttctgggttcaaccactttagccagaatttgatcaaattaaaagtctgtcatggggaaactatatttttgagcacatggaacaaattatacttcctcattcatattatgttgatacaaaagaccttggcagccatttctcccagcagttttaaaggatgaacattggatttcatgccatcccatagaaaacctgttttaaaattttagggatctttacttggtcatacatgaaaagtacactgcttagaaattatagactattatgatctgtccacagtgcccattgtcacttctttgtctcatttcttccctttgttccttagtcatccaaataagcctgaaaaccataagagatattactttattgaatatggttggcattaaatttagcatttcattatctaacaaaattaatataaattccaggacatggtaaaatgtgttttaataacccccagacccaaatgaaaatttcaaagtcaataccagcagattcatgaaagtaaatttagtcctataattttcagcttaattataaacaaaggaacaaataagtggaagggcagctattaccattcgcttagtcaaaacattcggttactgccctttaatacactcctatcatcagcacttccaccatgtattacaagtcttgacccatccctgtcgtaactccagtaaaagttactgttactagaaaatttttatcaattaactgacaaatagtttctttttaaagtagtttcttccatctttattctgactagcttccaaaatgtgttccctttttgaatcgaggtttttttgttttgttttgttttctgaaaaaatcatacaactttgtgcttctattgcttttttgtgttttgttaagcatgtcccttggcccaaatggaagaggaaatgtttaattaatgctttttagtttaaataaattgaatcatttataataatcagtgttaacaatttagtgacccttggtaggttaaaggttgcattatttatacttgagatttttttcccctaactattctgttttttgtactttaaaactatgggggaaatatcactggtctgtcaagaaacagcagtaattattactgagttaaattgaaaagtccagtggaccaggcatttcttatataaataaaattggtggtactaa

SEQ ID NO: 453772 - DNA, 2752 bp, Homo sapiens
ggcggggaggggcggggctatggagaggaggaggaagatggcgggcgggctgctctgaagagacctcggcggcggcggaggaggagagaagcgcagcgccgcgccgcgccggggcccatgtggggaggagtcggagtcgctgttgccgccgccgcctgtagctgctggacccgagtgggagtgagggggaaacggcaggatgaagttcgccgagcacctctccgcgcacatcactcccgagtggaggaagcaatacatccagtatgaggctttcaaggatatgctgtattcagctcaggaccaggcaccttctgtggaagttacagatgaggacacagtaaagaggtattttgccaagtttgaagagaagtttttccaaacctgtgaaaaagaacttgccaaaatcaacacattttattcagagaagctcgcagaggctcagcgcaggtttgctacacttcagaatgagcttcagtcatcactggatgcacagaaagaaagcactggtgttactacgctgcgacaacgcagaaagccagtcttccacttgtcccatgaggaacgtgtccaacatagaaatattaaagaccttaaactggccttcagtgagttctacctcagtctaatcctgctgcagaactatcagaatctgaattttacagggtttcgaaaaatcctgaaaaagcatgacaagatcctggaaacatctcgtggagcagattggcgagtggctcacgtagaggtggccccattttatacatgcaagaaaatcaaccagcttatctctgaaactgaggctgtagtgaccaatgaacttgaagatggtgacagacaaaaggctatgaagcgtttacgtgtcccccctttgggagctgctcagcctgcaccagcatggactacttttagagttggcctattttgtggaatattcattgtactgaatattacccttgtgcttgccgctgtatttaaacttgaaacagatagaagtatatggcccttgataagaatctatcggggtggctttcttctgattgaattcctttttctactgggcatcaacacgtatggttggagacaggctggagtaaaccatgtactcatctttgaacttaatccgagaagcaatttgtctcatcaacatctctttgagattgctggattcctcgggatattgtggtgcctgagccttctggcatgcttctttgctccaattagtgtcatccccacatatgtgtatccacttgccctttatggatttatggttttcttccttatcaaccccaccaaaactttctactataaatcccggttttggctgcttaaactgctgtttcgagtatttacagcccccttccataaggtaggctttgctgatttctggctggcggatcagctgaacagcctgtcagtgatactgatggacctggaatatatgatctgcttctacagtttggagctcaaatgggatgaaagtaagggcctgttgccaaataattcagaagaatcaggaatttgccacaaatatacatatggtgtgcgggccattgttcagtgcattcctgcttggcttcgcttcatccagtgcctgcgccgatatcgagacacaaaaagggcctttcctcatttagttaatgctggcaaatactccacaactttcttcatggtgacgtttgcagccctttacagcactcacaaagaacgaggtcactcggacactatggtgttcttttacctgtggattgtcttttatatcatcagttcctgctataccctcatctgggatctcaagatggactggggtctcttcgataagaatgctggagagaacactttcctccgggaagagattgtatacccccaaaaagcctactactactgtgccataatagaggatgtgattctgcgctttgcttggactatccaaatctcgattacctctacaactttgttgcctcattctggggacatcattgctactgtctttgccccacttgaggttttccggtaagcaaactactgaaaagtttattaaagattctttttaacctaaaagacacccaatacttacaaattagaatttattataacttgtacttgaaaacctttaattttccaacttttctcaaatttctcctcagccaacatggtgaaaccccatctctactaaaaatagaaaaattagccgggagtagtggcgcatgcctgtagtcccagctactcaggaggctgagttgggagaattgcttgaacccaggaggaagaggttgcagtgagccaagattgcaccactgtactgcagcctgggcaacagagggagaccctgtctcaaaaaaaaaaaaagaaagaaacctgtctcacttatattaacagaataaagggggaaaaagaacctctatatttgtagaaaaggccattgataaaagtcaatacctgttcatgaaaaaaatgttttctacaaaaacacaatcaagaacatatttaacagtgaaacactataaactttcccttgaaatcaggaatgagacaagtgtgtctgctgttcccacttttatttaatatcatcaaagtatagctagcgcaatgaggaaaaagaactatcataattggaaaggaaaaaataaaactataattattcactgatgacagttacacagaaaattcaaaatagtttacaaataattagatctaatgtcacagttctgaatacatggtcaacataatataaatcagtcatttttaaaaacagtca

SEQ ID NO: 453773 - DNA, 1628 bp, Homo sapiens
ggcggggaggggcggggctatggagaggaggaggaagatggcgggcgggctgctctgaagagacctcggcggcggcggaggaggagagaagcgcagcgccgcgccgcgccggggcccatgtggggaggagtcggagtcgctgttgccgccgccgcctgtagctgctggacccgagtgggagtgagggggaaacggcaggatgaagttcgccgagcacctctccgcgcacatcactcccgagtggaggaagcaatacatccagtatgaggctttcaaggatatgctgtattcagctcaggaccaggcaccttctgtggaagttacagatgaggacacagtaaagaggtattttgccaagtttgaagagaagtttttccaaacctgtgaaaaagaacttgccaaaatcaacacattttattcagagaagctcgcagaggctcagcgcaggtttgctacacttcagaatgagcttcagtcatcactggatgcacagaaagaaagcactggtgttactacgctgcgacaacgcagaaagccagtcttccacttgtcccatgaggaacgtgtccaacatagaaatattaaagaccttaaactggccttcagtgagttctacctcagtctaatcctgctgcagaactatcagaatctgaattttacagggtttcgaaaaatcctgaaaaagcatgacaagatcctggaaacatctcgtggagcagattggcgagtggctcacgtagaggtggccccattttatacatgcaagaaaatcaaccagcttatctctgaaactgaggctgtagtgaccaatgaacttgaagatggtgacagacaaaaggctatgaagcgtttacgtgtcccccctttgggagctgctcagcctgcaccagcatggactacttttagagttggcctattttgtggaatattcattgtactgaatattacccttgtgcttgccgctgtatttaaacttgaaacagatagaagtatatggcccttgataagaatctatcggggtggctttcttctgattgaattcctttttctactgggcatcaacacgtatggttggagacaggctggagtaaaccatgtactcatctttgaacttaatccgagaagcaatttgtctcatcaacatctctttgagattgctggattcctcgggatattgtggtgcctgagccttctggcatgcttctttgctccaattagtgtcatccccacatatgtgtatccacttgccctttatggatttatggttttcttccttatcaaccccaccaaaactttctactataaatcccggttttggctgcttaaactgctggtaagtccagaaacttgtgtaccacttttagagtggcatattggttattgacttcctctaagataaaaccaaggctgctaggttgtacaactgcagaggccgtggttcacattatagtttatgtgagtggaggccctgggaaaaagtactcacgtatattttcctcctgagatcgagtatcaggtggccaaatattgagatgattttgtaaattataaacattttttacttcgtttaactagctgtgataagatgtagaactttgtaagtttccttcccccaaaaaaatgtggta

SEQ ID NO: 453774 - DNA, 4562 bp, Homo sapiens
ggcggggaggggcggggctatggagaggaggaggaagatggcgggcgggctgctctgaagagacctcggcggcggcggaggaggagagaagcgcagcgccgcgccgcgccggggcccatgtggggaggagtcggagtcgctgttgccgccgccgcctgtagctgctggacccgagtgggagtgagggggaaacggcaggatgaagttcgccgagcacctctccgcgcacatcactcccgagtggaggaagcaatacatccagtatgaggctttcaaggatatgctgtattcagctcaggaccaggcaccttctgtggaagttacagatgaggacacagtaaagaggtattttgccaagtttgaagagaagtttttccaaacctgtgaaaaagaacttgccaaaatcaacacattttattcagagaagctcgcagaggctcagcgcaggtttgctacacttcagaatgagcttcagtcatcactggatgcacagaaagaaagcactggtgttactacgctgcgacaacgcagaaagccagtcttccacttgtcccatgaggaacgtgtccaacatagaaatattaaagaccttaaactggccttcagtgagttctacctcagtctaatcctgctgcagaactatcagaatctgaattttacagggtttcgaaaaatcctgaaaaagcatgacaagatcctggaaacatctcgtggagcagattggcgagtggctcacgtagaggtggccccattttatacatgcaagaaaatcaaccagcttatctctgaaactgaggctgtagtgaccaatgaacttgaagatggtgacagacaaaaggctatgaagcgtttacgtgtcccccctttgggagctgctcagcctgcaccagcatggactacttttagagttggcctattttgtggaatattcattgtactgaatattacccttgtgcttgccgctgtatttaaacttgaaacagatagaagtatatggcccttgataagaatctatcggggtggctttcttctgattgaattcctttttctactgggcatcaacacgtatggttggagacaggctggagtaaaccatgtactcatctttgaacttaatccgagaagcaatttgtctcatcaacatctctttgagattgctggattcctcgggatattgtggtgcctgagccttctggcatgcttctttgctccaattagtgtcatccccacatatgtgtatccacttgccctttatggatttatggttttcttccttatcaaccccaccaaaactttctactataaatcccggttttggctgcttaaactgctgtttcgagtatttacagcccccttccataaggtaggctttgctgatttctggctggcggatcagctgaacagcctgtcagtgatactgatggacctggaatatatgatctgcttctacagtttggagctcaaatgggatgaaagtaagggcctgttgccaaataattcagaagaatcaggaatttgccacaaatatacatatggtgtgcgggccattgttcagtgcattcctgcttggcttcgcttcatccagtgcctgcgccgatatcgagacacaaaaagggcctttcctcatttagttaatgctggcaaatactccacaactttcttcatggtgacgtttgcagccctttacagcactcacaaagaacgaggtcactcggacactatggtgttcttttacctgtggattgtcttttatatcatcagttcctgctataccctcatctgggatctcaagatggactggggtctcttcgataagaatgctggagagaacactttcctccgggaagagattgtatacccccaaaaagcctactactactgtgccataatagaggatgtgattctgcgctttgcttggactatccaaatctcgattacctctacaactttgttgcctcattctggggacatcattgctactgtctttgccccacttgaggttttccggcgatttgtgtggaacttcttccgcctggagaatgaacatctgaataactgtggtgaattccgtgctgtgcgggacatctctgtggcccccctgaacgcagatgatcagactctcctagaacagatgatggaccaggatgatggggtacgaaaccgccagaagaatcggtcatggaagtacaaccagagcatatccctgcgccggcctcgcctcgcttctcaatccaaggctcgtgacactaaggtattgatagaagacacagatgatgaagctaacacttgaattttctgaagtctagcttaacatctttggttttcctactctacaatcctttcctcgaccaacgcaacctctagtacctttccagccgaaaacaggagaaaacacataacacattttccgagctcttccggatcggatcctatggactccaaacaagctcactgtgtttcttttcttttcttctggtttaattttaattttctattttcaaaacaaatatttacttcatttgccaatcagaggatgttttaagaaacaaaacatagtatcttatggattgtttacaatcacaaggacatagatacctatcaggatgaagaacaggcattgcaaggaccctctgatgggacggtactgagatatctcggcttccgctcagcccggttttgactggttgaaaccggacattggtttttaaattttttgtcagtttatgtggagaatttttttctttccttcatacccagcgcaaaggcactggccgcacttgcaggaaaagtgcaacttaaagcagtaccttcattcatgaagctactttttaatttgatgtaacttttcttattttgggaagggttgctgggtgggtgggaaatatgatgtatttgttacacatagttttctcattatttatgaaacttaaccatacagaatgatataactcctgtgcaatgaaggtgataacagtaaaagaaggcaggggaaacttacgttggatgacatttatgagggtcagtcccacatacctctttcaggagacaacttgcaccagtttgaccttttcttttctttgtttttattttaagccaaagtttcattgctaacttcttaagttgctgctgctttagagtcctgagcatatctctcgtaacaaggaatcccacacttcacaccaccggctgaatttcatggaagaggttctgataatttttttaactttttaaggaacagatgtggaatacactggcccatatttcaaccttaacagctgaagctatgccttattatgcatccacatgtatggtccctgtagcgtgacctttactagctctgaatcagaagacagagctatttcagaggctctgtgtgccctcactagatagtttttcttctgggttcaaccactttagccagaatttgatcaaattaaaagtctgtcatggggaaactatatttttgagcacatggaacaaattatacttcctcattcatattatgttgatacaaaagaccttggcagccatttctcccagcagttttaaaggatgaacattggatttcatgccatcccatagaaaacctgttttaaaattttagggatctttacttggtcatacatgaaaagtacactgcttagaaattatagactattatgatctgtccacagtgcccattgtcacttctttgtctcatttcttccctttgttccttagtcatccaaataagcctgaaaaccataagagatattactttattgaatatggttggcattaaatttagcatttcattatctaacaaaattaatataaattccaggacatggtaaaatgtgttttaataacccccagacccaaatgaaaatttcaaagtcaataccagcagattcatgaaagtaaatttagtcctataattttcagcttaattataaacaaaggaacaaataagtggaagggcagctattaccattcgcttagtcaaaacattcggttactgccctttaatacactcctatcatcagcacttccaccatgtattacaagtcttgacccatccctgtcgtaactccagtaaaagttactgttactagaaaatttttatcaattaactgacaaatagtttctttttaaagtagtttcttccatctttattctgactagcttccaaaatgtgttccctttttgaatcgaggtttttttgttttgttttgttttctgaaaaaatcatacaactttgtgcttctattgcttttttgtgttttgttaagcatgtcccttggcccaaatggaagaggaaatgtttaattaatgctttttagtttaaataaattgaatcatttataataatcagtgttaacaatttagtgacccttggtaggttaaaggttgcattatttatacttgagatttttttcccctaactattctgttttttgtactttaaaactatgggggaaatatcactggtctgtcaagaaacagcagtaattattactgagttaaattgaaaagtccagtggaccaggcatttcttatataaataaaattggtggtactaa

SEQ ID NO: 453775 - DNA, 5217 bp, Homo sapiens
ggcggggaggggcggggctatggagaggaggaggaagatggcgggcgggctgctctgaagagacctcggcggcggcggaggaggagagaagcgcagcgccgcgccgcgccggggcccatgtggggaggagtcggagtcgctgttgccgccgccgcctgtagctgctggacccgagtgggagtgagggggaaacggcaggatgaagttcgccgagcacctctccgcgcacatcactcccgagtggaggaagcaatacatccagtatgaggctttcaaggatatgctgtattcagctcaggaccaggcaccttctgtggaagttacagatgaggacacagtaaagaggtattttgccaagtttgaagagaagtttttccaaacctgtgaaaaagaacttgccaaaatcaacacattttattcagagaagctcgcagaggctcagcgcaggtttgctacacttcagaatgagcttcagtcatcactggatgcacagaaagaaagcactggtgttactacgctgcgacaacgcagaaagccagtcttccacttgtcccatgaggaacgtgtccaacatagaaatattaaagaccttaaactggccttcagtgagttctacctcagtctaatcctgctgcagaactatcagaatctgaattttacagggtttcgaaaaatcctgaaaaagcatgacaagatcctggaaacatctcgtggagcagattggcgagtggctcacgtagaggtggccccattttatacatgcaagaaaatcaaccagcttatctctgaaactgaggctgtagtgaccaatgaacttgaagatggtgacagacaaaaggctatgaagcgtttacgtgtcccccctttgggagctgctcagcctgcaccagcatggactacttttagagttggcctattttgtggaatattcattgtactgaatattacccttgtgcttgccgctgtatttaaacttgaaacagatagaagtatatggcccttgataagaatctatcggggtggctttcttctgattgaattcctttttctactgggcatcaacacgtatggttggagacaggctggagtaaaccatgtactcatctttgaacttaatccgagaagcaatttgtctcatcaacatctctttgagattgctggattcctcgggatattgtggtgcctgagccttctggcatgcttctttgctccaattagtgtcatccccacatatgtgtatccacttgccctttatggatttatggttttcttccttatcaaccccaccaaaactttctactataaatcccggttttggctgcttaaactgctgtttcgagtatttacagcccccttccataaggtaggctttgctgatttctggctggcggatcagctgaacagcctgtcagtgatactgatggacctggaatatatgatctgcttctacagtttggagctcaaatgggatgaaagtaagggcctgttgccaaataattcagaagaatcaggaatttgccacaaatatacatatggtgtgcgggccattgttcagtgcattcctgcttggcttcgcttcatccagtgcctgcgccgatatcgagacacaaaaagggcctttcctcatttagttaatgctggcaaatactccacaactttcttcatggtgacgtttgcagccctttacagcactcacaaagaacgaggtcactcggacactatggtgttcttttacctgtggattgtcttttatatcatcagttcctgctataccctcatctgggatctcaagatggactggggtctcttcgataagaatgctggagagaacactttcctccgggaagagattgtatacccccaaaaagcctactactactgtgccataatagaggatgtgattctgcgctttgcttggactatccaaatctcgattacctctacaactttgttgcctcattctggggacatcattgctactgtctttgccccacttgaggttttccggcgatttgtgtggaacttcttccgcctggagaatgaacatctgaataactgtggtgaattccgtgctgtgcgggacatctctgtggcccccctgaacgcagatgatcagactctcctagaacagatgatggaccaggatgatggggtacgaaaccgccagaagaatcggtcatggaagtacaaccagagcatatccctgcgccggcctcgcctcgcttctcaatccaaggctcgtgacactaaggtattgatagaagacacagatgatgaagctaacacttgaattttctgaagtctagcttaacatctttggttttcctactctacaatcctttcctcgaccaacgcaacctctagtacctttccagccgaaaacaggagaaaacacataacacattttccgagctcttccggatcggatcctatggactccaaacaagctcactgtgtttcttttcttttcttctggtttaattttaattttctattttcaaaacaaatatttacttcatttgccaatcagaggatgttttaagaaacaaaacatagtatcttatggattgtttacaatcacaaggacatagatacctatcaggatgaagaacaggcattgcaaggaccctctgatgggacggtactgagatatctcggcttccgctcagcccggttttgactggttgaaaccggacattggtttttaaattttttgtcagtttatgtggagaatttttttctttccttcatacccagcgcaaaggcactggccgcacttgcaggaaaagtgcaacttaaagcagtaccttcattcatgaagctactttttaatttgatgtaacttttcttattttgggaagggttgctgggtgggtgggaaatatgatgtatttgttacacatagttttctcattatttatgaaacttaaccatacagaatgatataactcctgtgcaatgaaggtgataacagtaaaagaaggcaggggaaacttacgttggatgacatttatgagggtcagtcccacatacctctttcaggagacaacttgcaccagtttgaccttttcttttctttgtttttattttaagccaaagtttcattgctaacttcttaagttgctgctgctttagagtcctgagcatatctctcgtaacaaggaatcccacacttcacaccaccggctgaatttcatggaagaggttctgataatttttttaactttttaaggaacagatgtggaatacactggcccatatttcaaccttaacagctgaagctatgccttattatgcatccacatgtatggtccctgtagcgtgacctttactagctctgaatcagaagacagagctatttcagaggctctgtgtgccctcactagatagtttttcttctgggttcaaccactttagccagaatttgatcaaattaaaagtctgtcatggggaaactatatttttgagcacatggaacaaattatacttcctcattcatattatgttgatacaaaagaccttggcagccatttctcccagcagttttaaaggatgaacattggatttcatgccatcccatagaaaacctgttttaaaattttagggatctttacttggtcatacatgaaaagtacactgcttagaaattatagactattatgatctgtccacagtgcccattgtcacttctttgtctcatttcttccctttgttccttagtcatccaaataagcctgaaaaccataagagatattactttattgaatatggttggcattaaatttagcatttcattatctaacaaaattaatataaattccaggacatggtaaaatgtgttttaataacccccagacccaaatgaaaatttcaaagtcaataccagcagattcatgaaagtaaatttagtcctataattttcagcttaattataaacaaaggaacaaataagtggaagggcagctattaccattcgcttagtcaaaacattcggttactgccctttaatacactcctatcatcagcacttccaccatgtattacaagtcttgacccatccctgtcgtaactccagtaaaagttactgttactagaaaatttttatcaattaactgacaaatagtttctttttaaagtagtttcttccatctttattctgactagcttccaaaatgtgttccctttttgaatcgaggtttttttgttttgttttgttttctgaaaaaatcatacaactttgtgcttctattgcttttttgtgttttgttaagcatgtcccttggcccaaatggaagaggaaatgtttaattaatgctttttagtttaaataaattgaatcatttataataatcagtgttaacaatttagtgacccttggtaggttaaaggttgcattatttatacttgagatttttttcccctaactattctgttttttgtactttaaaactatgggggaaatatcactggtctgtcaagaaacagcagtaattattactgagttaaattgaaaagtccagtggaccaggcatttcttatataaataaaattggtggtactaaaaaaaaaaaaaaaaaaaaaaaaaaaaaaaaaaaaaaaaaaaaaaaaaaaaaaaaaaaaaaaaaaaaagagagagagaagagaggaggggggggggagaggaaggaggggggggagaaaaaacaaaacagaggcacccacgcaagggggacaaaggggggcccacaaaaagagagaaaggaaaaaacaacgagcaagagaaggagagaaaggaaaaagagaacaagagagaagaaggggacagaaaagagaagagacgaggagcgcacacacagacgaaacagagcagcacgaacagacacaggagcgcgacaaaaacacgggcgacacgaacaaacaaacggcaaaagaaaaaagaagacaaacaaagggaaaaaagaagaaaaactgatcaggagaggagaagaagggaggagcgacaacagagaacggggaggcatgagaaggtggagacgcgagaaagacacgcaagggaaggcacaagggagcccgcacacacagacaagagcccgcaggcgcacacgcaagactacacagcggggagaacagcaccaggaggcaaagaacaaaagatagcgagacacagaaagcacaaagagaacagagagaagcaagacaacaccgacgacgagcagcacgccgggccgcgggcaggca

SEQ ID NO: 453776 - DNA, 4479 bp, Homo sapiens
ggcggggaggggcggggctatggagaggaggaggaagatggcgggcgggctgctctgaagagacctcggcggcggcggaggaggagagaagcgcagcgccgcgccgcgccggggcccatgtggggaggagtcggagtcgctgttgccgccgccgcctgtagctgctggacccgagtgggagtgagggggaaacggcaggatgaagttcgccgagcacctctccgcgcacatcactcccgagtggaggaagcaatacatccagtatgaggctttcaaggatatgctgtattcagctcaggaccaggcaccttctgtggaagttacagatgaggacacagtaaagaggtattttgccaagtttgaagagaagtttttccaaacctgtgaaaaagaacttgccaaaatcaacacattttattcagagaagctcgcagaggctcagcgcaggtttgctacacttcagaatgagcttcagtcatcactggatgcacagaaagaaagcactggtgttactacgctgcgacaacgcagaaagccagtcttccacttgtcccatgaggaacgtgtccaacatagaaatattaaagaccttaaactggccttcagtgagttctacctcagtctaatcctgctgcagaactatcagaatctgaattttacagggtttcgaaaaatcctgaaaaagcatgacaagatcctggaaacatctcgtggagcagattggcgagtggctcacgtagaggtggccccattttatacatgcaagaaaatcaaccagcttatctctgaaactgaggctgtagtgaccaatgaacttgaagatggtgacagacaaaaggctatgaagcgtttacgtgtcccccctttgggagctgctcagcctgcaccagcatggactacttttagagttggcctattttgtggaatattcattgtactgaatattacccttgtgcttgccgctgtatttaaacttgaaacagatagaagtatatggcccttgataagaatctatcggggtggctttcttctgattgaattcctttttctactgggcatcaacacgtatggttggagacaggctggagtaaaccatgtactcatctttgaacttaatccgagaagcaatttgtctcatcaacatctctttgagattgctggattcctcgggatattgtggtgcctgagccttctggcatgcttctttgctccaattagtgtcatccccacatatgtgtatccacttgccctttatggatttatggttttcttccttatcaaccccaccaaaactttctactataaatcccggttttggctgcttaaactgctgtttcgagtatttacagcccccttccataaggtaggctttgctgatttctggctggcggatcagctgaacagcctgtcagtgatactgatggacctggaatatatgatctgcttctacagtttggagctcaaatgggatgaaagtaagggcctgttgccaaataattcagaagaatcaggaatttgccacaaatatacatatggtgtgcgggccattgttcagtgcattcctgcttggcttcgcttcatccagtgcctgcgccgatatcgagacacaaaaagggcctttcctcatttagttaatgctggcaaatactccacaactttcttcatggtgacgtttgcagccctttacagcactcacaaagaacgaggtcactcggacactatggtgttcttttacctgtggattgtcttttatatcatcagttcctgctataccctcatctgggatctcaagatggactggggtctcttcgataagaatgctggagagaacactttcctccgggaagagattgtatacccccaaaaagcctactactactgtgccataatagaggatgtgattctgcgctttgcttggactatccaaatctcgattacctctacaactttgttgcctcattctggggacatcattgctactgtctttgccccacttgaggttttccggcgatttgtgtggaacttcttccgcctggagaatgaacatctgaataactgtggtgaattccgtgctgtgcgggacatctctgtggcccccctgaacgcagatgatcagactctcctagaacagatgatggaccaggatgatggggtacgaaaccgccagaagaatcggtcatggaagtacaaccagagcatatccctgcgccggcctcgcctcgcttctcaatccaaggctcgtgacactaaggtattgatagaagacacagatgatgaagctaacacttgaattttctgaagtctagcttaacatctttggttttcctactctacaatcctttcctcgaccaacgcaacctctagtacctttccagccgaaaacaggagaaaacacataacacattttccgagctcttccggatcggatcctatggactccaaacaagctcactgtgtttcttttcttttcttctggtttaattttaattttctattttcaaaacaaatatttacttcatttgccaatcagaggatgttttaagaaacaaaacatagtatcttatggattgtttacaatcacaaggacatagatacctatcaggatgaagaacaggcattgcaaggaccctctgatgggacggtactgagatatctcggcttccgctcagcccggttttgactggttgaaaccggacattggtttttaaattttttgtcagtttatgtggagaatttttttctttccttcatacccagcgcaaaggcactggccgcacttgcaggaaaagtgcaacttaaagcagtaccttcattcatgaagctactttttaatttgatgtaacttttcttattttgggaagggttgctgggtgggtgggaaatatgatgtatttgttacacatagttttctcattatttatgaaacttaaccatacagaatgatataactcctgtgcaatgaaggtgataacagtaaaagaaggcaggggaaacttacgttggatgacatttatgagggtcagtcccacatacctctttcaggagacaacttgcaccagtttgaccttttcttttctttgtttttattttaagccaaagtttcattgctaacttcttaagttgctgctgctttagagtcctgagcatatctctcgtaacaaggaatcccacacttcacaccaccggctgaatttcatggaagaggttctgataatttttttaactttttaaggaacagatgtggaatacactggcccatatttcaaccttaacagctgaagctatgccttattatgcatccacatgtatggtccctgtagcgtgacctttactagctctgaatcagaagacagagctatttcagaggctctgtgtgccctcactagatagtttttcttctgggttcaaccactttagccagaatttgatcaaattaaaagtctgtcatggggaaactatatttttgagcacatggaacaaattatacttcctcattcatattatgttgatacaaaagaccttggcagccatttctcccagcagttttaaaggatgaacattggatttcatgccatcccatagaaaacctgttttaaaattttagggatctttacttggtcatacatgaaaagtacactgcttagaaattatagactattatgatctgtccacagtgcccattgtcacttctttgtctcatttcttccctttgttccttagtcatccaaataagcctgaaaaccataagagatattactttattgaatatggttggcattaaatttagcatttcattatctaacaaaattaatataaattccaggacatggtaaaatgtgttttaataacccccagacccaaatgaaaatttcaaagtcaataccagcagattcatgaaagtaaatttagtcctataattttcagcttaattataaacaaaggaacaaataagtggaagggcagctattaccattcgcttagtcaaaacattcggttactgccctttaatacactcctatcatcagcacttccaccatgtattacaagtcttgacccatccctgtcgtaactccagtaaaagttactgttactagaaaatttttatcaattaactgacaaatagtttctttttaaagtagtttcttccatctttattctgactagcttccaaaatgtgttccctttttgaatcgaggtttttttgttttgttttgttttctgaaaaaatcatacaactttgtgcttctattgcttttttgtgttttgttaagcatgtcccttggcccaaatggaagaggaaatgtttaattaatgctttttagtttaaataaattgaatcatttataataatcagtgttaacaatttagtgacccttggtaggttattggctatttactggaattttccctacatcgtttggcttaaacactggggatactggggtgaaaggattatggtatgaaagccgccggttttta

SEQ ID NO: 453777 - DNA, 2823 bp, Homo sapiens
ggcggggaggggcggggctatggagaggaggaggaagatggcgggcgggctgctctgaagagacctcggcggcggcggaggaggagagaagcgcagcgccgcgccgcgccggggcccatgtggggaggagtcggagtcgctgttgccgccgccgcctgtagctgctggacccgagtgggagtgagggggaaacggcaggatgaagttcgccgagcacctctccgcgcacatcactcccgagtggaggaagcaatacatccagtatgaggctttcaaggatatgctgtattcagctcaggaccaggcaccttctgtggaagttacagatgaggacacagtaaagaggtattttgccaagtttgaagagaagtttttccaaacctgtgaaaaagaacttgccaaaatcaacacattttattcagagaagctcgcagaggctcagcgcaggtttgctacacttcagaatgagcttcagtcatcactggatgcacagaaagaaagcactggtgttactacgctgcgacaacgcagaaagccagtcttccacttgtcccatgaggaacgtgtccaacatagaaatattaaagaccttaaactggccttcagtgagttctacctcagtctaatcctgctgcagaactatcagaatctgaattttacagggtttcgaaaaatcctgaaaaagcatgacaagatcctggaaacatctcgtggagcagattggcgagtggctcacgtagaggtggccccattttatacatgcaagaaaatcaaccagcttatctctgaaactgaggctgtagtgaccaatgaacttgaagatggtgacagacaaaaggctatgaagcgtttacgtgtcccccctttgggagctgctcagcctgcaccagcatggactacttttagagttggcctattttgtggaatattcattgtactgaatattacccttgtgcttgccgctgtatttaaacttgaaacagatagaagtatatggcccttgataagaatctatcggggtggctttcttctgattgaattcctttttctactgggcatcaacacgtatggttggagacaggctggagtaaaccatgtactcatctttgaacttaatccgagaagcaatttgtctcatcaacatctctttgagattgctggattcctcgggatattgtggtgcctgagccttctggcatgcttctttgctccaattagtgtcatccccacatatgtgtatccacttgccctttatggatttatggttttcttccttatcaaccccaccaaaactttctactataaatcccggttttggctgcttaaactgctgtttcgagtatttacagcccccttccataaggtaggctttgctgatttctggctggcggatcagctgaacagcctgtcagtgatactgatggacctggaatatatgatctgcttctacagtttggagctcaaatgggatgaaagtaagggcctgttgccaaataattcagaagaatcaggaatttgccacaaatatacatatggtgtgcgggccattgttcagtgcattcctgcttggcttcgcttcatccagtgcctgcgccgatatcgagacacaaaaagggcctttcctcatttagttaatgctggcaaatactccacaactttcttcatggtgacgtttgcagccctttacagcactcacaaagaacgaggtcactcggacactatggtgttcttttacctgtggattgtcttttatatcatcagttcctgctataccctcatctgggatctcaagatggactggggtctcttcgataagaatgctggagagaacactttcctccgggaagagattgtatacccccaaaaagcctactactactgtgccataatagaggatgtgattctgcgctttgcttggactatccaaatctcgattacctctacaactttgttgcctcattctggggacatcattgctactgtctttgccccacttgaggttttccggcgatttgtgtggaacttcttccgcctggagaatgaacatctgaataactgtggtgaattccgtgctgtgcgggacatctctgtggcccccctgaacgcagatgatcagactctcctagaacagatgatggaccaggatgatggggtacgaaaccgccagaagaatcggtcatggaagtacaaccagagcatatccctgcgccggcctcgcctcgcttctcaatccaaggctcgtgacactaaggtattgatagaagacacagatgatgaagctaacacttgaattttctgaagtctagcttaacatctttggttttcctactctacaatcctttcctcgaccaacgcaacctctagtacctttccagccgaaaacaggagaaaacacataacacattttccgagctcttccggatcggatcctatggactccaaacaagctcactgtgtttcttttcttttcttctggtttaattttaattttctattttcaaaacaaatatttacttcatttgccaatcagaggatgttttaagaaacaaaacatagtatcttatggattgtttacaatcacaaggacatagatacctatcaggatgaagaacaggcattgcaaggaccctctgatgggacggtactgagatatctcggcttccgctcagcccggttttgactggttgaaaccggacattggtttttaaattttttgtcagtttatgtggagaatttttttctttccttcatacccagcgcaaaggcactggccgcacttgcaggaacttttcttttttggggggttgctgggtggtgggtttt

SEQ ID NO: 453778 - DNA, 2307 bp, Homo sapiens
ggcggggaggggcggggctatggagaggaggaggaagatggcgggcgggctgctctgaagagacctcggcggcggcggaggaggagagaagcgcagcgccgcgccgcgccggggcccatgtggggaggagtcggagtcgctgttgccgccgccgcctgtagctgctggacccgagtgggagtgagggggaaacggcaggatgaagttcgccgagcacctctccgcgcacatcactcccgagtggaggaagcaatacatccagtatgaggctttcaaggatatgctgtattcagctcaggaccaggcaccttctgtggaagttacagatgaggacacagtaaagaggtattttgccaagtttgaagagaagtttttccaaacctgtgaaaaagaacttgccaaaatcaacacattttattcagagaagctcgcagaggctcagcgcaggtttgctacacttcagaatgagcttcagtcatcactggatgcacagaaagaaagcactggtgttactacgctgcgacaacgcagaaagccagtcttccacttgtcccatgaggaacgtgtccaacatagaaatattaaagaccttaaactggccttcagtgagttctacctcagtctaatcctgctgcagaactatcagaatctgaattttacagggtttcgaaaaatcctgaaaaagcatgacaagatcctggaaacatctcgtggagcagattggcgagtggctcacgtagaggtggccccattttatacatgcaagaaaatcaaccagcttatctctgaaactgaggctgtagtgaccaatgaacttgaagatggtgacagacaaaaggctatgaagcgtttacgtgtcccccctttgggagctgctcagcctgcaccagcatggactacttttagagttggcctattttgtggaatattcattgtactgaatattacccttgtgcttgccgctgtatttaaacttgaaacagatagaagtatatggcccttgataagaatctatcggggtggctttcttctgattgaattcctttttctactgggcatcaacacgtatggttggagacaggctggagtaaaccatgtactcatctttgaacttaatccgagaagcaatttgtctcatcaacatctctttgagattgctggattcctcgggatattgtggtgcctgagccttctggcatgcttctttgctccaattagtgtcatccccacatatgtgtatccacttgccctttatggatttatggttttcttccttatcaaccccaccaaaactttctactataaatcccggttttggctgcttaaactgctgtttcgagtatttacagcccccttccataaggtaggctttgctgatttctggctggcggatcagctgaacagcctgtcagtgatactgatggacctggaatatatgatctgcttctacagtttggagctcaaatgggatgaaagtaagggcctgttgccaaataattcagaagaatcaggaatttgccacaaatatacatatggtgtgcgggccattgttcagtgcattcctgcttggcttcgcttcatccagtgcctgcgccgatatcgagacacaaaaagggcctttcctcatttagttaatgctggcaaatactccacaactttcttcatggtgacgtttgcagccctttacagcactcacaaagaacgaggtcactcggacactatggtgttcttttacctgtggattgtcttttatatcatcagttcctgctataccctcatctgggatctcaagatggactggggtctcttcgataagaatgctggagagaacactttcctccgggaagagattgtatacccccaaaaagcctactactactgtgccataatagaggatgtgattctgcgctttgcttggactatccaaatctcgattacctctacaactttgttgcctcattctggggacatcattgctactgtctttgccccacttgaggttttccgacagaagctggaaacggaagataaacctgagagagaaagcatgactctggaatccacctgccatcagagctctctccagaccagtgctccttcccttcctcaccttcctgaatgcctcggcctggcacctgaactccccatcgctgctgccaccttcccccacccacttctttctctttcatgtgtgctacttcatcaattttttaaaagaaattctagtaaaaaaagaaaaatacctcatgacgattttctttttaaaatcatttgcttactaactaaatcaaatgttctatcccattt

SEQ ID NO: 453779 - DNA, 1505 bp, Homo sapiens
ggcgcgggggccgcgcgggcctgggctgggcggagcgggcgtacccccacggcccggccagtggaaggcgcgggcagcagcggctccgagtggccgcggcggtgggctgtgccggagtctcctccctttggtccgctgcaggttggtggcgggaggaggggacagctgcgggcgcggggagggggcgccgcgccgcgggggccatggcggagccaggaagccgggagtccgagacccgggcccgcagcccgagtgtcgccgccatggcttcgccgcagctctgccgcgcgctggtgtcggcgcaatgggtggcggaggcgctgcgggccccgcgcgctgggcagcctctgcagctgctggacgcctcctggtacctgccgaagctggggcgcgacgcgcgacgcgagttcgaggagcgccacatcccgggcgccgctttcttcgacatcgaccagtgcagcgaccgcacctcgccctacgaccacatgctgcccggggccgagcatttcgcggagtacgcaggccgcctgggcgtgggcgcggccacccacgtcgtgatctacgacgccagcgaccagggcctctactccgccccgcgcgtctggtggatgttccgcgccttcggccaccacgccgtgtcactgcttgatggcggcctccgccactggctgcgccagaacctcccgctcagctccggcaagagccaacctgctcccgccgagttccgcgctcagctcgaccccgccttcatcaagacctacgaggacatcaaggagaacctggaatcccggcgcttccaggtggtggactcccgagccactggcaggttccgcggcaccgagcccgagccccgagacggcattgaacctggccacatcccaggtaccgtgaacatccccttcacagacttcctgagccaggaggggctggagaagagccctgaggagatccgccatctgttccaggagaagaaagtggacctgtctaagccactggtggccacgtgtggctctggcgtcacagcctgccacgtggcactaggggcctacctctgcggcaagccagacgtgcccatctacgatggctcctgggtggagtggtacatgcgcgcccggcccgaggatgtcatctcagagggccgggggaagacccactgaagctgggcaggacacaggcgagctcaggtgatgccggccaccagcaatgcctggcctggtagctccgcttctgctttcaccaagagagtgtttcttcactcaactcaggtggcatttggggtgacatctcaaaggccaggaattccgttgacttgttggctgccagtaggggcgggaggaaaggcggaggcgagccctggaggagggaggccacaactccgagctgcccacctggtgctgagctggggccccgcctcctttctgttttatttttgaggaaataaaataaccaagtgctaaaaaaaaagaaaatacaaaaaacccagggacataacgcgggtgcgaaag

SEQ ID NO: 453780 - DNA, 1407 bp, Homo sapiens
ggcgcgggggccgcgcgggcctgggctgggcggagcgggcgtacccccacggcccggccagtggaaggcgcgggcagcagcggctccgagtggccgcggcggtgggctgtgccggagtctcctccctttggtccgctgcaggcccgcagcccgagtgtcgccgccatggcttcgccgcagctctgccgcgcgctggtgtcggcgcaatgggtggcggaggcgctgcgggccccgcgcgctgggcagcctctgcagctgctggacgcctcctggtacctgccgaagctggggcgcgacgcgcgacgcgagttcgaggagcgccacatcccgggcgccgctttcttcgacatcgaccagtgcagcgaccgcacctcgccctacgaccacatgctgcccggggccgagcatttcgcggagtacgcaggccgcctgggcgtgggcgcggccacccacgtcgtgatctacgacgccagcgaccagggcctctactccgccccgcgcgtctggtggatgttccgcgccttcggccaccacgccgtgtcactgcttgatggcggcctccgccactggctgcgccagaacctcccgctcagctccggcaagagccaacctgctcccgccgagttccgcgctcagctcgaccccgccttcatcaagacctacgaggacatcaaggagaacctggaatcccggcgcttccaggtggtggactcccgagccactggcaggttccgcggcaccgagcccgagccccgagacggcattgaacctggccacatcccaggtaccgtgaacatccccttcacagacttcctgagccaggaggggctggagaagagccctgaggagatccgccatctgttccaggagaagaaagtggacctgtctaagccactggtggccacgtgtggctctggcgtcacagcctgccacgtggcactaggggcctacctctgcggcaagccagacgtgcccatctacgatggctcctgggtggagtggtacatgcgcgcccggcccgaggatgtcatctcagagggccgggggaagacccactgaagctgggcaggacacaggcgagctcaggtgatgccggccaccagcaatgcctggcctggtagctccgcttctgctttcaccaagagagtgtttcttcactcaactcaggtggcatttggggtgacatctcaaaggccaggaattccgttgacttgttggctgccagtaggggcgggaggaaaggcggaggcgagccctggaggagggaggccacaactccgagctgcccacctggtgctgagctggggccccgcctcctttctgttttatttttgaggaaataaaataaccaagtgctaaaaaaaaagaaaatacaaaaaacccagggacataacgcgggtgcgaaag

SEQ ID NO: 453781 - DNA, 1462 bp, Homo sapiens
ggcgcgggggccgcgcgggcctgggctgggcggagcgggcgtacccccacggcccggccagtggaaggcgcgggcagcagcggctccgagtggccgcggcggtgggctgtgccggagtctcctccctttggtccgctgcaggttggtggcgggaggaggggacagctgcgggcgcggggagggggcgccgcgccgcgggggccatggcggagccaggaagccgggagtccgagacccgggcccgcagcccgagtgtcgccgccatggcttcgccgcagctctgccgcgcgctggtgtcggcgcaatgggtggcggaggcgctgcgggccccgcgcgctgggcagcctctgcagctgctggacgcctcctggtacctgccgaagctggggcgcgacgcgcgacgcgagttcgaggagcgccacatcccgggcgccgctttcttcgacatcgaccagtgcagcgaccgcacctcgccctacgaccacatgctgcccggggccgagcatttcgcggagtacgcaggccgcctgggcgtgggcgcggccacccacgtcgtgatctacgacgccagcgaccagggcctctactccgccccgcgcgtctggtggatgttccgcgccttcggccaccacgccgtgtcactgcttgatggcggcctccgccactggctgcgccagaacctcccgctcagctccggcaagagccaacctgctcccgccgagttccgcgctcagctcgaccccgccttcatcaagacctacgaggacatcaaggagaacctggaatcccggcgcttccaggtggtggactcccgagccactggcaggttccgcggcaccgagcccgagccccgagacggcattgaacctggccacatcccaggtaccgtgaacatccccttcacagacttcctgagccaggaggggctggagaagagccctgaggagatccgccatctgttccaggagaagaaagtggacctgtctaagccactggtggccacgtgtggctctggcgtcacagcctgccacgtggcactaggggcctacctctgcggcaagccagacgtgcccatctacgatggctcctgggtggagtggtacatgcgcgcccggcccgaggatgtcatctcagagggccgggggaagacccactgaagctgggcaggacacaggcgagctcaggtgatgccggccaccagcaatgcctggcctggtagctccgcttctgctttcaccaagagagtgtttcttcactcaactcaggtggcatttggggtgacatctcaaaggccaggaattccgttgacttgttggctgccagtaggggcgggaggaaaggcggaggcgagccctggaggagggaggccacaactccgagctgcccacctggtgctgagctggggcccgcctcccggccatcattacaactccctggtgggttattgtttccgacgaaataa

SEQ ID NO: 453782 - DNA, 1375 bp, Homo sapiens
ggcgcgggggccgcgcgggcctgggctgggcggagcgggcgtacccccacggcccggccagtggaaggcgcgggcagcagcggctccgagtggccgcggcggtgggctgtgccggagtctcctccctttggtccgctgcaggcccgcagcccgagtgtcgccgccatggcttcgccgcagctctgccgcgcgctggtgtcggcgcaatgggtggcggaggcgctgcgggccccgcgcgctgggcagcctctgcagctgctggacgcctcctggtacctgccgaagctggggcgcgacgcgcgccgctttcttcgacatcgaccagtgcagcgaccgcacctcgccctacgaccacatgctgcccggggccgagcatttcgcggagtacgcaggccgcctgggcgtgggcgcggccacccacgtcgtgatctacgacgccagcgaccagggcctctactccgccccgcgcgtctggtggatgttccgcgccttcggccaccacgccgtgtcactgcttgatggcggcctccgccactggctgcgccagaacctcccgctcagctccggcaagagccaacctgctcccgccgagttccgcgctcagctcgaccccgccttcatcaagacctacgaggacatcaaggagaacctggaatcccggcgcttccaggtggtggactcccgagccactggcaggttccgcggcaccgagcccgagccccgagacggcattgaacctggccacatcccaggtaccgtgaacatccccttcacagacttcctgagccaggaggggctggagaagagccctgaggagatccgccatctgttccaggagaagaaagtggacctgtctaagccactggtggccacgtgtggctctggcgtcacagcctgccacgtggcactaggggcctacctctgcggcaagccagacgtgcccatctacgatggctcctgggtggagtggtacatgcgcgcccggcccgaggatgtcatctcagagggccgggggaagacccactgaagctgggcaggacacaggcgagctcaggtgatgccggccaccagcaatgcctggcctggtagctccgcttctgctttcaccaagagagtgtttcttcactcaactcaggtggcatttggggtgacatctcaaaggccaggaattccgttgacttgttggctgccagtaggggcgggaggaaaggcggaggcgagccctggaggagggaggccacaactccgagctgcccacctggtgctgagctggggccccgcctcctttctgttttatttttgaggaaataaaataaccaagtgctaaaaaaaaagaaaatacaaaaaacccagggacataacgcgggtgcgaaag

SEQ ID NO: 453783 - DNA, 1394 bp, Homo sapiens
ggcgcgggggccgcgcgggcctgggctgggcggagcgggcgtacccccacggcccggccagtggaaggcgcgggcagcagcggctccgagtggccgcggcggtgggctgtgccggagtctcctccctttggtccgctgcaggttggtggcgggaggaggggacagctgcgggcgcggggagggggcgccgcgccgcgggggccatggcggagccaggaagccgggagtccgagacccgggcccgcagcccgagtgtcgccgccatggcttcgccgcagctctgccgcgcgctggtgtcggcgcaatgggtggcggaggcgctgcgggccccgcgcgctgggcagcctctgcagctgctggacgcctcctggtacctgccgaagctggggcgcgacgcgcgacgcgagttcgaggagcgccacatcccgggcgccgctttcttcgacatcgaccagtgcagcgaccgcacctcgccctacgaccacatgctgcccggggccgagcatttcgcggagtacgcaggccgcctgggcgtgggcgcggccacccacgtcgtgatctacgacgccagcgaccagggcctctactccgccccgcgcgtctggtggatgttccgcgccttcggccaccacgccttcatcaagacctacgaggacatcaaggagaacctggaatcccggcgcttccaggtggtggactcccgagccactggcaggttccgcggcaccgagcccgagccccgagacggcattgaacctggccacatcccaggtaccgtgaacatccccttcacagacttcctgagccaggaggggctggagaagagccctgaggagatccgccatctgttccaggagaagaaagtggacctgtctaagccactggtggccacgtgtggctctggcgtcacagcctgccacgtggcactaggggcctacctctgcggcaagccagacgtgcccatctacgatggctcctgggtggagtggtacatgcgcgcccggcccgaggatgtcatctcagagggccgggggaagacccactgaagctgggcaggacacaggcgagctcaggtgatgccggccaccagcaatgcctggcctggtagctccgcttctgctttcaccaagagagtgtttcttcactcaactcaggtggcatttggggtgacatctcaaaggccaggaattccgttgacttgttggctgccagtaggggcgggaggaaaggcggaggcgagccctggaggagggaggccacaactccgagctgcccacctggtgctgagctggggccccgcctcctttctgttttatttttgaggaaataaaataaccaagtgctaaaaaaaaagaaaatacaaaaaacccagggacataacgcgggtgcgaaag

SEQ ID NO: 453784 - DNA, 1457 bp, Homo sapiens
ggcgcgggggccgcgcgggcctgggctgggcggagcgggcgtacccccacggcccggccagtggaaggcgcgggcagcagcggctccgagtggccgcggcggtgggctgtgccggagtctcctccctttggtccgctgcaggttggtggcgggaggaggggacagctgcgggcgcggggagggggcgccgcgccgcgggggccatggcggagccaggaagccgggagtccgagacccgggcccgcagcccgagtgtcgccgccatggcttcgccgcagctctgccgcgcgctggtgtcggcgcaatgggtggcggaggcgctgcgggccccgcgcgctgggcagcctctgcagctgctggacgcctcctggtacctgccgaagctggggcgcgacgcgcgacgcgagttcgaggagcgccacatcccgggcgccgctttcttcgacatcgaccagtgcagcgaccgcacctcgccctacgaccacatgctgcccggggccgagcatttcgcggagtacgcaggccgcctgggcgtgggcgcggccacccacgtcgtgatctacgacgccagcgaccagggcctctactccgccccgcgcgtctggtggatgttccgcgccttcggccaccacgccgtgtcactgcttgatggcggcctccgccactggctgcgccagaacctcccgctcagctccggcaagagccaacctgctcccgccgagttccgcgctcagctcgaccccgccttcatcaagacctacgaggacatcaaggagaacctggaatcccggcgcttccaggtggtggactcccgagccactggcaggttccgcggcaccgagcccgagccccgagacgacttcctgagccaggaggggctggagaagagccctgaggagatccgccatctgttccaggagaagaaagtggacctgtctaagccactggtggccacgtgtggctctggcgtcacagcctgccacgtggcactaggggcctacctctgcggcaagccagacgtgcccatctacgatggctcctgggtggagtggtacatgcgcgcccggcccgaggatgtcatctcagagggccgggggaagacccactgaagctgggcaggacacaggcgagctcaggtgatgccggccaccagcaatgcctggcctggtagctccgcttctgctttcaccaagagagtgtttcttcactcaactcaggtggcatttggggtgacatctcaaaggccaggaattccgttgacttgttggctgccagtaggggcgggaggaaaggcggaggcgagccctggaggagggaggccacaactccgagctgcccacctggtgctgagctggggccccgcctcctttctgttttatttttgaggaaataaaataaccaagtgctaaaaaaaaagaaaatacaaaaaacccagggacataacgcgggtgcgaaag

SEQ ID NO: 453785 - DNA, 948 bp, Homo sapiens
ccctagggtgcatagtcaggaaaccttggggcccagttcttaggttcaaagttcagtcagcaatttgctagatgtattagcctcaggtggtacttaacctcagcatcaccgtgtataaaatgggggctcctctaaacagtgctcaggttttatggttgtgagaattaaatgagatggtggatataaaggatttagcaccatgcttgcatgggatgctctcaatatctcgagcaccacaaatacgaggtaccattcatagcatccttctatttgtcccctcctccctgctcccctgctgtaggcattgaacctggccacatcccaggtaccgtgaacatccccttcacagacttcctgagccaggaggggctggagaagagccctgaggagatccgccatctgttccaggagaagaaagtggacctgtctaagccactggtggccacgtgtggctctggcgtcacagcctgccacgtggcactaggggcctacctctgcggcaagccagacgtgcccatctacgatggctcctgggtggagtggtacatgcgcgcccggcccgaggatgtcatctcagagggccgggggaagacccactgaagctgggcaggacacaggcgagctcaggtgatgccggccaccagcaatgcctggcctggtagctccgcttctgctttcaccaagagagtgtttcttcactcaactcaggtggcatttggggtgacatctcaaaggccaggaattccgttgacttgttggctgccagtaggggcgggaggaaaggcggaggcgagccctggaggagggaggccacaactccgagctgcccacctggtgctgagctggggccccgcctcctttctgttttatttttgaggaaataaaataaccaagtgctaaaaaaaaagaaaatacaaaaaacccagggacataacgcgggtgcgaaag

SEQ ID NO: 453786 - DNA, 886 bp, Homo sapiens
ggcgcgggggccgcgcgggcctgggctgggcggagcgggcgtacccccacggcccggccagtggaaggcgcgggcagcagcggctccgagtggccgcggcggtgggctgtgccggagtctcctccctttggtccgctgcaggttggtggcgggaggaggggacagctgcgggcgcggggagggggcgccgcgccgcgggggccatggcggagccaggaagccgggagtccgagacccgggcattgaacctggccacatcccaggtaccgtgaacatccccttcacagacttcctgagccaggaggggctggagaagagccctgaggagatccgccatctgttccaggagaagaaagtggacctgtctaagccactggtggccacgtgtggctctggcgtcacagcctgccacgtggcactaggggcctacctctgcggcaagccagacgtgcccatctacgatggctcctgggtggagtggtacatgcgcgcccggcccgaggatgtcatctcagagggccgggggaagacccactgaagctgggcaggacacaggcgagctcaggtgatgccggccaccagcaatgcctggcctggtagctccgcttctgctttcaccaagagagtgtttcttcactcaactcaggtggcatttggggtgacatctcaaaggccaggaattccgttgacttgttggctgccagtaggggcgggaggaaaggcggaggcgagccctggaggagggaggccacaactccgagctgcccacctggtgctgagctggggccccgcctcctttctgttttatttttgaggaaataaaataaccaagtgctaaaaaaaaagaaaatacaaaaaacccagggacataacgcgggtgcgaaag

SEQ ID NO: 453787 - DNA, 943 bp, Homo sapiens
  misc_feature (829)..(829): n is a, c, g, or t
ggcgcgggggccgcgcgggcctgggctgggcggagcgggcgtacccccacggcccggccagtggaaggcgcgggcagcagcggctccgagtggccgcggcggtgggctgtgccggagtctcctccctttggtccgctgcaggttggtggcgggaggaggggacagctgcgggcgcggggagggggcgccgcgccgcgggggccatggcggagccaggaagccgggagtccgagacccgggcccgcagcccgagtgtcgccgccatggcttcgccgcagctctgccgcgcgctggtgtcggcgcaatgggtggcggaggcgctgcgggccccgcgcgctgggcagcctctgcagctgctggacgcctcctggtacctgccgaagctggggcgcgacgcgcgacgcgagttcgaggagcgccacatcccgggcgccgctttcttcgacatcgaccagtgcagcgaccgcacctcgccctacgaccacatgctgcccggggccgagcatttcgcggagtacgcaggccgcctgggcgtgggcgcggccacccacgtcgtgatctacgacgccagcgaccagggcctctactccgccccgcgcgtctggtggatgttccgcgccttcggccaccacgccgtgtcactgcttgatggcggcctccgccactggctgcgccagaacctcccgctcagctccggcaagagccaacctgctcccgccgagttccgcgctcagctcgacccccgcctcctttctgttttatttttgaggaaataaaataaccaagtgctaaaaaaaaaaaaaaaaaaaaaaaaaaaaaaaaaaaaaanaaaaacacaagaaaaaaccataaaaaaaactcgcgggggggcccgtgccccaatctgccctatggtgggccgtattccacttcactgcccgaaattttacaacgtctcgactgg

SEQ ID NO: 453788 - DNA, 1608 bp, Homo sapiens
  misc_feature (1494)..(1494): n is a, c, g, or t
ggcgcgggggccgcgcgggcctgggctgggcggagcgggcgtacccccacggcccggccagtggaaggcgcgggcagcagcggctccgagtggccgcggcggtgggctgtgccggagtctcctccctttggtccgctgcaggttggtggcgggaggaggggacagctgcgggcgcggggagggggcgccgcgccgcgggggccatggcggagccaggaagccgggagtccgagacccgggcccgcagcccgagtgtcgccgccatggcttcgccgcagctctgccgcgcgctggtgtcggcgcaatgggtggcggaggcgctgcgggccccgcgcgctgggcagcctctgcagctgctggacgcctcctggtacctgccgaagctggggcgcgacgcgcgacgcgagttcgaggagcgccacatcccgggcgccgctttcttcgacatcgaccagtgcagcgaccgcacctcgccctacgaccacatgctgcccggggccgagcatttcgcggagtacgcaggccgcctgggcgtgggcgcggccacccacgtcgtgatctacgacgccagcgaccagggcctctactccgccccgcgcgtctggtggatgttccgcgccttcggccaccacgccgtgtcactgcttgatggcggcctccgccactggctgcgccagaacctcccgctcagctccggcaagagccaacctgctcccgccgagttccgcgctcagctcgaccccgccttcatcaagacctacgaggacatcaaggagaacctggaatcccggcgcttccaggtggtggactcccgagccactggcaggttccgcggcaccgagcccgagccccgagacggcattgaacctggccacatcccaggtaccgtgaacatccccttcacagacttcctgagccaggaggggctggagaagagccctgaggagatccgccatctgttccaggagaagaaagtggacctgtctaagccactggtggccacgtgtggctctggcgtcacagcctgccacgtggcactaggggcctacctctgcggcaagccagacgtgcccatctacgatggctcctgggtggagtggtacatgcgcgcccggcccgaggatgtcatctcagagggccgggggaagacccactgaagctgggcaggacacaggcgagctcaggtgatgccggccaccagcaatgcctggcctggtagctccgcttctgctttcaccaagagagtgtttcttcactcaactcaggtggcatttggggtgacatctcaaaggccaggaattccgttgacttgttggctgccagtaggggcgggaggaaaggcggaggcgagccctggaggagggaggccacaactccgagctgcccacctggtgctgagctggggccccgcctcctttctgttttatttttgaggaaataaaataaccaagtgctaaaaaaaaaaaaaaaaaaaaaaaaaaaaaaaaaaaaaanaaaaacacaagaaaaaaccataaaaaaaactcgcgggggggcccgtgccccaatctgccctatggtgggccgtattccacttcactgcccgaaattttacaacgtctcgactgg

SEQ ID NO: 453789 - DNA, 1681 bp, Homo sapiens
ggcgcgggggccgcgcgggcctgggctgggcggagcgggcgtacccccacggcccggccagtggaaggcgcgggcagcagcggctccgagtggccgcggcggtgggctgtgccggagtctcctccctttggtccgctgcaggttggtggcgggaggaggggacagctgcgggcgcggggagggggcgccgcgccgcgggggccatggcggagccaggaagccgggagtccgagacccgggtcgccaatataaatgcttgatgagtgaatgaatgacttccgtctgggacttggttgcaaataaagccgagctgcatcttagggaggggtggagactttgcccctgtttgtgccttgaagccagcagggccttgccctaggatacctccacccaccctcctgcccagcaagtggaggcccgcagcccgagtgtcgccgccatggcttcgccgcagctctgccgcgcgctggtgtcggcgcaatgggtggcggaggcgctgcgggccccgcgcgctgggcagcctctgcagctgctggacgcctcctggtacctgccgaagctggggcgcgacgcgcgacgcgagttcgaggagcgccacatcccgggcgccgctttcttcgacatcgaccagtgcagcgaccgcacctcgccctacgaccacatgctgcccggggccgagcatttcgcggagtacgcaggccgcctgggcgtgggcgcggccacccacgtcgtgatctacgacgccagcgaccagggcctctactccgccccgcgcgtctggtggatgttccgcgccttcggccaccacgccgtgtcactgcttgatggcggcctccgccactggctgcgccagaacctcccgctcagctccggcaagagccaacctgctcccgccgagttccgcgctcagctcgaccccgccttcatcaagacctacgaggacatcaaggagaacctggaatcccggcgcttccaggtggtggactcccgagccactggcaggttccgcggcaccgagcccgagccccgagacggcattgaacctggccacatcccaggtaccgtgaacatccccttcacagacttcctgagccaggaggggctggagaagagccctgaggagatccgccatctgttccaggagaagaaagtggacctgtctaagccactggtggccacgtgtggctctggcgtcacagcctgccacgtggcactaggggcctacctctgcggcaagccagacgtgcccatctacgatggctcctgggtggagtggtacatgcgcgcccggcccgaggatgtcatctcagagggccgggggaagacccactgaagctgggcaggacacaggcgagctcaggtgatgccggccaccagcaatgcctggcctggtagctccgcttctgctttcaccaagagagtgtttcttcactcaactcaggtggcatttggggtgacatctcaaaggccaggaattccgttgacttgttggctgccagtaggggcgggaggaaaggcggaggcgagccctggaggagggaggccacaactccgagctgcccacctggtgctgagctggggccccgcctcctttctgttttatttttgaggaaataaaataaccaagtgctaaaaaaaaagaaaatacaaaaaacccagggacataacgcgggtgcgaaag

SEQ ID NO: 453790 - DNA, 1070 bp, Homo sapiens
aataaaacagaaaggaggcggggcccagctcagcaccaggtgggcagctcggagttgtggcctccctcctccagggctcgcctccgcctttcctcccgcccctactggccacccacgtcgtgatctacgacgccagcgaccagggcctctactccgccccgcgcgtctggtggatgttccgcgccttcggccaccacgccgtgtcactgcttgatggcggcctccgccactggctgcgccagaacctcccgctcagctccggcaagagccaacctgctcccgccgagttccgcgctcagctcgaccccgccttcatcaagacctacgaggacatcaaggagaacctggaatcccggcgcttccaggtggtggactcccgagccactggcaggttccgcggcaccgagcccgagccccgagacggcattgaacctggccacatcccaggtaccgtgaacatccccttcacagacttcctgagccaggaggggctggagaagagccctgaggagatccgccatctgttccaggagaagaaagtggacctgtctaagccactggtggccacgtgtggctctggcgtcacagcctgccacgtggcactaggggcctacctctgcggcaagccagacgtgcccatctacgatggctcctgggtggagtggtacatgcgcgcccggcccgaggatgtcatctcagagggccgggggaagacccactgaagctgggcaggacacaggcgagctcaggtgatgccggccaccagcaatgcctggcctggtagctccgcttctgctttcaccaagagagtgtttcttcactcaactcaggtggcatttggggtgacatctcaaaggccaggaattccgttgacttgttggctgccagtaggggcgggaggaaaggcggaggcgagccctggaggagggaggccacaactccgagctgcccacctggtgctgagctggggccccgcctcctttctgttttatttttgaggaaataaaataaccaagtgctaaaaaaaaagaaaatacaaaaaacccagggacataacgcgggtgcgaaag

SEQ ID NO: 453791 - DNA, 1602 bp, Homo sapiens
ggcgcgggggccgcgcgggcctgggctgggcggagcgggcgtacccccacggcccggccagtggaaggcgcgggcagcagcggctccgagtggccgcggcggtgggctgtgccggagtctcctccctttggtccgctgcaggttggtggcgggaggaggggacagctgcgggcgcggggagggggcgccgcgccgcgggggccatggcggagccaggaagccgggagtccgagacccgggcccgcagcccgagtgtcgccgccatggcttcgccgcagctctgccgcgcgctggtgtcggcgcaatgggtggcggaggcgctgcgggccccgcgcgctgggcagcctctgcagctgctggacgcctcctggtacctgccgaagctggggcgcgacgcgcgacgcgagttcgaggagcgccacatcccgggcgccgctttcttcgacatcgaccagtgcagcgaccgcacctcgccctacgaccacatgctgcccggggccgagcatttcgcggagtacgcaggccgcctgggcgtgggcgcggccacccacgtcgtgatctacgacgccagcgaccagggcctctactccgccccgcgcgtctggtggatgttccgcgccttcggccaccacgccgtgtcactgcttgatggcggcctccgccactggctgcgccagaacctcccgctcagctccggcaagagccaacctgctcccgccgagttccgcgctcagctcgaccccgccttcatcaagacctacgaggacatcaaggagaacctggaatcccggcgcttccaggtggtggactcccgagccactggcaggttccgcggcaccgagcccgagccccgagacgctggagtacagtggcgcaatctcggctcaccacaacctccgcctcccgggttcaagtgattctcctgccttagcctcccgagtagctgggattacaggcattgaacctggccacatcccaggtaccgtgaacatccccttcacagacttcctgagccaggaggggctggagaagagccctgaggagatccgccatctgttccaggagaagaaagtggacctgtctaagccactggtggccacgtgtggctctggcgtcacagcctgccacgtggcactaggggcctacctctgcggcaagccagacgtgcccatctacgatggctcctgggtggagtggtacatgcgcgcccggcccgaggatgtcatctcagagggccgggggaagacccactgaagctgggcaggacacaggcgagctcaggtgatgccggccaccagcaatgcctggcctggtagctccgcttctgctttcaccaagagagtgtttcttcactcaactcaggtggcatttggggtgacatctcaaaggccaggaattccgttgacttgttggctgccagtaggggcgggaggaaaggcggaggcgagccctggaggagggaggccacaactccgagctgcccacctggtgctgagctggggccccgcctcctttctgttttatttttgaggaaataaaataaccaagtgctaaaaaaaaagaaaatacaaaaaacccagggacataacgcgggtgcgaaag

SEQ ID NO: 453792 - DNA, 1322 bp, Homo sapiens
tatagaatgggaggtgatacacgcctagcaggcttgttgtcaaaacaaactaagctcactgcagctggatcagtgatgaatgtcactgtcgtcatcattcccactccacagcctgaggcctggccaagtgctcctgtgatgtgccacaccagtccagcaggcaggggaaacatgctttgcttggtgggattcaaggtgtagggatggccctccctttacagtcaccaccctgggttgagagtttgttcctcctccttgctctgggctggtctctatgtgatatctgaccaagcccggtaactgtgtctgttaggtgggatgcatgacccattccagcctctccacagactcgggagtgctgtctctatgccagggtctgagaatagataccgatacatgggtcagcagctcctgtgggggtgtcactccactgcggagggaaaccaaggcagaagctggacaagagtctgaatggctcagatttgaatcattcgtttttggggggttttttgtttgtgtttgtttctgttgttgttgttgttattgttttgagacggagttttgctcttgtttcccagctggagtacagtggcgcaatctcggctcaccacaacctccgcctcccgggttcaagtgattctcctgccttagcctcccgagtagctgggattacaggcattgaacctggccacatcccaggtaccgtgaacatccccttcacagacttcctgagccaggaggggctggagaagagccctgaggagatccgccatctgttccaggagaagaaagtggacctgtctaagccactggtggccacgtgtggctctggcgtcacagcctgccacgtggcactaggggcctacctctgcggcaagccagacgtgcccatctacgatggctcctgggtggagtggtacatgcgcgcccggcccgaggatgtcatctcagagggccgggggaagacccactgaagctgggcaggacacaggcgagctcaggtgatgccggccaccagcaatgcctggcctggtagctccgcttctgctttcaccaagagagtgtttcttcactcaactcaggtggcatttggggtgacatctcaaaggccaggaattccgttgacttgttggctgccagtaggggcgggaggaaaggcggaggcgagccctggaggagggaggccacaactccgagctgcccacctggtgctgagctggggccccgcctcctttctgttttatttttgaggaaataaaataaccaagtgctaaaaaaaaagaaaatacaaaaaacccagggacataacgcgggtgcgaaag

SEQ ID NO: 453793 - DNA, 1082 bp, Homo sapiens
ggcgcgggggccgcgcgggcctgggctgggcggagcgggcgtacccccacggcccggccagtggaaggcgcgggcagcagcggctccgagtggccgcggcggtgggctgtgccggagtctcctccctttggtccgctgcaggttggtggcgggaggaggggacagctgcgggcgcggggagggggcgccgcgccgcgggggccatggcggagccaggaagccgggagtccgagacccgggcccgcagcccgagtgtcgccgccatggcttcgccgcagctctgccgcgcgctggtgtcggcgcaatgggtggcggaggcgctgcgggccccgcgcgctgggcagcctctgcagctgctggacgcctcctggtacctgccgaagctggggcgcgacgcgcgacgcgagttcgaggagcgccacatcccgggcgccgctttcttcgacatcgaccagtgcagcgaccgcacctcgccctacgaccacatgctgcccggggccgagcatttcgcggagtacgcaggccgcctgggcgtgggcgcggccacccacgtcgtgatctacgacgccagcgaccagggcctctactccgccccgcgcgtctggtggatgttccgcgccttcggccaccacgccgtgtcactgcttgatggcggcctccgccactggctgcgccagaacctcccgctcagctccggcaagagccaacctgctcccgccgagttccgcgctcagctcgaccccgccttcatcaagacctacgaggacatcaaggagaacctggaatcccggcgcttccaggtggtggactcccgagccactggcaggttccgcggcaccgagcccgagccccgagacgacggtaacgcgggggaagggggcaggaggtcgtcgggggcgcggcctctacgccctgagcagtgccctggacttgacctttcttttatttttttaatttatcttgctttcatttcctttccttttttctttcctttccttccctttcccttccctcctttcccccttttccctacccttgccttcttgcactccagcctgggcaacaagagcaaaactccatct

SEQ ID NO: 453794 - DNA, 886 bp, Homo sapiens
ggcgcgggggccgcgcgggcctgggctgggcggagcgggcgtacccccacggcccggccagtggaaggcgcgggcagcagcggctccgagtggccgcggcggtgggctgtgccggagtctcctccctttggtccgctgcaggttggtggcgggaggaggggacagctgcgggcgcggggagggggcgccgcgccgcgggggccatggcggagccaggaagccgggagtccgagacccgggcccgcagcccgagtgtcgccgccatggcttcgccgcagctctgccgcgcgctggtgtcggcgcaatgggtggcggaggcgctgcgggccccgcgcgctgggcagcctctgcagctgctggacgcctcctggtacctgccgaagctggggcgcgacgcgcgacgcgagttcgaggagcgccacatcccgggcgccgctttcttcgacatcgaccagtgcagcgaccgcacctcgccctacgaccacatgctgcccggggccgagcatttcgcggagtacgcaggccgcctgggcgtgggcgcggccacccacgtcgtgatctacgacgccagcgaccagggcctctactccgccccgcgcgtctggtggatgttccgcgccttcggccaccacgccgtgtcactgcttgatggcggcctccgccactggctgcgccagaacctcccgctcagctccggctgccagtaggggcgggaggaaaggcggaggcgagccctggaggagggaggccacaactccgagctgcccacctggtgctgagctggggccccgcctcctttctgttttatttttgaggaaataaaataaccaagtgctaaaaaaaaagaaaatacaaaaaacccagggacataacgcgggtgcgaaag

SEQ ID NO: 453795 - DNA, 4453 bp, Homo sapiens
cgcgcaggggagggggcgggggcgccgcgcacgcgcacgggccggcggcgcgcgccgagcggggggcaccgcgcgggtgcagccacgatggaagggggtgcgtacggagcgggcaaagccgggggcgccttcgacccctacaccctggtccggcagccgcacaccatcctgcgcgtcgtgtcttggctgttctccatagtggtgttcggctccatcgtgaacgagggctacctcaacagcgcctccgagggggaggagttctgcatctacaaccgcaaccccaacgcctgcagctatggcgtggccgtgggcgtgctcgccttcctcacctgcctgctgtacctggccctggacgtgtacttcccgcagatcagcagcgtcaaggaccgcaagaaagccgtcctgtccgacatcggtgtctcggccttctgggctttcctctggttcgtgggattctgctacctggccaaccagtggcaggtctccaagcccaaggacaacccactgaacgaagggacggacgcagcccgggccgccatcgccttctcctttttctccatcttcacctgggcgggccaggctgtgctggccttccagcggtaccagattggcgccgactcggccctcttctcccaggactacatggaccccagccaggactccagcatgccttacgcgccctacgtggagcccaacactgggccggatcccgccggtatgggcggcacctaccagcagccggccaacaccttcgacaccgagccccagggctaccagtcgcagggctactgagccacagtgaccgcctgcccccgcccctccccatctgtcccctctctccacacccagcccctgctcctgcccaggctgccctgcccagcgcctcatcagcctctgccttgtcccactgaggtccagggtagctcggggcaggggtggggcagtccagtgttggggactgtctacgtatgtgcaagtatatcccagggcatgtgccccgcaggggcctagagggtgggggccaggggtatttgcattcgtacattgtgtcatcaagcattccttgagcgcctactgggcatccggcctgtgctgggcatgggtggtgacattggcagaaatggccactggaaaggggagcgatgagctgtggaggaagccctggtggtaccagaggccagaatggtgggaaagacagatccagataatgctgggaagtgtggctacaccgtggcttggtcatagggtgagtgtaaacacccacaggacactgggggctgtcaccctgctctggcagtcctgctaagagtgtcagggccgtctccattttatggttgaggaaactgaggtctagagaggtcaagattacttgcccagaatcactcaggcagctagtgatagaggtggggccaagcccaggctgcccgactgcagaccacgtgctcttccctggccacccacctcctaccatccccacgcttggggcttccctgctcagtgttactgtcattctgggaggccttggggccctcagccccttgagacaccctgattctgctgcatgccaagggcctgttctgccccagctgttcctcctcccctggggacaggcccacctccgggtccctccacccacatccccctggtcctacccctggcccttggcctcctccaagagggctcaccccgggtgctgctctgtgctctgcgtgtcccacagacgcttgttccagggggctccagcaaaccccttcgtggtctctcaaaggactgatcactgtccttgcctctaggaggggtcactaagcccttacctagggctgggtggacaacaaggcacagatgagggtgtgactggcccgaggtcacggtgagtgagtggcaaagctggccctgacgcctgggtttcttggccccagctgcccagcaggtgcctcgattccctgcccttgtgacctcccaggaaacagaactgatctgggacactatgtcacctctcctctcatctggggtcagtcagggttcgggggctgcagcagccaagcgcatgagaggtgtttccttggccttccagaaggcccactgtggagccagcctccctatgggaggcagagcggcaaggacagggctttggaatcagccaggtcggctcctgggctgtggccgtggagagacactgcccccaggatgacacaggcaagagcccctgaggcatgggaggcccagggaagaccatgggctgtaggggagagtgtggcaggtgacccaaaggcccaaagagggccgtggggcctgaggaggtcataatctcttctgagtgggggcaggtcgattcttgcacaaggtgggctcttcactgagccataagggacagggaggtatgggagagcgctgggggcccatccccctgtccacccagtgtccactggcctgtccttcagggagcagagcagagcaggtggtggacgggcccagtgctgggtgttttcaccaccatccccccatcccccatctaagaatcctaagaggcaggcgatccctcacctgcttactcactcagcagttacccggcccctgtgctggagataccaagggcatgggtggtccctgcttcgatggccccaaagctgggccagagttaagggaaagaggaggaagtcctaagcagagaagtagcaccattatccccatttaacagaagggaaactgaggctcggcaagcataggcgagttggcagtggaacacggatctaaactcaggtgtgtccaagtcctcccaaaggacagcagtgatggagaggaccccagccagctgtgtgacagctggttgttgctgacttcattttccaatccggagaaggggctctgtccacagtcccccgccgccaggtggcccacatgggaccagcatgggggcaggttatctgttggcctgaagagtgaaacctgtaccaggccaaaggtgagggcgtgagtgagggcaggagtgtttatggcagagtgaagttctgtgcccaccacaagaggctgtgagatgttctgaccctcacccactgtccaccaaaagcctctcctgctgatgggcactaggagacctcagggtactgcccatctgtttctcctcgggtgccagccagctgctggtgatcctcagccggagggcagggtaccaggtaagcttaactccatcttgggtgtttgtgacaggccctgcctgccaccctaggcagggaaagctgtcaagactcctgccaggaatggggggtgctgagtcatctcacgaagaatccctcactcttcccgggttcagcccagaagcccttccaggcatgatcttccccatcaggctgggctctggcagggacctgcccaggatggagatgagagagggtgagagatggagggcgagatttggatgggacccagggctcctgactctgccctggaaggttcatggggaaactcgctccttctgttggcagaggacagcccctggggaaccccaggcccaactctgtccggtatcccttttcctcccagctgccctcccctacttctcccttgctcccaaagctttccttggagaagggccctcctgcagctggaccctgcagggtggctccctcctccccatcaagcacaagagagggcccaggaaaaaaggtttcacataagtgtagagtcgcaaggacgcttagagtcggcagagtctggggtagggagacagcgacttgtccaaggtcaagcacagagggagaggttcaggagtcaggtcttctgccttctgagttggctcatcctgggcagtcacagactgtcctgcctgcacggctcctatccacctgggggtgtcgcagttgaggggctaattcccaggggactgacgttagttccctactccatccttccctggtgattcttgatcttcaaagcctcggggatcccaggtttccccatgtaactgagacaccctgcctgttagccctgggagacccctaaccttggcccaagacccctttgattctctaaggagcacgaaagggggaatgcccctcccaggagtttatgggagaagggactgggccggctgcctcccagcgatgcacttgacctgacactccccatgtcctggtgcgcacagcccttgtcggtgccccggcccctcccgcagcgttactgcctgtgtatagtataaatatatatattttctatatataagatgtataatataaggctccacaaatatatctgtgtgtgtgtgtgcgtgtgtgtgcggtgaagggcggtccccatcctgggcctccactctagacccccccaccacctggttaagtctcgagtgaatccagtggccccgtggcaccctcctttatgacatccatccatctgtggtgaaccaagtgaaggtggtgacttctggtgacatagtaataaagtgaagactcagaaccca

SEQ ID NO: 453796 - DNA, 886 bp, Homo sapiens
cgcgcaggggagggggcgggggcgccgcgcacgcgcacgggccggcggcgcgcgccgagcggggggcaccgcgcgggtgcagccacgatggaagggggtgcgtacggagcgggcaaagccgggggcgccttcgacccctacaccctggtccggcagccgcacaccatcctgcgcgtcgtgtcttggctgttctccatagtggtgttcggctccatcgtgaacgagggctacctcaacagcgcctccgagggggaggagttctgcatctacaaccgcaaccccaacgcctgcagctatggcgtggccgtgggcgtgctcgccttcctcacctgcctgctgtacctggccctggacgtgtacttcccgcagatcagcagcgtcaaggaccgcaagaaagccgtcctgtccgacatcggtgtctcggccttctgggctttcctctggttcgtgggattctgctacctggccaaccagtggcaggtctccaagcccaaggacaacccactgaacgaagggacggacgcagcccgggccgccatcgccttctcctttttctccatcttcacctggagcctgaccgcagccctggccgtgcggagattcaaggacctaagcttccaggaggagtacagcacactgttccctgcctcggcacagccgtaggcctccccggcttgcagaggccggcagccctgtatcacccctggcagtgaggtggcaggagcagcctagtgccagaaatgtccaagatgccagggcatgcagggcagtggaaggctggcttgaggaaccaattcaggttctccactgactcattcattccttcaccgcctccttcattgattcttcatgcgttcattcattcagtaaacatttattgagcagc

SEQ ID NO: 453797 - DNA, 284 bp, Homo sapiens
cgcgcaggggagggggcgggggcgccgcgcacgcgcacgggccggcggcgcgcgccgagcggggggcaccgcgcgggtgcagccacgatggaagggggtgcgtacggagcgggcaaagccgggggcgccttcgacccctacaccctggtccggcagccgcacaccatcctgcgcgtcgtgtcttgggctggagtgcagtggcatgatcacggttcactacaacctccacctcctgggctcaagagatcctccccctcatcttccctggtacctgagactacagg

SEQ ID NO: 453798 - DNA, 4387 bp, Homo sapiens
cgcgcaggggagggggcgggggcgccgcgcacgcgcacgggccggcggcgcgcgccgagcggggggcaccgcgcgggtgcagccacgatggaagggggtgcgtacggagcgggcaaagccgggggcgccttcgacccctacaccctggtccggcagccgcacaccatcctgcgcgtcgtgtcttggctgttctccatagtggtgttcggctccatcgtgaacgagggctacctcaacagcgcctccgagggggaggagttctgcatctacaaccgcaaccccaacgcctgcagctatggcgtggccgtgggcgtgctcgccttcctcacctgcctgctgtacctggccctggacgtgtacttcccgcagatcagcagcgtcaaggaccgcaagaaagccgtcctgtccgacatcggtgtctcggccttctgggctttcctctggttcgtgggattctgctacctggccaaccagtggcaggtctccaagcccaaggacaacccactgaacgaagggacggacgcagcccgggccgccatcgccttctcctttttctccatcttcacctgggactacatggaccccagccaggactccagcatgccttacgcgccctacgtggagcccaacactgggccggatcccgccggtatgggcggcacctaccagcagccggccaacaccttcgacaccgagccccagggctaccagtcgcagggctactgagccacagtgaccgcctgcccccgcccctccccatctgtcccctctctccacacccagcccctgctcctgcccaggctgccctgcccagcgcctcatcagcctctgccttgtcccactgaggtccagggtagctcggggcaggggtggggcagtccagtgttggggactgtctacgtatgtgcaagtatatcccagggcatgtgccccgcaggggcctagagggtgggggccaggggtatttgcattcgtacattgtgtcatcaagcattccttgagcgcctactgggcatccggcctgtgctgggcatgggtggtgacattggcagaaatggccactggaaaggggagcgatgagctgtggaggaagccctggtggtaccagaggccagaatggtgggaaagacagatccagataatgctgggaagtgtggctacaccgtggcttggtcatagggtgagtgtaaacacccacaggacactgggggctgtcaccctgctctggcagtcctgctaagagtgtcagggccgtctccattttatggttgaggaaactgaggtctagagaggtcaagattacttgcccagaatcactcaggcagctagtgatagaggtggggccaagcccaggctgcccgactgcagaccacgtgctcttccctggccacccacctcctaccatccccacgcttggggcttccctgctcagtgttactgtcattctgggaggccttggggccctcagccccttgagacaccctgattctgctgcatgccaagggcctgttctgccccagctgttcctcctcccctggggacaggcccacctccgggtccctccacccacatccccctggtcctacccctggcccttggcctcctccaagagggctcaccccgggtgctgctctgtgctctgcgtgtcccacagacgcttgttccagggggctccagcaaaccccttcgtggtctctcaaaggactgatcactgtccttgcctctaggaggggtcactaagcccttacctagggctgggtggacaacaaggcacagatgagggtgtgactggcccgaggtcacggtgagtgagtggcaaagctggccctgacgcctgggtttcttggccccagctgcccagcaggtgcctcgattccctgcccttgtgacctcccaggaaacagaactgatctgggacactatgtcacctctcctctcatctggggtcagtcagggttcgggggctgcagcagccaagcgcatgagaggtgtttccttggccttccagaaggcccactgtggagccagcctccctatgggaggcagagcggcaaggacagggctttggaatcagccaggtcggctcctgggctgtggccgtggagagacactgcccccaggatgacacaggcaagagcccctgaggcatgggaggcccagggaagaccatgggctgtaggggagagtgtggcaggtgacccaaaggcccaaagagggccgtggggcctgaggaggtcataatctcttctgagtgggggcaggtcgattcttgcacaaggtgggctcttcactgagccataagggacagggaggtatgggagagcgctgggggcccatccccctgtccacccagtgtccactggcctgtccttcagggagcagagcagagcaggtggtggacgggcccagtgctgggtgttttcaccaccatccccccatcccccatctaagaatcctaagaggcaggcgatccctcacctgcttactcactcagcagttacccggcccctgtgctggagataccaagggcatgggtggtccctgcttcgatggccccaaagctgggccagagttaagggaaagaggaggaagtcctaagcagagaagtagcaccattatccccatttaacagaagggaaactgaggctcggcaagcataggcgagttggcagtggaacacggatctaaactcaggtgtgtccaagtcctcccaaaggacagcagtgatggagaggaccccagccagctgtgtgacagctggttgttgctgacttcattttccaatccggagaaggggctctgtccacagtcccccgccgccaggtggcccacatgggaccagcatgggggcaggttatctgttggcctgaagagtgaaacctgtaccaggccaaaggtgagggcgtgagtgagggcaggagtgtttatggcagagtgaagttctgtgcccaccacaagaggctgtgagatgttctgaccctcacccactgtccaccaaaagcctctcctgctgatgggcactaggagacctcagggtactgcccatctgtttctcctcgggtgccagccagctgctggtgatcctcagccggagggcagggtaccaggtaagcttaactccatcttgggtgtttgtgacaggccctgcctgccaccctaggcagggaaagctgtcaagactcctgccaggaatggggggtgctgagtcatctcacgaagaatccctcactcttcccgggttcagcccagaagcccttccaggcatgatcttccccatcaggctgggctctggcagggacctgcccaggatggagatgagagagggtgagagatggagggcgagatttggatgggacccagggctcctgactctgccctggaaggttcatggggaaactcgctccttctgttggcagaggacagcccctggggaaccccaggcccaactctgtccggtatcccttttcctcccagctgccctcccctacttctcccttgctcccaaagctttccttggagaagggccctcctgcagctggaccctgcagggtggctccctcctccccatcaagcacaagagagggcccaggaaaaaaggtttcacataagtgtagagtcgcaaggacgcttagagtcggcagagtctggggtagggagacagcgacttgtccaaggtcaagcacagagggagaggttcaggagtcaggtcttctgccttctgagttggctcatcctgggcagtcacagactgtcctgcctgcacggctcctatccacctgggggtgtcgcagttgaggggctaattcccaggggactgacgttagttccctactccatccttccctggtgattcttgatcttcaaagcctcggggatcccaggtttccccatgtaactgagacaccctgcctgttagccctgggagacccctaaccttggcccaagacccctttgattctctaaggagcacgaaagggggaatgcccctcccaggagtttatgggagaagggactgggccggctgcctcccagcgatgcacttgacctgacactccccatgtcctggtgcgcacagcccttgtcggtgccccggcccctcccgcagcgttactgcctgtgtatagtataaatatatatattttctatatataagatgtataatataaggctccacaaatatatctgtgtgtgtgtgtgcgtgtgtgtgcggtgaagggcggtccccatcctgggcctccactctagacccccccaccacctggttaagtctcgagtgaatccagtggccccgtggcaccctcctttatgacatccatccatctgtggtgaaccaagtgaaggtggtgacttctggtgacatagtaataaagtgaagactcagaaccca

SEQ ID NO: 453799 - DNA, 1825 bp, Homo sapiens
ggtttgaggctgggaagcagccctgcctaggagtcaggagacctgcttccgatcggggctgcctctgattttcctagcctctgtcttcccatccataaaatgagagggtaggatctgggggacacaggtgtcgacatcagatgcacatgggccaggcagggcctgagagccgtgagcaggccgggtgacacatgcgtgcctatcctaagtcctaagagggtacctctgctcggctgccaagcaggaatagggacctagagaaggcagaagtctgaatttttacatgaaatctgatcttgatatgttggaagtttattcaggtttaaacaatatattgtgtgtgtcaaacaaagtatgtctctgggcccagcaggccctgggctggcagctcggctggcccctctttcccactggtctgggtcatgtctgtttcttctctcctaatcacccttctgcagagatctggggccacatcacctccatagccccatcccaagagccctccccataacccacagctgcctcccctctggaccggcgagcacttctgggcccagcctcctgcaaggagactcttgaggctacatacaggccgccagccgtccctgtttcccccatccttctggtttgccccgggttgacgtctttttctttttgagggcccctggatatccatttttgaggggtacacccatctccccaacaatattagaagatagcatttggagggggagacccgtggttcaggccctagtgggccagccttggctgctccacccctcagtgtcctcaagactgggtaggaagaaccaggtgaccccaggggatctcagtccagagaaggtgccccagaagtggggaccacccagcctacagggaggagtttaggggcggggctcacagaggagtagtggatgatttctagccatgggtctgaagtacctgaccaacaggtgcctgcccggccccctgaagccagcctccctcctggcacctctgcagctcttccccactggcctcacccctactctctcctggcagagcctgaccgcagccctggccgtgcggagattcaaggacctaagcttccaggaggagtacagcacactgttccctgcctcggcacagccgtaggcctccccggcttgcagaggccggcagccctgtatcacccctggcagtgaggtggcaggagcagcctagtgccagaaatgtccaagatgccagggcatgcagggcagtggaaggctggcttgaggaaccaattcaggttctccactgactcattcattccttcaccgcctccttcattgattcttcatgcgttcattcattcagtaaacatttattgagcagctgttttgtgcctagtgatgaattaggtggggtccttggctccaggagcccacaggctggggaggagaaaacaaacacatcaatatctcttccaaatggacagccgtggacagttaccaggtaggtagcggccccatacatgggctgcctagaggcgttcatggtccccattgctgagctgtgggtgcagagcaatagcctctcccttcacagcggtgtgaagagtgacctcactgtccttagggttagcatcctggccgaggatgtcacagggctcctggtctggctctgtcctcatgtgctatgtgaccctgacaaacccgtgcacctctctcagcctcagtccacttacctgaactgaggggtgataatggaccaacctctcaaggctgttgtgccaatgaaacaaaggccagcccagggcttagcacaagcatgctcaataaatgtaagctcttttgttcattca

SEQ ID NO: 453800 - DNA, 2032 bp, Homo sapiens
cgcgcaggggagggggcgggggcgccgcgcacgcgcacgggccggcggcgcgcgccgagcggggggcaccgcgcgggtgcagccacgatggaagggggtgcgtacggagcgggcaaagccgggggcgccttcgacccctacaccctggtccggcagccgcacaccatcctgcgcgtcgtgtcttggctgttctccatagtggtgttcggctccatcgtgaacgagggctacctcaacagcgcctccgagggggaggagttctgcatctacaaccgcaaccccaacgcctgcagctatggcgtggccgtgggcgtgctcgccttcctcacctgcctgctgtacctggccctggacgtgtacttcccgcagatcagcagcgtcaaggaccgcaagaaagccgtcctgtccgacatcggtgtctcggccttctgggctttcctctggttcgtgggattctgctacctggccaaccagtggcaggtctccaagcccaaggacaacccactgaacgaagggacggacgcagcccgggccgccatcgccttctcctttttctccatcttcacctggagcctgaccgcagccctggccgtgcggagattcaaggacctaagcttccaggaggagtacagcacactgttccctgcctcggcacagccgtaggcctccccggcttgcagaggccggcagccctgtatcacccctggcagtgaggtggcaggagcagcctagtgccagaaatgtccaagatgccagggcatgcagggcagtggaaggctggcttgaggaaccaattcaggttctccactgactcattcattccttcaccgcctccttcattgattcttcatgcgttcattcattcagtaaacatttattgagcagctgttttgtgcctagtgatgaattaggtggggtccttggctccaggagcccacaggctggggaggagaaaacaaacacatcaatatctcttccaaatggacagccgtggacagttaccaggtaggtagcggccccatacatgggctgcctagaggcgttcatggtccccattgctgagctgtgggtgcagagcaatagcctctcccttcacagcggtgtgaagagtgacctcactgtccttagggttagcatcctggccgaggatgtcacagggctcctggtctggctctgtcctcatgtgctatgtgaccctgacaaacccgtgcacctctctcagcctcagtccacttacctgaactgaggggtgataatggaccaacctctcaaggctgttgtgccaatgaaacaaaggccagcccagggcttagcacaagcatgctcaataaatgtaagctcttttgttcattcattcattcattcattcattcttctctccagagagtcaggggcacctccagaatctctactttaagagtaattctcatgtgatgaatccttgttcctccaaaggattttggtctctggttctacacaggtttcctgcttgaggcccccagctgcctgggcaggaactcacccattcctccactctctgctggagttgaggaggctggtggagcacagacagttcccccaaagcaatgcctcaaccctgcgagggcctgagcacatcgagagtgagcttcctggcactggaggcatcccagtgcagatgcagactgcctgctgcacgctggagatgctgcagagagagcacctacactgagacagtggggccagggtgaccaccaggtccctgggctctcagtagaactcccatcctccctctgcagcccaggccagcgggggcccaggcctctcctttgctcctgtcttgtggccccttaaactggttgcccaaatgaagctttgacttagtgagggcagagagctgaacacagagacagtatgagtgcctacagccagaggcatctccctagaaggatcagtaggggtcatctgctccagccctctgcctctgtacaggaaaccagcctggatagtagagccagggagctcggggagaaccgcgtctacagacattgct

SEQ ID NO: 453801 - DNA, 1187 bp, Homo sapiens
cgcgcaggggagggggcgggggcgccgcgcacgcgcacgggccggcggcgcgcgccgagcggggggcaccgcgcgggtgcagccacgatggaagggggtgcgtacggagcgggcaaagccgggggcgccttcgacccctacaccctggtccggcagccgcacaccatcctgcgcgtcgtgtcttggctgttctccatagtggtgttcggctccatcgtgaacgagggctacctcaacagcgcctccgagggggaggagttctgcatctacaaccgcaaccccaacgcctgcagctatggcgtggccgtgggcgtgctcgccttcctcacctgcctgctgtacctggccctggacgtgtacttcccgcagatcagcagcgtcaaggaccgcaagaaagccgtcctgtccgacatcggtgtctcggccttctgggctttcctctggttcgtgggattctgctacctggccaaccagtggcaggtctccaagcccaaggacaacccactgaacgaagggacggacgcagcccgggccgccatcgccttctcctttttctccatcttcacctggagcctgaccgcagccctggccgtgcggagattcaaggacctaagcttccaggaggagtacagcacactgttccctgcctcggcacagccgtaggcctccccggcttgcagaggccggcagccctgtatcacccctggcagtgaggtggcaggagcagcctagtgccagaaatgtccaagatgccagggcatgcagggcagtggaaggctggcttgaggaaccaattcaggttctccactgactcattcattccttcaccgcctccttcattgattcttcatgcgttcattcattcagtaaacatttattgagcagcaaaaaaaaaaaaaaaaaaaaaaaaaaaaacccgggggccttaatgggggggggggaaacaaggggtcactgaaagtgccgccagtggcgccaaacagcgtgttcccgtgaccccagtttcttgggcaccacaggggggaaacaatctgcgcagggggtccaccacaataagggcgagcgcgcgaatataaacttccgagaaaacgccgggtaaccccgggattaagagcgcgcagaacgaaaaaggacacaccgagcgagagaacagcaccacgctaccagcaagcgcagaaagaagagag

SEQ ID NO: 453802 - DNA, 826 bp, Homo sapiens
cagcaggcatgcctccttggtctcatgttgaccttagagtttgggattctggaattcgatccttcatggataggcagctggacacagaggtcgtgggtgagctggaggagcaggcccggatgtgagctgttctccatagtggtgttcggctccatcgtgaacgagggctacctcaacagcgcctccgagggggaggagttctgcatctacaaccgcaaccccaacgcctgcagctatggcgtggccgtgggcgtgctcgccttcctcacctgcctgctgtacctggccctggacgtgtacttcccgcagatcagcagcgtcaaggaccgcaagaaagccgtcctgtccgacatcggtgtctcggccttctgggctttcctctggttcgtgggattctgctacctggccaaccagtggcaggtctccaagcccaaggacaacccactgaacgaagggacggacgcagcccgggccgccatcgccttctcctttttctccatcttcacctggagcctgaccgcagccctggccgtgcggagattcaaggacctaagcttccaggaggagtacagcacactgttccctgcctcggcacagccgtaggcctccccggcttgcagaggccggcagccctgtatcacccctggcagtgaggtggcaggagcagcctagtgccagaaatgtccaagatgccagggcatgcagggcagtggaaggctggcttgaggaaccaattcaggttctccactgactcattcattccttcaccgcctccttcattgattcttcatgcgttcattcattcagtaaacatttattgagcagc

SEQ ID NO: 453803 - DNA, 1354 bp, Homo sapiens
cgcgcaggggagggggcgggggcgccgcgcacgcgcacgggccggcggcgcgcgccgagcggggggcaccgcgcgggtgcagccacgatggaagggggtgcgtacggagcgggcaaagccgggggcgccttcgacccctacaccctggtccggcagccgcacaccatcctgcgcgtcgtgtcttggctgttctccatagtggtgttcggctccatcgtgaacgagggctacctcaacagcgcctccgagggggaggagttctgcatctacaaccgcaaccccaacgcctgcagctatggcgtggccgtgggcgtgctcgccttcctcacctgcctgctgtacctggccctggacgtgtacttcccgcagatcagcagcgtcaaggaccgcaagaaagccgtcctgtccgacatcggtgtctcggccttctgggctttcctctggttcgtgggattctgctacctggccaaccagtggcaggtctccaagcccaaggacaacccactgaacgaagggacggacgcagcccgggccgccatcgccttctcctttttctccatcttcacctggagcctgaccgcagccctggccgtgcggagattcaaggacctaagcttccaggaggagtacagcacactgttccctgcctcggcacagccgtaggcctccccggcttgcagaggccggcagccctgtatcacccctggcagtgaggtggcaggagcagcctagtgccagaaatgtccaagatgccagggcatgcagggcagtggaaggctggcttgaggaaccaattcaggttctccactgactcattcattccttcaccgcctccttcattgattcttcatgcgttcattcattcagtaaacatttattgagcagctgttttgtgcctagtgatgaattaggtggggtccttggctccaggagcccacaggctggggaggagaaaacaaacacatcaatatctcttccaaatggacagccgtggacagttaccaggtaggtagcggccccatacatgggctgcctagaggcgttcatggtccccattgctgagctgtgggtgcagagcaatagcctctcccttcacagcggtgtgaagagtgacctcactgtccttagggttagcatcctggccgaggatgtcacagggctcctggtctggctctgtcctcatgtgctatgtgaccctgacaaacccgtgcacctctctcagcctcagtccacttacctgaactgaggggtgataatggaccaacctctcaaggctgttgtgccaatgaaacaaaggccagcccagggcttagcacaagcatgctcaataaatgtaagctcttttgttcattca

SEQ ID NO: 453804 - DNA, 4393 bp, Homo sapiens
cagcaggcatgcctccttggtctcatgttgaccttagagtttgggattctggaattcgatccttcatggataggcagctggacacagaggtcgtgggtgagctggaggagcaggcccggatgtgagctgttctccatagtggtgttcggctccatcgtgaacgagggctacctcaacagcgcctccgagggggaggagttctgcatctacaaccgcaaccccaacgcctgcagctatggcgtggccgtgggcgtgctcgccttcctcacctgcctgctgtacctggccctggacgtgtacttcccgcagatcagcagcgtcaaggaccgcaagaaagccgtcctgtccgacatcggtgtctcggccttctgggctttcctctggttcgtgggattctgctacctggccaaccagtggcaggtctccaagcccaaggacaacccactgaacgaagggacggacgcagcccgggccgccatcgccttctcctttttctccatcttcacctgggcgggccaggctgtgctggccttccagcggtaccagattggcgccgactcggccctcttctcccaggactacatggaccccagccaggactccagcatgccttacgcgccctacgtggagcccaacactgggccggatcccgccggtatgggcggcacctaccagcagccggccaacaccttcgacaccgagccccagggctaccagtcgcagggctactgagccacagtgaccgcctgcccccgcccctccccatctgtcccctctctccacacccagcccctgctcctgcccaggctgccctgcccagcgcctcatcagcctctgccttgtcccactgaggtccagggtagctcggggcaggggtggggcagtccagtgttggggactgtctacgtatgtgcaagtatatcccagggcatgtgccccgcaggggcctagagggtgggggccaggggtatttgcattcgtacattgtgtcatcaagcattccttgagcgcctactgggcatccggcctgtgctgggcatgggtggtgacattggcagaaatggccactggaaaggggagcgatgagctgtggaggaagccctggtggtaccagaggccagaatggtgggaaagacagatccagataatgctgggaagtgtggctacaccgtggcttggtcatagggtgagtgtaaacacccacaggacactgggggctgtcaccctgctctggcagtcctgctaagagtgtcagggccgtctccattttatggttgaggaaactgaggtctagagaggtcaagattacttgcccagaatcactcaggcagctagtgatagaggtggggccaagcccaggctgcccgactgcagaccacgtgctcttccctggccacccacctcctaccatccccacgcttggggcttccctgctcagtgttactgtcattctgggaggccttggggccctcagccccttgagacaccctgattctgctgcatgccaagggcctgttctgccccagctgttcctcctcccctggggacaggcccacctccgggtccctccacccacatccccctggtcctacccctggcccttggcctcctccaagagggctcaccccgggtgctgctctgtgctctgcgtgtcccacagacgcttgttccagggggctccagcaaaccccttcgtggtctctcaaaggactgatcactgtccttgcctctaggaggggtcactaagcccttacctagggctgggtggacaacaaggcacagatgagggtgtgactggcccgaggtcacggtgagtgagtggcaaagctggccctgacgcctgggtttcttggccccagctgcccagcaggtgcctcgattccctgcccttgtgacctcccaggaaacagaactgatctgggacactatgtcacctctcctctcatctggggtcagtcagggttcgggggctgcagcagccaagcgcatgagaggtgtttccttggccttccagaaggcccactgtggagccagcctccctatgggaggcagagcggcaaggacagggctttggaatcagccaggtcggctcctgggctgtggccgtggagagacactgcccccaggatgacacaggcaagagcccctgaggcatgggaggcccagggaagaccatgggctgtaggggagagtgtggcaggtgacccaaaggcccaaagagggccgtggggcctgaggaggtcataatctcttctgagtgggggcaggtcgattcttgcacaaggtgggctcttcactgagccataagggacagggaggtatgggagagcgctgggggcccatccccctgtccacccagtgtccactggcctgtccttcagggagcagagcagagcaggtggtggacgggcccagtgctgggtgttttcaccaccatccccccatcccccatctaagaatcctaagaggcaggcgatccctcacctgcttactcactcagcagttacccggcccctgtgctggagataccaagggcatgggtggtccctgcttcgatggccccaaagctgggccagagttaagggaaagaggaggaagtcctaagcagagaagtagcaccattatccccatttaacagaagggaaactgaggctcggcaagcataggcgagttggcagtggaacacggatctaaactcaggtgtgtccaagtcctcccaaaggacagcagtgatggagaggaccccagccagctgtgtgacagctggttgttgctgacttcattttccaatccggagaaggggctctgtccacagtcccccgccgccaggtggcccacatgggaccagcatgggggcaggttatctgttggcctgaagagtgaaacctgtaccaggccaaaggtgagggcgtgagtgagggcaggagtgtttatggcagagtgaagttctgtgcccaccacaagaggctgtgagatgttctgaccctcacccactgtccaccaaaagcctctcctgctgatgggcactaggagacctcagggtactgcccatctgtttctcctcgggtgccagccagctgctggtgatcctcagccggagggcagggtaccaggtaagcttaactccatcttgggtgtttgtgacaggccctgcctgccaccctaggcagggaaagctgtcaagactcctgccaggaatggggggtgctgagtcatctcacgaagaatccctcactcttcccgggttcagcccagaagcccttccaggcatgatcttccccatcaggctgggctctggcagggacctgcccaggatggagatgagagagggtgagagatggagggcgagatttggatgggacccagggctcctgactctgccctggaaggttcatggggaaactcgctccttctgttggcagaggacagcccctggggaaccccaggcccaactctgtccggtatcccttttcctcccagctgccctcccctacttctcccttgctcccaaagctttccttggagaagggccctcctgcagctggaccctgcagggtggctccctcctccccatcaagcacaagagagggcccaggaaaaaaggtttcacataagtgtagagtcgcaaggacgcttagagtcggcagagtctggggtagggagacagcgacttgtccaaggtcaagcacagagggagaggttcaggagtcaggtcttctgccttctgagttggctcatcctgggcagtcacagactgtcctgcctgcacggctcctatccacctgggggtgtcgcagttgaggggctaattcccaggggactgacgttagttccctactccatccttccctggtgattcttgatcttcaaagcctcggggatcccaggtttccccatgtaactgagacaccctgcctgttagccctgggagacccctaaccttggcccaagacccctttgattctctaaggagcacgaaagggggaatgcccctcccaggagtttatgggagaagggactgggccggctgcctcccagcgatgcacttgacctgacactccccatgtcctggtgcgcacagcccttgtcggtgccccggcccctcccgcagcgttactgcctgtgtatagtataaatatatatattttctatatataagatgtataatataaggctccacaaatatatctgtgtgtgtgtgtgcgtgtgtgtgcggtgaagggcggtccccatcctgggcctccactctagacccccccaccacctggttaagtctcgagtgaatccagtggccccgtggcaccctcctttatgacatccatccatctgtggtgaaccaagtgaaggtggtgacttctggtgacatagtaataaagtgaagactcagaaccca

SEQ ID NO: 453805 - DNA, 4671 bp, Homo sapiens
cgcgcaggggagggggcgggggcgccgcgcacgcgcacgggccggcggcgcgcgccgagcggggggcaccgcgcgggtgcagccacgatggaagggggtgcgtacggagcgggcaaagccgggggcgccttcgacccctacaccctggtccggcagccgcacaccatcctgcgcgtcgtgtcttggctgttctccatagtggtgttcggctccatcgtgaacgagggctacctcaacagcgcctccgagggggaggagttctgcatctacaaccgcaaccccaacgcctgcagctatggcgtggccgtgggcgtgctcgccttcctcacctgcctgctgtacctggccctggacgtgtacttcccgcagatcagcagcgtcaaggaccgcaagaaagccgtcctgtccgacatcggtgtctcggccttctgggctttcctctggttcgtgggattctgctacctggccaaccagtggcaggtctccaagcccaaggacaacccactgaacgaagggacggacgcagcccgggccgccatcgccttctcctttttctccatcttcacctgggcgggccaggctgtgctggccttccagcggtaccagattggcgccgactcggccctcttctcccaggactacatggaccccagccaggactccagcatgccttacgcgccctacgtggagcccaacactgggccggatcccgccggtatgggcggcacctaccagcagccggccaacaccttcgacaccgagccccagggctaccagtcgcagggctactgagccacagtgaccgcctgcccccgcccctccccatctgtcccctctctccacacccagcccctgctcctgcccaggctgccctgcccagcgcctcatcagcctctgccttgtcccactgaggtccagggtagctcggggcaggggtggggcagtccagtgttggggactgtctacgtatgtgcaagtatatcccagggcatgtgccccgcaggggcctagagggtgggggccaggggtatttgcattcgtacattgtgtcatcaagcattccttgagcgcctactgggcatccggcctgtgctgggcatgggtggtgacattggcagaaatggccactggaaaggggagcgatgagctgtggaggaagccctggtggtaccagaggccagaatggtgggaaagacagatccagataatgctgggaagtgtggctacaccgtggcttggtcatagggtgagtgtaaacacccacaggacactgggggctgtcaccctgctctggcagtcctgctaagagtgtcagggccgtctccattttatggttgaggaaactgaggtctagagaggtcaagattacttgcccagaatcactcaggcagctagtgatagaggtggggccaagcccaggctgcccgactgcagaccacgtgctcttccctggccacccacctcctaccatccccacgcttggggcttccctgctcagtgttactgtcattctgggaggccttggggccctcagccccttgagacaccctgattctgctgcatgccaagggcctgttctgccccagctgttcctcctcccctggggacaggcccacctccgggtccctccacccacatccccctggtcctacccctggcccttggcctcctccaagagggctcaccccgggtgctgctctgtgctctgcgtgtcccacagacgcttgttccagggggctccagcaaaccccttcgtggtctctcaaaggactgatcactgtccttgcctctaggaggggtcactaagcccttacctagggctgggtggacaacaaggcacagatgagggtgtgactggcccgaggtcacggtgagtgagtggcaaagctggccctgacgcctgggtttcttggccccagctgcccagcaggtgcctcgattccctgcccttgtgacctcccaggaaacagaactgatctgggacactatgtcacctctcctctcatctggggtcagtcagggttcgggggctgcagcagccaagcgcatgagaggtgtttccttggccttccagaaggcccactgtggagccagcctccctatgggaggcagagcggcaaggacagggctttggaatcagccaggtcggctcctgggctgtggccgtggagagacactgcccccaggatgacacaggcaagagcccctgaggcatgggaggcccagggaagaccatgggctgtaggggagagtgtggcaggtgacccaaaggcccaaagagggccgtggggcctgaggaggtcataatctcttctgagtgggggcaggtcgattcttgcacaaggtgggctcttcactgagccataagggacagggaggtatgggagagcgctgggggcccatccccctgtccacccagtgtccactggcctgtccttcagggagcagagcagagcaggtggtggacgggcccagtgctgggtgttttcaccaccatccccccatcccccatctaagaatcctaagaggcaggcgatccctcacctgcttactcactcagcagttacccggcccctgtgctggagataccaagggcatgggtggtccctgcttcgatggccccaaagctgggccagagttaagggaaagaggaggaagtcctaagcagagaagtagcaccattatccccatttaacagaagggaaactgaggctcggcaagcataggcgagttggcagtggaacacggatctaaactcaggtgtgtccaagtcctcccaaaggacagcagtgatggagaggaccccagccagctgtgtgacagctggttgttgctgacttcattttccaatccggagaaggggctctgtccacagtcccccgccgccaggtggcccacatgggaccagcatgggggcaggttatctgttggcctgaagagtgaaacctgtaccaggccaaaggtgagggcgtgagtgagggcaggagtgtttatggcagagtgaagttctgtgcccaccacaagaggctgtgagatgttctgaccctcacccactgtccaccaaaagcctctcctgctgatgggcactaggagacctcagggtactgcccatctgtttctcctcgggtgccagccagctgctggtgatcctcagccggagggcagggtaccaggtaagcttaactccatcttgggtgtttgtgacaggccctgcctgccaccctaggcagggaaagctgtcaagactcctgccaggaatggggggtgctgagtcatctcacgaagaatccctcactcttcccgggttcagcccagaagcccttccaggcatgatcttccccatcaggctgggctctggcagggacctgcccaggatggagatgagagagggtgagagatggagggcgagatttggatgggacccagggctcctgactctgccctggaaggttcatggggaaactcgctccttctgttggcagaggacagcccctggggaaccccaggcccaactctgtccggtatcccttttcctcccagctgccctcccctacttctcccttgctcccaaagctttccttggagaagggccctcctgcagctggaccctgcagggtggctccctcctccccatcaagcacaagagagggcccaggaaaaaaggtttcacataagtgtagagtcgcaaggacgcttagagtcggcagagtctggggtagggagacagcgacttgtccaaggtcaagcacagagggagaggttcaggagtcaggtcttctgccttctgagttggctcatcctgggcagtcacagactgtcctgcctgcacggctcctatccacctgggggtgtcgcagttgaggggctaattcccaggggactgacgttagttccctactccatccttccctggtgattcttgatcttcaaagcctcggggatcccaggtttccccatgtaactgagacaccctgcctgttagccctgggagacccctaaccttggcccaagacccctttgattctctaaggagcacgaaagggggaatgcccctcccaggagtttatgggagaagggactgggccggctgcctcccagcgatgcacttgacctgacactccccatgtcctggtgcgcacagcccttgtcggtgccccggcccctcccgcagcgttactgcctgtgtatagtataaatatatatattttctatatataagatgtataatataaggctccacaaatatatctgtgtgtgtgtgtgcgtgtgtgtgcggtgaagggcggtccccatcctgggcctccactctagacccccccaccacctggttaagtctcgagtgaatccagtggccccgtggcaccctcctttatgacatccatccatctgtggtgaaccaagtgaaggtggtgacttctggtgacatagtaataaagtgaagactcagaacccaaaaaaaaagtcaacgacacaagaggatgggggagacaacggtggaaaacagaggggggggggccaccagacgagagcaccccgggaggggccctcaaggacagacgcagcccaccaggtgtagtcaaaagcggggcgccccacaagagaggcgcaggatgaagacaacggcgggcgggcgcgcgactctaacacaaggacggcacgggcggagaaccg

SEQ ID NO: 453806 - DNA, 853 bp, Homo sapiens
aatgaatggttctcaaacttccacagagcctcagggttccctggcagtgcctctgggaggtgggctgggccccaggtgggcaccccacctgcttggcagatgcacgccttgtcctgagcaggtctgggcttctctggggagaccttggcactcacaggagattgcgtggctatgaggctcccactgctgacgcccccaggctcggctctcagtgggcccctcgctaaacctggggctctgtggggtcgcagcacgttagaagtcgaagcccagacccacccagccaagctgccatccttgccccagcctcgtcctccttcccatacctcatttgtctggcagcctgagggttggggtcttcctgcctgcagagttgcaggcatcaggggtggaccgggggggcccacgtcagcggtgtggctggacatgggggtttggcagaggctgcagaaatgcggcctgagttgattaccttctttctctgtctctccctccatcctcccctctcactgcccgtggctctcctctgactggccctgaccctgccctgtctgtggcctcctcccccctgcatctggctggcttccctcttctcgcctgcatcttctcttggctcccctctctcttcccctaccccctttgcctgtccctttgggggtgggggagcatgggagatgcactcttgaatgtccctctgttcctcggcttccccattttctccccactcaccctctcccccatgtgtggcactgcctattctgcccggtcctgggaccccccagccttctgggctttcctctggttcgtgggattctgctacctggccaaccagtggcaggtctccaagcccaag

SEQ ID NO: 453807 - DNA, 7287 bp, Homo sapiens
  misc_feature (3181)..(3181): n is a, c, g, or t
agacaatcacccagtcagtatttattaggcgcctactgcggacggttggtcttcacgcagatcaggcgagaagggatagtgatgcgcgggccgctgcggagacccggagcccgccgcggatcacgggaatttcgcgcctattttttgttggctgggtgttctcgccagtgattgggtcccggcaaggcgtgccggtgcgctcggctgcggctgctccgtcgacctttgcaggaccgggcggtgcagggctcactcggctggcgtcccgggggatgggccaccaggagtctccgctggcccgggcgccggcgggaggtgcagcttatgtaaagaggttatgtaaagggctcagctggcgcgaacacgtggaaagccacgggagcctaggagcccaggcttccccagcgagcgccgcggcagcagaaggatccgctacacgccgggctcgggccgccacctcccgcgctgctcggtcccggaggcagcccgggcccggagcggaccatccccaggcaggggctccaggggggaaacgggccgcccggaagtggaggtgcgcgggccaggtaagggcgccgttggaggactgaaggccagcgccgaggctggagttactgccactgcctccgcgcttgggaagggaaatcgggtcctcggccagtcgcactccgagaagccgaacttttcagccaatcccttctacccgtcgccctcggggacttgggtcggtccgctgggctccgctagggcttaattcaatggactgtttacacccgggcgaacacaaggcggggcgcggggaggagcgtcacagagggggccaagcaaagaaaaatatttccgccggccaaatcgcgtctctaagcggttttcagaaggcgtgaagcttgctggctcttctttttcctatcgctacatgacaagctaacagagagagcggagagtttgtgcttttctttccggttccccctctgagctgctgcccagtggttcggtctttcccgctttcccctcccctcccccgttcaatcagcggcggtggcttccgtcttaaaggggccgcggcggccgggggaggaggaggtgggacgccccgcggcctacgctcctggcctccccgccttggcctggccgtttaaccgattctttcgcccgcaggtcacaatccaaggtccggctcctccgcgtcccagggccggacggagggatgaggcagggggggcccgggcagcgccgttgctgctccccccgccgcccgcagccatggaaacggggaaggacggcgcccgcagaggtacacaaagcccggagcggaaaaggcgaagcccagtgccgcgggcgcccagcacgaagctgaggccggcggcggcggcccgggccatggatccggtggcggccgaggccccgggcgaggccttcctggcgcggcgacggcctgagggcggtggcgggtccgcgcggccgcgttacagcctgttggcggagatcgggcgcggcagctacggcgtggtttatgaggcagtggccgggcgcagcggggcccgggtggcggtcaagaagatccgctgcgacgcccccgagaacgtggagctggcgctggctgaattctgggccctcaccagcctcaagcggcgccaccagaacgtcgtgcagtttgaggagtgcgtcctgcagcgcaatgggttagcccagcgcatgagtcacggcaacaagagctcgcagctttacctgcgcctggtggagacctcgctgaaaggagaaaggatcctgggttatgctgaggagccctgctatctctggtttgtcatggagttctgtgaaggtggagacctgaatcagtatgtcctgtcccggaggccagacccagccaccaacaaaagtttcatgctacagctgacgagcgccattgccttcctgcacaaaaaccatattgtgcacagggacctgaagccagacaacatcctcatcacagagcggtctggcacccccatcctcaaagtggccgactttggactaagcaaggtctgtgctgggctggcaccccgaggcaaagagggcaatcaagacaacaaaaatgtgaatgtgaataagtactggctgtcctcagcctgcggttcggacttctacatggctcctgaagtctgggagggacactacacagccaaggcggacatctttgccctgggcattatcatctgggcaatgatagaaagaatcacttttattgactctgagaccaagaaggagctcctggggacctacattaaacaggggactgagatcgtccctgttggtgaggcgctgctagaaaacccaaagatggagttgcacatcccccaaaaacgcaggacttccatgtctgaggggatcaagcagctcttgaaagatatgttagctgctaacccacaggaccggcctgatgcctttgaacttgaaaccagaatggaccaggtcacatgtgctgcttaaaattcagggctaagcattttgggtgattttaaactaggtcgattcctcgggacccacagtctcaccacgtctcctccagaggacggcagagggtacaggtggtggcctggccggttggcgatctcccgacagctggatccggcaatgtgaagcttttgtttgggtttccccgcttctttttagttttgctttatttttttccttttcttttcttttttttttttcctctttcctttttttaaatttaaaccattgagacttcagaagagcaggacacaatgctgtggacaggcaccaatttctttaaagaaattcaatgtgggcaaggcatatgtgtaaatttcacttttactttttataaggggttagggagctatttttggttttgtccttcactttccctctgtcttccttctttatacttttctcagttctacttatgacacctcacttccctagagaaggcctgcctccccatagggaatctgggggtttcttctggaacggggcgtgaggacacaaggaggcctctgggccacgcctccctaccagatgcaggaactcctggactccttggtgggctggccctggctagcccttgggcctcggagatgatcagaggtgaagaaccgcctggaagaggaaggccagggtttggccaggagaactaagaaggtctcaactccaggctttgttgtgtttaagctattgngagccccaggccacaccaggacttgcagtggtgggaatccattcctcttctgccctgtgttgcagggaactaggaggtaagggtggagggcgaccatctcgctcttgctggcggtggagcagccatccctgcctttctgttgggaaaaactgttgtgccaaactcttgtgtggaacacagctgggtcttcagcaggcatctgtcactgccgtgaggtcagcgcttctcacctaactgcctcctggattgtcatcttcccagatgtgtcccatagtgtccaggtgtcacagagacggcctgaggccctaagatctggttgtgactttgccatgataacagggtgtcctgaactggctgccgttgtcgtgttctcacagtgaagggcgtgccctgtgtgccggggtccatggtgtcatatgcagtgacacacactgtcaagcgccatttccctcacccctggagacttactgttaggtgcctgccctcagtatagacgtatccaatgggaaaacagcggacctgcccagagcagggaggtgtcgtggaactgggtagaccccctgcagcgttaggggcccatttgtgggctcgccaccttcaggcttccccagccatgacacttcagccccgccacccatgcctgtctgctgcagccatccttgcactctccagcgacactctcgcacctccctaggggaagcttccctccccctgggctgctgctctgagcccgtctgttctccccctgcaagaaggggcaatgctcttgtgttgtccctctgtctggacgcgcctggccactccgaaggcttttcaccccattatggccaaatagtatagggccactggggagggggaagggaatcattttgtgttcatttttgttttctgtttcacctaaaccagcataggattgataggggagacggttggcgggcatttccgtttctatgtgatgtaccaaggcagcaggggcttttacctgctaagcggcaatcctttggccctgagaatttgggagagaacagtgcatcaggccaggctcagcaatatgtttgctcacattctttcagccttctctcacccccctcaacaccaaactttcttccttgtgagcagaaggttggctgctgttagcaggatcccacagtgataaccaggcccttcccttcctaagccaaaacccattgtgactgcctgtctctcctgtctctgacttctcaggcagcctcctgagtgcactgagttgtatccgagagggtgggaacagcagcatcccctaattgcagtacacggttccttttccgcccgccaccctgcctttccttgggggcagctgtctctctgtacatgagcaaatgggcaaaaacagtccccaaacccagcacccccctctccctggctgcagcccacactgtaacatccctagtgaggctccagcctaatgagccccttattttctttttcttccctccccaggtctcgtagctctaactaaaaagttcttggagccatcgtgctccccctttgttatttttcttgctatcagagtagcaagaaacagcacccctgtaggtgacaggtgggcagcctggtaggggtcgccagcctccatgccccctcatcttccagttcttgcttagtggcacgacctctttccatagcataaatgcaggccagcgttttagccccaagtgcctgcccttgcttcttacccctcccctgctttctcaaacacttgcccacctcaggcactcagcgggctccgccgtggtgagagaactggccgtggctcagccccgggtagcacctgtagtttcagtgccactctccactgtccccttgtggaccagcttccactcactgtcacgtcccccctcctgcgtcttcactgggtctcaggctgccagcagctctctggtgcatcgtctcaacaccaccaagtttgtaggacctgcccaagttctagtagtattcaaaacttcaaacggcagtcatttgttctcctcggctctgtggcaaggatagccctttggagggggactcttgacctcggctgttagggatctgaacttggttttcccgtcagaagaatcagcaggacagatcgtagtgccttattccattgtcctcccctggccaggcctcctggctcagctggaagtgcatggcttctttctccctatctgtgtcctctgtcacttgctctttcactctctctctcattcccagagagccacgggggagggatcaccctcacccccaacaccctcttcctgagggctgtagccaggtccgcatctccccaccaccaccagggcactcactcgcagctatagcccaggacagaaaaactgtgctttggacaggtgcacactctctgcctcttacctctagccaggaggatgcctcagtctgttcattcgagactggccccgtctgaaccttctctgggcactggggactaaggttgcaggccttagcctcgtctcgtcccagaggcattgggtcaggagaatgggaatttttttcctcccacctggacatagtttgcccctgtggctgcctttctgagggagtatactaaatgtttacttaagaaacaccctgtttacagccagaggagaaacacccaacactgagtggagatttgactctggacagggcctggcctccttagtggcactgccggggggccccagagcgaatgagggcagagatgcccggggcaggggcaaacgccctccgctccctctgctcccaaccctgtggtgctaggaccactccccgccttccctacggcctcctcgccctgcacattccccacctccacattcccctcctccaagatctcagctccttaacatatcagttgtctcctagcctagaaaaccagtgtttggagcaataagatgattatttttgcttgaatctttttctaagagaaggaaaagagctggcattgtgggaattttctttttatgctgttagctgtttaccttcttagaagacatcctaataggatggatgtctgggttttagccttggggtatcttttggaaacttagaaaagcaggagtcaggctgccaccccctaaggagggaccctaacgttctgcccttgcctggttccatatggctccttccagccctgcccaccaagtgcagctcccactttccatcctgcccatacgcccctcttcccccgacatctgggggcgctggtggcacttactctaggttggtctcagactatccctccccttggctggttttccctcctaggcctgtctggcagcccccagacagacgtagctcctgggagtctcggccctggcaaccttggaagagccaagctgacattgtttagctcttcaggccactgggttttggaggcagaagtccagagatactggctctgccaagctgtcgtactgggctgtggcacagccttcgagacaacacgggtgtatctctgatcctgccctacctaggcttcaaggggcttctgtctggagaaatgccctcaaagggtaaccagtaggtgtggcattgaattggccagtgttagcatctacagccatcaccgagatgagtccactgccgttgcctgcccgagggccccctaaggttatagacggtatcagcagggaggccgtcccgctggttttctaggagagcccacaggaggaagggagcctcttcaggggcactggaatcttttgtgccaggggcttcttttcatcagagccggggagtacattgcagtgacttcttaaacatttgtgtgggacagacgagcgtgagggaggttttaagccaggcacaaagttagtttccaatactagttaataaatctatttttcttcatttcctttttttgcacagaagctggtaatctaggacctacgtgtgaacaactttatatgaatattttttgtacttggtttacttgggttggtatgatacattatatttaagttccttgaacactgtggatcccctaatgtgtatgaatgactgaggctttgtaaattaagggacgtttgtgtgaataaagttatttgatggggtcaaagaagccatatgtgatttgaaaaaaagtg

SEQ ID NO: 453808 - DNA, 7156 bp, Homo sapiens
  misc_feature (3181)..(3181): n is a, c, g, or t
agacaatcacccagtcagtatttattaggcgcctactgcggacggttggtcttcacgcagatcaggcgagaagggatagtgatgcgcgggccgctgcggagacccggagcccgccgcggatcacgggaatttcgcgcctattttttgttggctgggtgttctcgccagtgattgggtcccggcaaggcgtgccggtgcgctcggctgcggctgctccgtcgacctttgcaggaccgggcggtgcagggctcactcggctggcgtcccgggggatgggccaccaggagtctccgctggcccgggcgccggcgggaggtgcagcttatgtaaagaggttatgtaaagggctcagctggcgcgaacacgtggaaagccacgggagcctaggagcccaggcttccccagcgagcgccgcggcagcagaaggatccgctacacgccgggctcgggccgccacctcccgcgctgctcggtcccggaggcagcccgggcccggagcggaccatccccaggcaggggctccaggggggaaacgggccgcccggaagtggaggtgcgcgggccaggtaagggcgccgttggaggactgaaggccagcgccgaggctggagttactgccactgcctccgcgcttgggaagggaaatcgggtcctcggccagtcgcactccgagaagccgaacttttcagccaatcccttctacccgtcgccctcggggacttgggtcggtccgctgggctccgctagggcttaattcaatggactgtttacacccgggcgaacacaaggcggggcgcggggaggagcgtcacagagggggccaagcaaagaaaaatatttccgccggccaaatcgcgtctctaagcggttttcagaaggcgtgaagcttgctggctcttctttttcctatcgctacatgacaagctaacagagagagcggagagtttgtgcttttctttccggttccccctctgagctgctgcccagtggttcggtctttcccgctttcccctcccctcccccgttcaatcagcggcggtggcttccgtcttaaaggggccgcggcggccgggggaggaggaggtgggacgccccgcggcctacgctcctggcctccccgccttggcctggccgtttaaccgattctttcgcccgcaggtcacaatccaaggtccggctcctccgcgtcccagggccggacggagggatgaggcagggggggcccgggcagcgccgttgctgctccccccgccgcccgcagccatggaaacggggaaggacggcgcccgcagaggtacacaaagcccggagcggaaaaggcgaagcccagtgccgcgggcgcccagcacgaagctgaggccggcggcggcggcccgggccatggatccggtggcggccgaggccccgggcgaggccttcctggcgcggcgacggcctgagggcggtggcgggtccgcgcggccgcgttacagcctgttggcggagatcgggcgcggcagctacggcgtggtttatgaggcagtggccgggcgcagcggggcccgggtggcggtcaagaagatccgctgcgacgcccccgagaacgtggagctggcgctggctgaattctgggccctcaccagcctcaagcggcgccaccagaacgtcgtgcagtttgaggagtgcgtcctgcagcgcaatgggttagcccagcgcatgagtcacggcaacaagagctcgcagctttacctgcgcctggtggagacctcgctgaaaggagaaaggatcctgggttatgctgaggagccctgctatctctggtttgtcatggagttctgtgaaggtggagacctgaatcagtatgtcctgtcccggaggccagacccagccaccaacaaaagtttcatgctacagctgacgagcgccattgccttcctgcacaaaaaccatattgtgcacagggacctgaagccagacaacatcctcatcacagagcggtctggcacccccatcctcaaagtggccgactttggactaagcaaggtctgtgctgggctggcaccccgaggcaaagagggcaatcaagacaacaaaaatgtgaatgtgaataagtactggctgtcctcagcctgcggttcggacttctacatggctcctgaagtctgggagggacactacacagccaaggcggacatctttgccctgggcattatcatctgggcaatgatagaaagaatcacttttattgactctgagaccaagaaggagctcctggggacctacattaaacaggggactgagatcgtccctgttggtgaggcgctgctagaaaacccaaagatggagttgcacatcccccaaaaacgcaggacttccatgtctgaggggatcaagcagctcttgaaagatatgttagctgctaacccacaggaccggcctgatgcctttgaacttgaaaccagaatggaccaggtcacatgtgctgcttaaaattcagggctaagcattttgggtgattttaaactaggtcgattcctcgggacccacagtctcaccacgtctcctccagaggacggcagagggtacaggtggtggcctggccggttggcgatctcccgacagctggatccggcaatgtgaagcttttgtttgggtttccccgcttctttttagttttgctttatttttttccttttcttttcttttttttttttcctctttcctttttttaaatttaaaccattgagacttcagaagagcaggacacaatgctgtggacaggcaccaatttctttaaagaaattcaatgtgggcaaggcatatgtgtaaatttcacttttactttttataaggggttagggagctatttttggttttgtccttcactttccctctgtcttccttctttatacttttctcagttctacttatgacacctcacttccctagagaaggcctgcctccccatagggaatctgggggtttcttctggaacggggcgtgaggacacaaggaggcctctgggccacgcctccctaccagatgcaggaactcctggactccttggtgggctggccctggctagcccttgggcctcggagatgatcagaggtgaagaaccgcctggaagaggaaggccagggtttggccaggagaactaagaaggtctcaactccaggctttgttgtgtttaagctattgngagccccaggccacaccaggacttgcagtggtgggaatccattcctcttctgccctgtgttgcagggaactaggaggtaagggtggagggcgaccatctcgctcttgctggcggtggagcagccatccctgcctttctgttgggaaaaactgttgtgccaaactcttgtgtggaacacagctgggtcttcagcaggcatctgtcactgccgtgaggtcagcgcttctcacctaactgcctcctggattgtcatcttcccagatgtgtcccatagtgtccaggtgtcacagagacggcctgaggccctaagatctggttgtgactttgccatgataacagggtgtcctgaactggctgccgttgtcgtgttctcacagtgaagggcgtgccctgtgtgccggggtccatggtgtcatatgcagtgacacacactgtcaagcgccatttccctcacccctggagacttactgttaggtgcctgccctcagtatagacgtatccaatgggaaaacagcggacctgcccagagcagggaggtgtcgtggaactgggtagaccccctgcagcgttaggggcccatttgtgggctcgccaccttcaggcttccccagccatgacacttcagccccgccacccatgcctgtctgctgcagccatccttgcactctccagcgacactctcgcacctccctaggggaagcttccctccccctgggctgctgctctgagcccgtctgttctccccctgcaagaaggggcaatgctcttgtgttgtccctctgtctggacgcgcctggccactccgaaggcttttcaccccattatggccaaatagtatagggccactggggagggggaagggaatcattttgtgttcatttttgttttctgtttcacctaaaccagcataggattgataggggagacggttggcgggcatttccgtttctatgtgatgtaccaaggcagcaggggcttttacctgctaagcggcaatcctttggccctgagaatttgggagagaacagtgcatcaggccaggctcagcaatatgtttgctcacattctttcagccttctctcacccccctcaacaccaaactttcttccttgtgagcagaaggttggctgctgttagcaggatcccacagtgataaccaggcccttcccttcctaagccaaaacccattgtgactgcctgtctctcctgtctctgacttctcaggcagcctcctgagtgcactgagttgtatccgagagggtgggaacagcagcatcccctaattgcagtacacggttccttttccgcccgccaccctgcctttccttgggggcagctgtctctctgtacatgagcaaatgggcaaaaacagtccccaaacccagcacccccctctccctggctgcagcccacactgtaacatccctagtgaggctccagcctaatgagccccttattttctttttcttccctccccaggtctcgtagctctaactaaaaagttcttggagccatcgtgctccccctttgttatttttcttgctatcagagtagcaagaaacagcacccctgtaggtgacaggtgggcagcctggtaggggtcgccagcctccatgccccctcatcttccagttcttgcttagtggcacgacctctttccatagcataaatgcaggccagcgttttagccccaagtgcctgcccttgcttcttacccctcccctgctttctcaaacacttgcccacctcaggcactcagcgggctccgccgtggtgagagaactggccgtggctcagccccgggtagcacctgtagtttcagtgccactctccactgtccccttgtggaccagcttccactcactgtcacgtcccccctcctgcgtcttcactgggtctcaggctgccagcagctctctggtgcatcgtctcaacaccaccaagtttgtaggacctgcccaagttctagtagtattcaaaacttcaaacggcagtcatttgttctcctcggctctgtggcaaggatagccctttggagggggactcttgacctcggctgttagggatctgaacttggttttcccgtcagaagaatcagcaggacagatcgtagtgccttattccattgtcctcccctggccaggcctcctggctcagctggaagtgcatggcttctttctccctatctgtgtcctctgtcacttgctctttcactctctctctcattcccagagagccacgggggagggatcaccctcacccccaacaccctcttcctgagggctgtagccaggtccgcatctccccaccaccaccagggcactcactcgcagctatagcccaggacagaaaaactgtgctttggacaggtgcacactctctgcctcttacctctagccaggaggatgcctcagtctgttcattcgagactggccccgtctgaaccttctctgggcactggggactaaggttgcaggccttagcctcgtctcgtcccagaggcattgggtcaggagaatgggaatttttttcctcccacctggacatagtttgcccctgtggctgcctttctgagggagtatactaaatgtttacttaagaaacaccctgtttacagccagaggagaaacacccaacactgagtggagatttgactctggacagggcctggcctccttagtggcactgccggggggccccagagcgaatgagggcagagatgcccggggcaggggcaaacgccctccgctccctctgctcccaaccctgtggtgctaggaccactccccgccttccctacggcctcctcgccctgcacattccccacctccacattcccctcctccaagatctcagctccttaacatatcagttgtctcctagcctagaaaaccagtgtttggagcaataagatgattatttttgcttgaatctttttctaagagaaggaaaagagctggcattgtgggaattttctttttatgctgttagctgtttaccttcttagaagacatcctaataggatggatgtctgggttttagccttggggtatcttttggaaacttagaaaagcaggagtcaggctgccaccccctaaggagggaccctaacgttctgcccttgcctggttccatatggctccttccagccctgcccaccaagtgcacccccagacagacgtagctcctgggagtctcggccctggcaaccttggaagagccaagctgacattgtttagctcttcaggccactgggttttggaggcagaagtccagagatactggctctgccaagctgtcgtactgggctgtggcacagccttcgagacaacacgggtgtatctctgatcctgccctacctaggcttcaaggggcttctgtctggagaaatgccctcaaagggtaaccagtaggtgtggcattgaattggccagtgttagcatctacagccatcaccgagatgagtccactgccgttgcctgcccgagggccccctaaggttatagacggtatcagcagggaggccgtcccgctggttttctaggagagcccacaggaggaagggagcctcttcaggggcactggaatcttttgtgccaggggcttcttttcatcagagccggggagtacattgcagtgacttcttaaacatttgtgtgggacagacgagcgtgagggaggttttaagccaggcacaaagttagtttccaatactagttaataaatctatttttcttcatttcctttttttgcacagaagctggtaatctaggacctacgtgtgaacaactttatatgaatattttttgtacttggtttacttgggttggtatgatacattatatttaagttccttgaacactgtggatcccctaatgtgtatgaatgactgaggctttgtaaattaagggacgtttgtgtgaataaagttatttgatggggtcaaagaagccatatgtgatttgaaaaaaagtg

SEQ ID NO: 453809 - DNA, 2188 bp, Homo sapiens
cactggcattgatgtatgagaaccagtgcacctaaagatatcataagataagaatattcaaaacttcaaacggcagtcatttgttctcctcggctctgtggcaaggatagccctttggagggggactcttgacctcggctgttagggatctgaacttggttttcccgtcagaagaatcagcaggacagatcgtagtgccttattccattgtcctcccctggccaggcctcctggctcagctggaagtgcatggcttctttctccctatctgtgtcctctgtcacttgctctttcactctctctctcattcccagagagccacgggggagggatcaccctcacccccaacaccctcttcctgagggctgtagccaggtccgcatctccccaccaccaccagggcactcactcgcagctatagcccaggacagaaaaactgtgctttggacaggtgcacactctctgcctcttacctctagccaggaggatgcctcagtctgttcattcgagactggccccgtctgaaccttctctgggcactggggactaaggttgcaggccttagcctcgtctcgtcccagaggcattgggtcaggagaatgggaatttttttcctcccacctggacatagtttgcccctgtggctgcctttctgagggagtatactaaatgtttacttaagaaacaccctgtttacagccagaggagaaacacccaacactgagtggagatttgactctggacagggcctggcctccttagtggcactgccggggggccccagagcgaatgagggcagagatgcccggggcaggggcaaacgccctccgctccctctgctcccaaccctgtggtgctaggaccactccccgccttccctacggcctcctcgccctgcacattccccacctccacattcccctcctccaagatctcagctccttaacatatcagttgtctcctagcctagaaaaccagtgtttggagcaataagatgattatttttgcttgaatctttttctaagagaaggaaaagagctggcattgtgggaattttctttttatgctgttagctgtttaccttcttagaagacatcctaataggatggatgtctgggttttagccttggggtatcttttggaaacttagaaaagcaggagtcaggctgccaccccctaaggagggaccctaacgttctgcccttgcctggttccatatggctccttccagccctgcccaccaagtgcagctcccactttccatcctgcccatacgcccctcttcccccgacatctgggggcgctggtggcacttactctaggttggtctcagactatccctccccttggctggttttccctcctaggcctgtctggcagcccccagacagacgtagctcctgggagtctcggccctggcaaccttggaagagccaagctgacattgtttagctcttcaggccactgggttttggaggcagaagtccagagatactggctctgccaagctgtcgtactgggctgtggcacagccttcgagacaacacgggtgtatctctgatcctgccctacctaggcttcaaggggcttctgtctggagaaatgccctcaaagggtaaccagtaggtgtggcattgaattggccagtgttagcatctacagccatcaccgagatgagtccactgccgttgcctgcccgagggccccctaaggttatagacggtatcagcagggaggccgtcccgctggttttctaggagagcccacaggaggaagggagcctcttcaggggcactggaatcttttgtgccaggggcttcttttcatcagagccggggagtacattgcagtgacttcttaaacatttgtgtgggacagacgagcgtgagggaggttttaagccaggcacaaagttagtttccaatactagttaataaatctatttttcttcatttcctttttttgcacagaagctggtaatctaggacctacgtgtgaacaactttatatgaatattttttgtacttggtttacttgggttggtatgatacattatatttaagttccttgaacactgtggatcccctaatgtgtatgaatgactgaggctttgtaaattaagggacgtttgtgtgaataaagttatttgatggggtcaaagaagccatatgtgatttgaaaaaaagtg

SEQ ID NO: 453810 - DNA, 4332 bp, Homo sapiens
  misc_feature (3181)..(3181): n is a, c, g, or t
agacaatcacccagtcagtatttattaggcgcctactgcggacggttggtcttcacgcagatcaggcgagaagggatagtgatgcgcgggccgctgcggagacccggagcccgccgcggatcacgggaatttcgcgcctattttttgttggctgggtgttctcgccagtgattgggtcccggcaaggcgtgccggtgcgctcggctgcggctgctccgtcgacctttgcaggaccgggcggtgcagggctcactcggctggcgtcccgggggatgggccaccaggagtctccgctggcccgggcgccggcgggaggtgcagcttatgtaaagaggttatgtaaagggctcagctggcgcgaacacgtggaaagccacgggagcctaggagcccaggcttccccagcgagcgccgcggcagcagaaggatccgctacacgccgggctcgggccgccacctcccgcgctgctcggtcccggaggcagcccgggcccggagcggaccatccccaggcaggggctccaggggggaaacgggccgcccggaagtggaggtgcgcgggccaggtaagggcgccgttggaggactgaaggccagcgccgaggctggagttactgccactgcctccgcgcttgggaagggaaatcgggtcctcggccagtcgcactccgagaagccgaacttttcagccaatcccttctacccgtcgccctcggggacttgggtcggtccgctgggctccgctagggcttaattcaatggactgtttacacccgggcgaacacaaggcggggcgcggggaggagcgtcacagagggggccaagcaaagaaaaatatttccgccggccaaatcgcgtctctaagcggttttcagaaggcgtgaagcttgctggctcttctttttcctatcgctacatgacaagctaacagagagagcggagagtttgtgcttttctttccggttccccctctgagctgctgcccagtggttcggtctttcccgctttcccctcccctcccccgttcaatcagcggcggtggcttccgtcttaaaggggccgcggcggccgggggaggaggaggtgggacgccccgcggcctacgctcctggcctccccgccttggcctggccgtttaaccgattctttcgcccgcaggtcacaatccaaggtccggctcctccgcgtcccagggccggacggagggatgaggcagggggggcccgggcagcgccgttgctgctccccccgccgcccgcagccatggaaacggggaaggacggcgcccgcagaggtacacaaagcccggagcggaaaaggcgaagcccagtgccgcgggcgcccagcacgaagctgaggccggcggcggcggcccgggccatggatccggtggcggccgaggccccgggcgaggccttcctggcgcggcgacggcctgagggcggtggcgggtccgcgcggccgcgttacagcctgttggcggagatcgggcgcggcagctacggcgtggtttatgaggcagtggccgggcgcagcggggcccgggtggcggtcaagaagatccgctgcgacgcccccgagaacgtggagctggcgctggctgaattctgggccctcaccagcctcaagcggcgccaccagaacgtcgtgcagtttgaggagtgcgtcctgcagcgcaatgggttagcccagcgcatgagtcacggcaacaagagctcgcagctttacctgcgcctggtggagacctcgctgaaaggagaaaggatcctgggttatgctgaggagccctgctatctctggtttgtcatggagttctgtgaaggtggagacctgaatcagtatgtcctgtcccggaggccagacccagccaccaacaaaagtttcatgctacagctgacgagcgccattgccttcctgcacaaaaaccatattgtgcacagggacctgaagccagacaacatcctcatcacagagcggtctggcacccccatcctcaaagtggccgactttggactaagcaaggtctgtgctgggctggcaccccgaggcaaagagggcaatcaagacaacaaaaatgtgaatgtgaataagtactggctgtcctcagcctgcggttcggacttctacatggctcctgaagtctgggagggacactacacagccaaggcggacatctttgccctgggcattatcatctgggcaatgatagaaagaatcacttttattgactctgagaccaagaaggagctcctggggacctacattaaacaggggactgagatcgtccctgttggtgaggcgctgctagaaaacccaaagatggagttgcacatcccccaaaaacgcaggacttccatgtctgaggggatcaagcagctcttgaaagatatgttagctgctaacccacaggaccggcctgatgcctttgaacttgaaaccagaatggaccaggtcacatgtgctgcttaaaattcagggctaagcattttgggtgattttaaactaggtcgattcctcgggacccacagtctcaccacgtctcctccagaggacggcagagggtacaggtggtggcctggccggttggcgatctcccgacagctggatccggcaatgtgaagcttttgtttgggtttccccgcttctttttagttttgctttatttttttccttttcttttcttttttttttttcctctttcctttttttaaatttaaaccattgagacttcagaagagcaggacacaatgctgtggacaggcaccaatttctttaaagaaattcaatgtgggcaaggcatatgtgtaaatttcacttttactttttataaggggttagggagctatttttggttttgtccttcactttccctctgtcttccttctttatacttttctcagttctacttatgacacctcacttccctagagaaggcctgcctccccatagggaatctgggggtttcttctggaacggggcgtgaggacacaaggaggcctctgggccacgcctccctaccagatgcaggaactcctggactccttggtgggctggccctggctagcccttgggcctcggagatgatcagaggtgaagaaccgcctggaagaggaaggccagggtttggccaggagaactaagaaggtctcaactccaggctttgttgtgtttaagctattgngagccccaggccacaccaggacttgcagtggtgggaatccattcctcttctgccctgtgttgcagggaactaggaggtaagggtggagggcgaccatctcgctcttgctggcggtggagcagccatccctgcctttctgttgggaaaaactgttgtgccaaactcttgtgtggaacacagctgggtcttcagcaggcatctgtcactgccgtgaggtcagcgcttctcacctaactgcctcctggattgtcatcttcccagatgtgtcccatagtgtccaggtgtcacagagacggcctgaggccctaagatctggttgtgactttgccatgataacagggtgtcctgaactggctgccgttgtcgtgttctcacagtgaagggcgtgccctgtgtgccggggtccatggtgtcatatgcagtgacacacactgtcaagcgccatttccctcacccctggagacttactgttaggtgcctgccctcagtatagacgtatccaatgggaaaacagcggacctgcccagagcagggaggtgtcgtggaactgggtagaccccctgcagcgttaggggcccatttgtgggctcgccaccttcaggcttccccagccatgacacttcagccccgccacccatgcctgtctgctgcagccatccttgcactctccagcgacactctcgcacctccctaggggaagcttccctccccctgggctgctgctctgagcccgtctgttctccccctgcaagaaggggcaatgctcttgtgttgtccctctgtctggacgcgcctggccactccgaaggcttttcaccccattatggccaaatagtatagggccactggggagggggaagggaatcattttgtgttcatttttgttttctgtttcacctaaaccagcataggattgataggggagacggttggcgggcatttccgtttctatgtgatgtaccaaggcagcaggggcttttacctgctaagcggcaatcctttggccctgagaatttgggagagaacagtgcatcaggccaggctcagcaatatgtttgctcacattctttcagccttctctcaccccccgtaccacgacgtgtccacgctagggggatctctagaacgaccgcagcatccatgtcaggata

SEQ ID NO: 453811 - DNA, 943 bp, Homo sapiens
ctgctggcccttacgcgcctgccccttacgcctctgctggcccttacgcgcgggggcgctggtggcacttactctaggttggtctcagactatccctccccttggctggttttccctcctaggcctgtctggcagcccccagacagacgtagctcctgggagtctcggccctggcaaccttggaagagccaagctgacattgtttagctcttcaggccactgggttttggaggcagaagtccagagatactggctctgccaagctgtcgtactgggctgtggcacagccttcgagacaacacgggtgtatctctgatcctgccctacctaggcttcaaggggcttctgtctggagaaatgccctcaaagggtaaccagtaggtgtggcattgaattggccagtgttagcatctacagccatcaccgagatgagtccactgccgttgcctgcccgagggccccctaaggttatagacggtatcagcagggaggccgtcccgctggttttctaggagagcccacaggaggaagggagcctcttcaggggcactggaatcttttgtgccaggggcttcttttcatcagagccggggagtacattgcagtgacttcttaaacatttgtgtgggacagacgagcgtgagggaggttttaagccaggcacaaagttagtttccaatactagttaataaatctatttttcttcatttcctttttttgcacagaagctggtaatctaggacctacgtgtgaacaactttatatgaatattttttgtacttggtttacttgggttggtatgatacattatatttaagttccttgaacactgtggatcccctaatgtgtatgaatgactgaggctttgtaaattaagggacgtttgtgtgaataaagttatttgatggggtcaaagaagccatatgtgatttgaaaaaaagtg

SEQ ID NO: 453812 - DNA, 7072 bp, Homo sapiens
  misc_feature (2966)..(2966): n is a, c, g, or t
agacaatcacccagtcagtatttattaggcgcctactgcggacggttggtcttcacgcagatcaggcgagaagggatagtgatgcgcgggccgctgcggagacccggagcccgccgcggatcacgggaatttcgcgcctattttttgttggctgggtgttctcgccagtgattgggtcccggcaaggcgtgccggtgcgctcggctgcggctgctccgtcgacctttgcaggaccgggcggtgcagggctcactcggctggcgtcccgggggatgggccaccaggagtctccgctggcccgggcgccggcgggaggtgcagcttatgtaaagaggttatgtaaagggctcagctggcgcgaacacgtggaaagccacgggagcctaggagcccaggcttccccagcgagcgccgcggcagcagaaggatccgctacacgccgggctcgggccgccacctcccgcgctgctcggtcccggaggcagcccgggcccggagcggaccatccccaggcaggggctccaggggggaaacgggccgcccggaagtggaggtgcgcgggccaggtaagggcgccgttggaggactgaaggccagcgccgaggctggagttactgccactgcctccgcgcttgggaagggaaatcgggtcctcggccagtcgcactccgagaagccgaacttttcagccaatcccttctacccgtcgccctcggggacttgggtcggtccgctgggctccgctagggcttaattcaatggactgtttacacccgggcgaacacaaggcggggcgcggggaggagcgtcacagagggggccaagcaaagaaaaatatttccgccggccaaatcgcgtctctaagcggttttcagaaggcgtgaagcttgctggctcttctttttcctatcgctacatgacaagctaacagagagagcggagagtcacaatccaaggtccggctcctccgcgtcccagggccggacggagggatgaggcagggggggcccgggcagcgccgttgctgctccccccgccgcccgcagccatggaaacggggaaggacggcgcccgcagaggtacacaaagcccggagcggaaaaggcgaagcccagtgccgcgggcgcccagcacgaagctgaggccggcggcggcggcccgggccatggatccggtggcggccgaggccccgggcgaggccttcctggcgcggcgacggcctgagggcggtggcgggtccgcgcggccgcgttacagcctgttggcggagatcgggcgcggcagctacggcgtggtttatgaggcagtggccgggcgcagcggggcccgggtggcggtcaagaagatccgctgcgacgcccccgagaacgtggagctggcgctggctgaattctgggccctcaccagcctcaagcggcgccaccagaacgtcgtgcagtttgaggagtgcgtcctgcagcgcaatgggttagcccagcgcatgagtcacggcaacaagagctcgcagctttacctgcgcctggtggagacctcgctgaaaggagaaaggatcctgggttatgctgaggagccctgctatctctggtttgtcatggagttctgtgaaggtggagacctgaatcagtatgtcctgtcccggaggccagacccagccaccaacaaaagtttcatgctacagctgacgagcgccattgccttcctgcacaaaaaccatattgtgcacagggacctgaagccagacaacatcctcatcacagagcggtctggcacccccatcctcaaagtggccgactttggactaagcaaggtctgtgctgggctggcaccccgaggcaaagagggcaatcaagacaacaaaaatgtgaatgtgaataagtactggctgtcctcagcctgcggttcggacttctacatggctcctgaagtctgggagggacactacacagccaaggcggacatctttgccctgggcattatcatctgggcaatgatagaaagaatcacttttattgactctgagaccaagaaggagctcctggggacctacattaaacaggggactgagatcgtccctgttggtgaggcgctgctagaaaacccaaagatggagttgcacatcccccaaaaacgcaggacttccatgtctgaggggatcaagcagctcttgaaagatatgttagctgctaacccacaggaccggcctgatgcctttgaacttgaaaccagaatggaccaggtcacatgtgctgcttaaaattcagggctaagcattttgggtgattttaaactaggtcgattcctcgggacccacagtctcaccacgtctcctccagaggacggcagagggtacaggtggtggcctggccggttggcgatctcccgacagctggatccggcaatgtgaagcttttgtttgggtttccccgcttctttttagttttgctttatttttttccttttcttttcttttttttttttcctctttcctttttttaaatttaaaccattgagacttcagaagagcaggacacaatgctgtggacaggcaccaatttctttaaagaaattcaatgtgggcaaggcatatgtgtaaatttcacttttactttttataaggggttagggagctatttttggttttgtccttcactttccctctgtcttccttctttatacttttctcagttctacttatgacacctcacttccctagagaaggcctgcctccccatagggaatctgggggtttcttctggaacggggcgtgaggacacaaggaggcctctgggccacgcctccctaccagatgcaggaactcctggactccttggtgggctggccctggctagcccttgggcctcggagatgatcagaggtgaagaaccgcctggaagaggaaggccagggtttggccaggagaactaagaaggtctcaactccaggctttgttgtgtttaagctattgngagccccaggccacaccaggacttgcagtggtgggaatccattcctcttctgccctgtgttgcagggaactaggaggtaagggtggagggcgaccatctcgctcttgctggcggtggagcagccatccctgcctttctgttgggaaaaactgttgtgccaaactcttgtgtggaacacagctgggtcttcagcaggcatctgtcactgccgtgaggtcagcgcttctcacctaactgcctcctggattgtcatcttcccagatgtgtcccatagtgtccaggtgtcacagagacggcctgaggccctaagatctggttgtgactttgccatgataacagggtgtcctgaactggctgccgttgtcgtgttctcacagtgaagggcgtgccctgtgtgccggggtccatggtgtcatatgcagtgacacacactgtcaagcgccatttccctcacccctggagacttactgttaggtgcctgccctcagtatagacgtatccaatgggaaaacagcggacctgcccagagcagggaggtgtcgtggaactgggtagaccccctgcagcgttaggggcccatttgtgggctcgccaccttcaggcttccccagccatgacacttcagccccgccacccatgcctgtctgctgcagccatccttgcactctccagcgacactctcgcacctccctaggggaagcttccctccccctgggctgctgctctgagcccgtctgttctccccctgcaagaaggggcaatgctcttgtgttgtccctctgtctggacgcgcctggccactccgaaggcttttcaccccattatggccaaatagtatagggccactggggagggggaagggaatcattttgtgttcatttttgttttctgtttcacctaaaccagcataggattgataggggagacggttggcgggcatttccgtttctatgtgatgtaccaaggcagcaggggcttttacctgctaagcggcaatcctttggccctgagaatttgggagagaacagtgcatcaggccaggctcagcaatatgtttgctcacattctttcagccttctctcacccccctcaacaccaaactttcttccttgtgagcagaaggttggctgctgttagcaggatcccacagtgataaccaggcccttcccttcctaagccaaaacccattgtgactgcctgtctctcctgtctctgacttctcaggcagcctcctgagtgcactgagttgtatccgagagggtgggaacagcagcatcccctaattgcagtacacggttccttttccgcccgccaccctgcctttccttgggggcagctgtctctctgtacatgagcaaatgggcaaaaacagtccccaaacccagcacccccctctccctggctgcagcccacactgtaacatccctagtgaggctccagcctaatgagccccttattttctttttcttccctccccaggtctcgtagctctaactaaaaagttcttggagccatcgtgctccccctttgttatttttcttgctatcagagtagcaagaaacagcacccctgtaggtgacaggtgggcagcctggtaggggtcgccagcctccatgccccctcatcttccagttcttgcttagtggcacgacctctttccatagcataaatgcaggccagcgttttagccccaagtgcctgcccttgcttcttacccctcccctgctttctcaaacacttgcccacctcaggcactcagcgggctccgccgtggtgagagaactggccgtggctcagccccgggtagcacctgtagtttcagtgccactctccactgtccccttgtggaccagcttccactcactgtcacgtcccccctcctgcgtcttcactgggtctcaggctgccagcagctctctggtgcatcgtctcaacaccaccaagtttgtaggacctgcccaagttctagtagtattcaaaacttcaaacggcagtcatttgttctcctcggctctgtggcaaggatagccctttggagggggactcttgacctcggctgttagggatctgaacttggttttcccgtcagaagaatcagcaggacagatcgtagtgccttattccattgtcctcccctggccaggcctcctggctcagctggaagtgcatggcttctttctccctatctgtgtcctctgtcacttgctctttcactctctctctcattcccagagagccacgggggagggatcaccctcacccccaacaccctcttcctgagggctgtagccaggtccgcatctccccaccaccaccagggcactcactcgcagctatagcccaggacagaaaaactgtgctttggacaggtgcacactctctgcctcttacctctagccaggaggatgcctcagtctgttcattcgagactggccccgtctgaaccttctctgggcactggggactaaggttgcaggccttagcctcgtctcgtcccagaggcattgggtcaggagaatgggaatttttttcctcccacctggacatagtttgcccctgtggctgcctttctgagggagtatactaaatgtttacttaagaaacaccctgtttacagccagaggagaaacacccaacactgagtggagatttgactctggacagggcctggcctccttagtggcactgccggggggccccagagcgaatgagggcagagatgcccggggcaggggcaaacgccctccgctccctctgctcccaaccctgtggtgctaggaccactccccgccttccctacggcctcctcgccctgcacattccccacctccacattcccctcctccaagatctcagctccttaacatatcagttgtctcctagcctagaaaaccagtgtttggagcaataagatgattatttttgcttgaatctttttctaagagaaggaaaagagctggcattgtgggaattttctttttatgctgttagctgtttaccttcttagaagacatcctaataggatggatgtctgggttttagccttggggtatcttttggaaacttagaaaagcaggagtcaggctgccaccccctaaggagggaccctaacgttctgcccttgcctggttccatatggctccttccagccctgcccaccaagtgcagctcccactttccatcctgcccatacgcccctcttcccccgacatctgggggcgctggtggcacttactctaggttggtctcagactatccctccccttggctggttttccctcctaggcctgtctggcagcccccagacagacgtagctcctgggagtctcggccctggcaaccttggaagagccaagctgacattgtttagctcttcaggccactgggttttggaggcagaagtccagagatactggctctgccaagctgtcgtactgggctgtggcacagccttcgagacaacacgggtgtatctctgatcctgccctacctaggcttcaaggggcttctgtctggagaaatgccctcaaagggtaaccagtaggtgtggcattgaattggccagtgttagcatctacagccatcaccgagatgagtccactgccgttgcctgcccgagggccccctaaggttatagacggtatcagcagggaggccgtcccgctggttttctaggagagcccacaggaggaagggagcctcttcaggggcactggaatcttttgtgccaggggcttcttttcatcagagccggggagtacattgcagtgacttcttaaacatttgtgtgggacagacgagcgtgagggaggttttaagccaggcacaaagttagtttccaatactagttaataaatctatttttcttcatttcctttttttgcacagaagctggtaatctaggacctacgtgtgaacaactttatatgaatattttttgtacttggtttacttgggttggtatgatacattatatttaagttccttgaacactgtggatcccctaatgtgtatgaatgactgaggctttgtaaattaagggacgtttgtgtgaataaagttatttgatggggtcaaagaagccatatgtgatttgaaaaaaagtg

SEQ ID NO: 453813 - DNA, 2828 bp, Homo sapiens
agacaatcacccagtcagtatttattaggcgcctactgcggacggttggtcttcacgcagatcaggcgagaagggatagtgatgcgcgggccgctgcggagacccggagcccgccgcggatcacgggaatttcgcgcctattttttgttggctgggtgttctcgccagtgattgggtcccggcaaggcgtgccggtgcgctcggctgcggctgctccgtcgacctttgcaggaccgggcggtgcagggctcactcggctggcgtcccgggggatgggccaccaggagtctccgctggcccgggcgccggcgggaggtgcagcttatgtaaagaggttatgtaaagggctcagctggcgcgaacacgtggaaagccacgggagcctaggagcccaggcttccccagcgagcgccgcggcagcagaaggatccgctacacgccgggctcgggccgccacctcccgcgctgctcggtcccggaggcagcccgggcccggagcggaccatccccaggcaggggctccaggggggaaacgggccgcccggaagtggaggtgcgcgggccaggtaagggcgccgttggaggactgaaggccagcgccgaggctggagttactgccactgcctccgcgcttgggaagggaaatcgggtcctcggccagtcgcactccgagaagccgaacttttcagccaatcccttctacccgtcgccctcggggacttgggtcggtccgctgggctccgctagggcttaattcaatggactgtttacacccgggcgaacacaaggcggggcgcggggaggagcgtcacagagggggccaagcaaagaaaaatatttccgccggccaaatcgcgtctctaagcggttttcagaaggcgtgaagcttgctggctcttctttttcctatcgctacatgacaagctaacagagagagcggagagtttgtgcttttctttccggttccccctctgagctgctgcccagtggttcggtctttcccgctttcccctcccctcccccgttcaatcagcggcggtggcttccgtcttaaaggggccgcggcggccgggggaggaggaggtgggacgccccgcggcctacgctcctggcctccccgccttggcctggccgtttaaccgattctttcgcccgcaggtcacaatccaaggtccggctcctccgcgtcccagggccggacggagggatgaggcagggggggcccgggcagcgccgttgctgctccccccgccgcccgcagccatggaaacggggaaggacggcgcccgcagaggtacacaaagcccggagcggaaaaggcgaagcccagtgccgcgggcgcccagcacgaagctgaggccggcggcggcggcccgggccatggatccggtggcggccgaggccccgggcgaggccttcctggcgcggcgacggcctgagggcggtggcgggtccgcgcggccgcgttacagcctgttggcggagatcgggcgcggcagctacggcgtggtttatgaggcagtggccgggcgcagcggggcccgggtggcggtcaagaagatccgctgcgacgcccccgagaacgtggagctggcgctggctgaattctgggccctcaccagcctcaagcggcgccaccagaacgtcgtgcagtttgaggagtgcgtcctgcagcgcaatgggttagcccagcgcatgagtcacggcaacaagagctcgcagctttacctgcgcctggtggagacctcgctgaaaggagaaaggatcctgggttatgctgaggagccctgctatctctggtttgtcatggagttctgtgaaggtggagacctgaatcagtatgtcctgtcccggaggccagacccagccaccaacaaaagtttcatgctacagctgacgagcgccattgccttcctgcacaaaaaccatattgtgcacagggacctgaagccagacaacatcctcatcacagagcggtctggcacccccatcctcaaagtggccgactttggactaagcaaggtctgtgctgggctggcaccccgaggcaaagagggcaatcaagacaacaaaaatgtgaatgtgaataagtactggctgtcctcagcctgcggttcggacttctacatggctcctgaagtctgggagggacactacacagccaaggcggacatctttgccctgggcattatcatctgggcaatgatagaaagaatcacttttattgactctgagaccaagaaggagctcctggggacctacattaaacaggggactgagatcgtccctgttggtgaggcgctgctagaaaacccaaagatggagttgcacatcccccaaaaacgcaggacttccatgtctgaggggatcaagcagctcttgaaagatatgttagctgctaacccacaggaccggcctgatgcctttgaacttgaaaccagaatggaccaggtcacatgtgctgcttaaaattcagggctaagcattttgggtgattttaaactaggtcgattcctcgggacccacagtctcaccacgtctcctccagaggacggcagagggtacaggtggtggcctggccggttggcgatctcccgacagctggatccgaagctggtaatctaggacctacgtgtgaacaactttatatgaatattttttgtacttggtttacttgggttggtatgatacattatatttaagttccttgaacactgtggatcccctaatgtgtatgaatgactgaggctttgtaaattaagggacgtttgtgtgaataaagttatttgatggggtcaaagaagccatatgtgatttgaaaaaaagtg

SEQ ID NO: 453814 - DNA, 4948 bp, Homo sapiens
atttttgcttttacaatgggagctgcagaagcgtagggaagaagctgaagaaaaaaagggggcgtctcccctttaaagacttgcaaagattgagagagaaagagagagagtcaagaacagagaatcagagagagagagagagtctgtgtctctgggaaagaagaacatctctgcttcacagtgatttgcgctgggggagaggcatcaattggcttcggacccaagggggagacgagaccaggtcaccccggttaagaccaagtgagcgttgcccctccctctcccaactctctacccgggaatgtctcggcgaaagcagcggaaaccccaacagttaatctcggactgcgaaggtcccagcgcgtctgagaacggtgatgctagcgaggaggatcacccccaagtctgtgccaagtgctgcgcacaattcactgacccaactgaattcctcgcccaccagaacgcatgttctactgaccctcctgtaatggtgataattgggggccaggagaaccccaacaactcttcggcctcctctgaaccccggcctgagggtcacaataatcctcaggtcatggacacagagcatagcaaccccccagattctgggtcctccgtgcccacggatcccacctggggcccagagaggagaggagaggagtcttcagggcatttcctggtcgctgccacaggtacagcggctgggggaggcgggggcctgatcttggccagtcccaagctgggagcaaccccattacctccagaatcgacccctgcaccccctcctcctccaccaccccctccgcccccaggggtaggcagtggccacttgaatatccccctgatcttggaagagctacgggtgctgcagcagcggcagatccatcagatgcagatgactgagcaaatctgcaggcaggtgctgttgcttggctccttaggccagacggtgggtgcccctgccagtccctcagagctacctgggacagggactgcctcttccaccaagcccctactacccctcttcagccccatcaagcctgtccaaaccagcaagacactggcatcttcctcctcctcctcctcttcctcttcaggggcagaaacgcccaagcaggccttcttccacctttaccacccactggggtcacagcatcctttctctgctggaggggttgggcgaagccacaaacccacccctgccccttccccagccttgccaggcagcacagatcagctgattgcctcgcctcatctggcattcccaagcaccacgggactactggcagcacagtgtcttggggcagcccgaggccttgaggccactgcctccccagggctcctgaagccaaagaatggaagtggtgagctgagctacggagaagtgatgggtcccttggagaagcctggtggaaggcacaaatgccgcttctgtgccaaagtatttggcagtgacagtgccctgcagatccaccttcgttcccacacgggtgagaggccctataagtgcaatgtctgtggaaaccgttttaccacccgtggcaacctcaaagtgcatttccaccggcatcgtgagaagtacccacatgtgcagatgaacccacacccagtaccagagcacctagactatgtcattaccagcagtggcttgccttatggtatgtccgtgccaccagagaaggccgaggaggaggcagccactccaggtggaggggttgagcgcaagcctctggtggcctccacaacagcactcagtgccacagagagcctgactctgctctccaccagtgcaggcacagccacggctccaggactccctgctttcaataagtttgtgctcatgaaagcagtggaacccaagaataaagctgatgaaaacacccccccagggagtgagggctcagccatcagtggagtggcagaaagtagcacggcaactcgcatgcaactaagtaagttggtgacttcactaccaagctgggcactgcttaccaaccacttcaagtccactggcagcttccccttcccctatgtgctagagcccttgggggcctcaccctctgagacatcaaagctgcagcaactggtagaaaagattgaccggcaaggagctgtggcggtgacctcagctgcctcaggagcccccaccacctctgcccctgcaccttcatcctcagcctcttctggacctaaccagtgtgtcatctgtctccgagtgcttagctgtcctcgggccctacgccttcattatggccaacatggaggtgagaggcccttcaaatgcaaagtgtgtggcagagccttctccaccaggggtaatctgcgtgcacatttcgtgggccacaaggccagtccagctgcccgggcacagaattcctgccccatctgccagaagaagttcaccaatgctgtcactctgcagcagcatgtccggatgcacctggggggccagatccccaacggtggtactgcactccctgaaggtggaggagctgctcaggagaatggctccgagcaatctacagtctccggggcagggagtttcccccagcagcagtcccagcagccatcaccggaagaggagttgtctgaggaggaggaagaggaggatgaggaagaagaggaagatgtgactgatgaagattccctggcagggagaggctcagagagtggaggtgagaaggcaatatcagtgagaggtgattcagaagaggcatctggggcagaggaggaggtggggacagtggcggcagcagccacagctgggaaggagatggacagtaatgagaaaactactcaacagtcttctttgccaccaccaccaccacctgacagcctggatcagcctcagccaatggagcagggaagcagtggtgttttaggaggcaaggaagaggggggcaaaccggagagaagctcaagtccggcatcagcactcaccccagaaggggaagccaccagcgtgaccttggtagaggagctgagcctgcaggaggcaatgagaaaggagccaggagagagcagcagcagaaaggcctgcgaagtgtgtggccaggcctttccctcccaggcagctctggaggagcatcagaagacccaccccaaggaggggccgctcttcacttgtgttttctgcaggcagggctttcttgagcgggctaccctcaagaagcatatgctcctggcacaccaccaggtacagccctttgccccccatggccctcagaatattgctgctctttctctagtccctggctgttcgccttccatcacctccacagggctctccccctttccccgaaaagatgaccccacgatcccatgagcctgtttttctgtacctgctgctctttgtcccacagagcagaaacagcttcacaaaaggacctcccagagttatgagccctgattttgtctttttctctaagttcttaacatgttatgtccctagtggcttttctgtagtccctgagcttggaaattactgtgcttacaaggggatggccccctaaggaatttttcttccctcctcattctttgtacctgaggaacatagattctctgcagctttctcaaggggaaccctctccagcttccctggtgtgacccttcttccccctcctctctcctctccctttccctttggtaggtgcacctgagcacctacatttggcattgcagcctagccaaaaagggctggcagctgtctctggagggcccagtgccactcctctggggtgacctttctgctcagctggtgggtatgggtcccctatctttctagaaccagtatgtggcattcctgtcaaatggcctgcccatgaagccctggaattccagctccacctccactaccactccaagcctggccccaccagtgctgtttggcctaggaactgtggctgggaaggtgcctccaacaatgggatccagggaagccaaggagaagacagcccccctcctatttcagcctcctgcacccaaggcagtgcctgagaagcccatcatagacaagaagtagcaaactgtacattccttcttcctccccctgctccagaaggtgccggtactgaagatgctccagtaattggtgacccaaccctaggaagtagggagaaatgaaggaagggcataggaaaattttcccagtaaatcccctgatggtcacattaaggtaaaggttttggctggtcagtgtgccaagacctctccagcttctcattcatgatgacctctcaaagttgggaaacaagctgatttcttgccaagaggtctcccaggagatatttgggaaatgtgaagttcgtatctttaaggagcatttttggtcagcatggttgatgaactaatgatgagagagttaaggaatgttgctagaacatagggcttgctggtacctatgtgactaagaaagggacatgatgtaagggaaaaggcctcaaattcttgtgaatgtctggacattctcgttaatattcttttgggctaatagtgacatagtgtgcagaggtgtaccagggatcatgggggatttcctagcactagtatgcttctagttttagataactccctcctttattccctggccccttgtattttccttatcttcctctttcaagacccctacccattttgcctatccgtaggctggggcttgtgtctttgtcattgtctggttcttaagagtcccagactttgggagaccagctccaggtggcgtcctccctgcctctccgtcttgtaatgagttgtagtatttactcttaacataggatcatttggaacaggagttctgaggaggagagagtgagggttttgctattgactgacttgaacgatggcttctcctcaagctgtaggctccagagcttcctaacctagtaaaatgtcaagaacagacgggagatattagtgtctttccctctatcattaaaggtgttttaaccaa

SEQ ID NO: 453815 - DNA, 1856 bp, Homo sapiens
atttttgcttttacaatgggagctgcagaagcgtagggaagaagctgaagaaaaaaagggggcgtctcccctttaaagacttgcaaagattgagagagaaagagagagagtcaagaacagagaatcagagagagagagagagtctgtgtctctgggaaagaagaacatctctgcttcacagtgatttgcgctgggggagaggcatcaattggcttcggacccaagggggagacgagaccaggtcaccccggttaagaccaagtgagcgttgcccctccctctcccaactctctacccgggaatgtctcggcgaaagcagcggaaaccccaacagttaatctcggactgcgaaggtcccagcgcgtctgagaacggtgatgctagcgaggaggatcacccccaagtctgtgccaagtgctgcgcacaattcactgacccaactgaattcctcgcccaccagaacgcatgttctactgaccctcctgtaatggtgataattgggggccaggagaaccccaacaactcttcggcctcctctgaaccccggcctgagggtcacaataatcctcaggtcatggacacagagcatagcaaccccccagattctgggtcctccgtgcccacggatcccacctggggcccagagaggagaggagaggagtcttcagggcatttcctggtcgctgccacagaaccagtatgtggcattcctgtcaaatggcctgcccatgaagccctggaattccagctccacctccactaccactccaagcctggccccaccagtgctgtttggcctaggaactgtggctgggaaggtgcctccaacaatgggatccagggaagccaaggagaagacagcccccctcctatttcagcctcctgcacccaaggcagtgcctgagaagcccatcatagacaagaagtagcaaactgtacattccttcttcctccccctgctccagaaggtgccggtactgaagatgctccagtaattggtgacccaaccctaggaagtagggagaaatgaaggaagggcataggaaaattttcccagtaaatcccctgatggtcacattaaggtaaaggttttggctggtcagtgtgccaagacctctccagcttctcattcatgatgacctctcaaagttgggaaacaagctgatttcttgccaagaggtctcccaggagatatttgggaaatgtgaagttcgtatctttaaggagcatttttggtcagcatggttgatgaactaatgatgagagagttaaggaatgttgctagaacatagggcttgctggtacctatgtgactaagaaagggacatgatgtaagggaaaaggcctcaaattcttgtgaatgtctggacattctcgttaatattcttttgggctaatagtgacatagtgtgcagaggtgtaccagggatcatgggggatttcctagcactagtatgcttctagttttagataactccctcctttattccctggccccttgtattttccttatcttcctctttcaagacccctacccattttgcctatccgtaggctggggcttgtgtctttgtcattgtctggttcttaagagtcccagactttgggagaccagctccaggtggcgtcctccctgcctctccgtcttgtaatgagttgtagtatttactcttaacataggatcatttggaacaggagttctgaggaggagagagtgagggttttgctattgactgacttgaacgatggcttctcctcaagctgtaggctccagagcttcctaacctagtaaaatgtcaagaacagacgggagatattagtgtctttccctctatcattaaaggtgttttaaccaa

SEQ ID NO: 453816 - DNA, 3839 bp, Homo sapiens
atttttgcttttacaatgggagctgcagaagcgtagggaagaagctgaagaaaaaaagggggcgtctcccctttaaagacttgcaaagattgagagagaaagagagagagtcaagaacagagaatcagagagagagagagagtctgtgtctctgggaaagaagaacatctctgcttcacagtgatttgcgctgggggagaggcatcaattggcttcggacccaagggggagacgagaccaggtcaccccggttaagaccaagtgagcgttgcccctccctctcccaactctctacccgggaatgtctcggcgaaagcagcggaaaccccaacagttaatctcggactgcgaaggtcccagcgcgtctgagaacggtgatgctagcgaggaggatcacccccaagtctgtgccaagtgctgcgcacaattcactgacccaactgaattcctcgcccaccagaacgcatgttctactgaccctcctgtaatggtgataattgggggccaggagaaccccaacaactcttcggcctcctctgaaccccggcctgagggtcacaataatcctcaggtcatggacacagagcatagcaaccccccagattctgggtcctccgtgcccacggatcccacctggggcccagagaggagaggagaggagtcttcagggcatttcctggtcgctgccacaggtacagcggctgggggaggcgggggcctgatcttggccagtcccaagctgggagcaaccccattacctccagaatcgacccctgcaccccctcctcctccaccaccccctccgcccccaggggtaggcagtggccacttgaatatccccctgatcttggaagagctacgggtgctgcagcagcggcagatccatcagatgcagatgactgagcaaatctgcaggcaggtgctgttgcttggctccttaggccagacggtgggtgcccctgccagtccctcagagctacctgggacagggactgcctcttccaccaagcccctactacccctcttcagccccatcaagcctgtccaaaccagcaagacactggcatcttcctcctcctcctcctcttcctcttcaggggcagaaacgcccaagcaggccttcttccacctttaccacccactggggtcacagcatcctttctctgctggaggggttgggcgaagccacaaacccacccctgccccttccccagccttgccaggcagcacagatcagctgattgcctcgcctcatctggcattcccaagcaccacgggactactggcagcacagtgtcttggggcagcccgaggccttgaggccactgcctccccagggctcctgaagccaaagaatggaagtggtgagctgagctacggagaagtgatgggtcccttggagaagcctggtggaaggcacaaatgccgcttctgtgccaaagtatttggcagtgacagtgccctgcagatccaccttcgttcccacacgggtgagaggccctataagtgcaatgtctgtggaaaccgttttaccacccgtggcaacctcaaagtgcatttccaccggcatcgtgagaagtacccacatgtgcagatgaacccacacccagtaccagagcacctagactatgtcattaccagcagtggcttgccttatggtatgtccgtgccaccagagaaggccgaggaggaggcagccactccaggtggaggggttgagcgcaagcctctggtggcctccacaacagcactcagtgccacagagagcctgactctgctctccaccagtgcaggcacagccacggctccaggactccctgctttcaataagtttgtgctcatgaaagcagtggaacccaagaataaagctgatgaaaacacccccccagggagtgagggctcagccatcagtggagtggcagaaagtagcacggcaactcgcatgcaactaagtaagttggtgacttcactaccaagctgggcactgcttaccaaccacttcaagtccactggcagcttccccttcccctatgtgctagagcccttgggggcctcaccctctgagacatcaaagctgcagcaactggtagaaaagattgaccggcaaggagctgtggcggtgacctcagctgcctcaggagcccccaccacctctgcccctgcaccttcatcctcagcctcttctggacctaaccagtgtgtcatctgtctccgagtgcttagctgtcctcgggccctacgccttcattatggccaacatggaggtgagaggcccttcaaatgcaaagtgtgtggcagagccttctccaccaggggtaatctgcgtgcacatttcgtgggccacaaggccagtccagctgcccgggcacagaattcctgccccatctgccagaagaagttcaccaatgctgtcactctgcagcagcatgtccggatgcacctggggggccagatccccaacggtggtactgcactccctgaaggtggaggagctgctcaggagaatggctccgagcaatctacagtctccggggcagggagtttcccccagcagcagtcccagcagccatcaccggaagaggagttgtctgaggaggaggaagaggaggatgaggaagaagaggaagatgtgactgatgaagattccctggcagggagaggctcagagagtggaggtgagaaggcaatatcagtgagaggtgattcagaagaggcatctggggcagaggaggaggtggggacagtggcggcagcagccacagctgggaaggagatggacagtaatgagaaaactactcaacagtcttctttgccaccaccaccaccacctgacagcctggatcagcctcagccaatggagcagggaagcagtggtgttttaggaggcaaggaagaggggggcaaaccggagagaagctcaagtccggcatcagcactcaccccagaaggggaagccaccagcgtgaccttggtagaggagctgagcctgcaggaggcaatgagaaaggagccaggagagagcagcagcagaaaggcctgcgaagtgtgtggccaggcctttccctcccaggcagctctggaggagcatcagaagacccaccccaaggaggggccgctcttcacttgtgttttctgcaggcagggctttcttgagcgggctaccctcaagaagcatatgctcctggcacaccaccaggtacagccctttgccccccatggccctcagaatattgctgctctttctctagtccctggctgttcgccttccatcacctccacagggctctccccctttccccgaaaagatgaccccacgatcccatgagcctgtttttctgtacctgctgctctttgtcccacagagcagaaacagcttcacaaaaggacctcccagagttatgagccctgattttgtctttttctctaagttcttaacatgttatgtccctagtggcttttctgtagtccctgagcttggaaattactgtgcttacaaggggatggccccctaaggaatttttcttccctcctcattctttgtacctgaggaacatagattctctgcagctttctcaaggggaaccctctccagcttccctgccaggtggcgtcctccctgcctctccgtcttgtaatgagttgtagtatttactcttaacataggatcatttggaacaggagttctgaggaggagagagtgagggttttgctattgactgacttgaacgatggcttctcctcaagctgtaggctccagagcttcctaacctagtaaaatgtcaagaacagacgggagatattagtgtctttccctctatcattaaaggtgttttaaccaa

SEQ ID NO: 453817 - DNA, 4726 bp, Homo sapiens
gctgggtgcagaggctgccgcagacccagcggccatcgcctccctcaatcccaatatccattgtctcccaccccacctggccctccacttcccccacaaccatggcgcacgaatccgagaggagctctcgtctcggggtgccctgcggggagccggcagagctcggaggtgatgctagcgaggaggatcacccccaagtctgtgccaagtgctgcgcacaattcactgacccaactgaattcctcgcccaccagaacgcatgttctactgaccctcctgtaatggtgataattgggggccaggagaaccccaacaactcttcggcctcctctgaaccccggcctgagggtcacaataatcctcaggtcatggacacagagcatagcaaccccccagattctgggtcctccgtgcccacggatcccacctggggcccagagaggagaggagaggagtcttcagggcatttcctggtcgctgccacaggtacagcggctgggggaggcgggggcctgatcttggccagtcccaagctgggagcaaccccattacctccagaatcgacccctgcaccccctcctcctccaccaccccctccgcccccaggggtaggcagtggccacttgaatatccccctgatcttggaagagctacgggtgctgcagcagcggcagatccatcagatgcagatgactgagcaaatctgcaggcaggtgctgttgcttggctccttaggccagacggtgggtgcccctgccagtccctcagagctacctgggacagggactgcctcttccaccaagcccctactacccctcttcagccccatcaagcctgtccaaaccagcaagacactggcatcttcctcctcctcctcctcttcctcttcaggggcagaaacgcccaagcaggccttcttccacctttaccacccactggggtcacagcatcctttctctgctggaggggttgggcgaagccacaaacccacccctgccccttccccagccttgccaggcagcacagatcagctgattgcctcgcctcatctggcattcccaagcaccacgggactactggcagcacagtgtcttggggcagcccgaggccttgaggccactgcctccccagggctcctgaagccaaagaatggaagtggtgagctgagctacggagaagtgatgggtcccttggagaagcctggtggaaggcacaaatgccgcttctgtgccaaagtatttggcagtgacagtgccctgcagatccaccttcgttcccacacgggtgagaggccctataagtgcaatgtctgtggaaaccgttttaccacccgtggcaacctcaaagtgcatttccaccggcatcgtgagaagtacccacatgtgcagatgaacccacacccagtaccagagcacctagactatgtcattaccagcagtggcttgccttatggtatgtccgtgccaccagagaaggccgaggaggaggcagccactccaggtggaggggttgagcgcaagcctctggtggcctccacaacagcactcagtgccacagagagcctgactctgctctccaccagtgcaggcacagccacggctccaggactccctgctttcaataagtttgtgctcatgaaagcagtggaacccaagaataaagctgatgaaaacacccccccagggagtgagggctcagccatcagtggagtggcagaaagtagcacggcaactcgcatgcaactaagtaagttggtgacttcactaccaagctgggcactgcttaccaaccacttcaagtccactggcagcttccccttcccctatgtgctagagcccttgggggcctcaccctctgagacatcaaagctgcagcaactggtagaaaagattgaccggcaaggagctgtggcggtgacctcagctgcctcaggagcccccaccacctctgcccctgcaccttcatcctcagcctcttctggacctaaccagtgtgtcatctgtctccgagtgcttagctgtcctcgggccctacgccttcattatggccaacatggaggtgagaggcccttcaaatgcaaagtgtgtggcagagccttctccaccaggggtaatctgcgtgcacatttcgtgggccacaaggccagtccagctgcccgggcacagaattcctgccccatctgccagaagaagttcaccaatgctgtcactctgcagcagcatgtccggatgcacctggggggccagatccccaacggtggtactgcactccctgaaggtggaggagctgctcaggagaatggctccgagcaatctacagtctccggggcagggagtttcccccagcagcagtcccagcagccatcaccggaagaggagttgtctgaggaggaggaagaggaggatgaggaagaagaggaagatgtgactgatgaagattccctggcagggagaggctcagagagtggaggtgagaaggcaatatcagtgagaggtgattcagaagaggcatctggggcagaggaggaggtggggacagtggcggcagcagccacagctgggaaggagatggacagtaatgagaaaactactcaacagtcttctttgccaccaccaccaccacctgacagcctggatcagcctcagccaatggagcagggaagcagtggtgttttaggaggcaaggaagaggggggcaaaccggagagaagctcaagtccggcatcagcactcaccccagaaggggaagccaccagcgtgaccttggtagaggagctgagcctgcaggaggcaatgagaaaggagccaggagagagcagcagcagaaaggcctgcgaagtgtgtggccaggcctttccctcccaggcagctctggaggagcatcagaagacccaccccaaggaggggccgctcttcacttgtgttttctgcaggcagggctttcttgagcgggctaccctcaagaagcatatgctcctggcacaccaccaggtacagccctttgccccccatggccctcagaatattgctgctctttctctagtccctggctgttcgccttccatcacctccacagggctctccccctttccccgaaaagatgaccccacgatcccatgagcctgtttttctgtacctgctgctctttgtcccacagagcagaaacagcttcacaaaaggacctcccagagttatgagccctgattttgtctttttctctaagttcttaacatgttatgtccctagtggcttttctgtagtccctgagcttggaaattactgtgcttacaaggggatggccccctaaggaatttttcttccctcctcattctttgtacctgaggaacatagattctctgcagctttctcaaggggaaccctctccagcttccctggtgtgacccttcttccccctcctctctcctctccctttccctttggtaggtgcacctgagcacctacatttggcattgcagcctagccaaaaagggctggcagctgtctctggagggcccagtgccactcctctggggtgacctttctgctcagctggtgggtatgggtcccctatctttctagaaccagtatgtggcattcctgtcaaatggcctgcccatgaagccctggaattccagctccacctccactaccactccaagcctggccccaccagtgctgtttggcctaggaactgtggctgggaaggtgcctccaacaatgggatccagggaagccaaggagaagacagcccccctcctatttcagcctcctgcacccaaggcagtgcctgagaagcccatcatagacaagaagtagcaaactgtacattccttcttcctccccctgctccagaaggtgccggtactgaagatgctccagtaattggtgacccaaccctaggaagtagggagaaatgaaggaagggcataggaaaattttcccagtaaatcccctgatggtcacattaaggtaaaggttttggctggtcagtgtgccaagacctctccagcttctcattcatgatgacctctcaaagttgggaaacaagctgatttcttgccaagaggtctcccaggagatatttgggaaatgtgaagttcgtatctttaaggagcatttttggtcagcatggttgatgaactaatgatgagagagttaaggaatgttgctagaacatagggcttgctggtacctatgtgactaagaaagggacatgatgtaagggaaaaggcctcaaattcttgtgaatgtctggacattctcgttaatattcttttgggctaatagtgacatagtgtgcagaggtgtaccagggatcatgggggatttcctagcactagtatgcttctagttttagataactccctcctttattccctggccccttgtattttccttatcttcctctttcaagacccctacccattttgcctatccgtaggctggggcttgtgtctttgtcattgtctggttcttaagagtcccagaccaggtggcgtcctccctgcctctccgtcttgtaatgagttgtagtatttactcttaacataggatcatttggaacaggagttctgaggaggagagagtgagggttttgctattgactgacttgaacgatggcttctcctcaagctgtaggctccagagcttcctaacctagtaaaatgtcaagaacagacgggagatattagtgtctttccctctatcattaaaggtgttttaaccaa

SEQ ID NO: 453818 - DNA, 1650 bp, Homo sapiens
gctgggtgcagaggctgccgcagacccagcggccatcgcctccctcaatcccaatatccattgtctcccaccccacctggccctccacttcccccacaaccatggcgcacgaatccgagaggagctctcgtctcggggtgccctgcggggagccggcagagctcggaggtgatgctagcgaggaggatcacccccaagtctgtgccaagtgctgcgcacaattcactgacccaactgaattcctcgcccaccagaacgcatgttctactgaccctcctgtaatggtgataattgggggccaggagaaccccaacaactcttcggcctcctctgaaccccggcctgagggtcacaataatcctcaggtcatggacacagagcatagcaaccccccagattctgggtcctccgtgcccacggatcccacctggggcccagagaggagaggagaggagtcttcagggcatttcctggtcgctgccacagaaccagtatgtggcattcctgtcaaatggcctgcccatgaagccctggaattccagctccacctccactaccactccaagcctggccccaccagtgctgtttggcctaggaactgtggctgggaaggtgcctccaacaatgggatccagggaagccaaggagaagacagcccccctcctatttcagcctcctgcacccaaggcagtgcctgagaagcccatcatagacaagaagtagcaaactgtacattccttcttcctccccctgctccagaaggtgccggtactgaagatgctccagtaattggtgacccaaccctaggaagtagggagaaatgaaggaagggcataggaaaattttcccagtaaatcccctgatggtcacattaaggtaaaggttttggctggtcagtgtgccaagacctctccagcttctcattcatgatgacctctcaaagttgggaaacaagctgatttcttgccaagaggtctcccaggagatatttgggaaatgtgaagttcgtatctttaaggagcatttttggtcagcatggttgatgaactaatgatgagagagttaaggaatgttgctagaacatagggcttgctggtacctatgtgactaagaaagggacatgatgtaagggaaaaggcctcaaattcttgtgaatgtctggacattctcgttaatattcttttgggctaatagtgacatagtgtgcagaggtgtaccagggatcatgggggatttcctagcactagtatgcttctagttttagataactccctcctttattccctggccccttgtattttccttatcttcctctttcaagacccctacccattttgcctatccgtaggctggggcttgtgtctttgtcattgtctggttcttaagagtcccagactttgggagaccagctccaggtggcgtcctccctgcctctccgtcttgtaatgagttgtagtatttactcttaacataggatcatttggaacaggagttctgaggaggagagagtgagggttttgctattgactgacttgaacgatggcttctcctcaagctgtaggctccagagcttcctaacctagtaaaatgtcaagaacagacgggagatattagtgtctttccctctatcattaaaggtgttttaaccaa

SEQ ID NO: 453819 - DNA, 1254 bp, Homo sapiens
tcaaagagtattcaatagtatgaatatacaatgtactcatactctttgtcattttgattaagccatagttgttaaagagtttaatgctcagtttttttttctttcaactagccatgtacatcttcatgtgatcagccaggattttgattctccttgccttaaaaacaaaaaacattggaattctttcaatacagaatacttcctagaatcacaagctgtgatcgagatggtacaagaggctggtagagtaactgtccgagatgggatgcctgagctcttgaagctgccccttcgttgtcatgagtgccagcagctgctgccttccattcctcagctgaaagaacatctcaggaagcactggacacagtgattctgcagagcctgagctgctgctgtggtgtggcccactggagcaaactgctggcacctattctgggttgcttgtgaacttctactcatttcctaaattaaaacatgcagctttttcacaaatttattctattattgagtggccacaatgtagagtggctcaaagtacttcaggattaggaatttgggtttgtcatagatgtattctctggtgagggtggctgggatatacctgacccaccatcttcagaaggacccatgtcaggtctgaccattgggagcaaagccatgttcacactgacctaatgcagagtatggaagcattgggctggttatacatttctgtttcttagatttatcctccgcctctgtaggcatggacaacctttaatcagagcatctagagtggcctcttgtttatcctgaagatactgatgggtcttgttttctgttagtctgttttgtaatattcttttcccttccttcatggggaggcttagtttgtccagtccttccatgcccttctatcccagattacctaaatgttcccttctcaggaattctgtctcatcagttcttcacagtgagaaaagaggctagatgatggtgtggggggttggagttttcttctaataccgagggttcctggctgtgaggaaacagccacatgttcgtcatgattgagctgtgaagtcttcttggacctgttgtctgaaaataaagttaatttgtttgaggcatctctcttaagtaggtggaaactattgaagttcagctaacaatcacagcataggttctgatgcatggaaaggtggttggtgaatgaaaaagttgcgtagagccactactttctttttccctgagaataaatttggataaaacagt

SEQ ID NO: 453820 - DNA, 724 bp, Homo sapiens
cagcactttgggaggctgaggcaggaggattgcttgagcccaggagttcaagatcagcctgggcaacatagcaagacctctgtctctattaaaaaaaaaaattagccaggcctgggactacaggcatgtgccaccacacctggctaatttttgtatttttttgtagagacggggtattgccatgctgcccaggctgggagaaacaggtcttcttttctggcggcagagtctgtgatcatgagcaggccaggggttctggaatagggaaacttgtggggattaattgaagctgcctcatagggatcttggcaatagctaagggagtatgtacgctgttggacattttatggaaggatttaaacctttagaaattggtaggatttggagctccagccacctgcaataacaggtgattgctaataggcctttaaggaaacaccacctgttcagctgccgcctgtagtgaagcttgttttctttagggaagataggagcaagtgcctggttctttgttgcatttgtgtttaactttttccaatctctttcagttacagttgaaagcagagtgtaacaagggatatgtcaaggtaaagcaggtaggtgtatttataacttggaattttatactcgatgattttcttatgctgttgactttagagtgtctgtgccagccagtgaaggcttctctgtcatgtatggaagtgatggagtaatataggtgaac

SEQ ID NO: 453821 - DNA, 521 bp, Homo sapiens
cttctttgtgtacttgcccttgttctctttgcttggaatcttctccctgtttcctttctccacctcctgctcctcacctaattaggctgctccttttcacctaattaacccagtttataaatgggactcagttataaagtttaggtccacctcctccaggaaattttttcctgacacctccttcctcccaatctcggttgggtactctagcattgtgcttccaccctttgcacagagcaatcatcatgtttaccacatctactattaacataattgtttgtgtttttctcctccacaagatttattttttttagatgaggtgttgctgtgttgcccaagctggacttgaacccctaggctcaagcaatccttccacctcagtctcccaagtagcagggactacagctactccagaggctgaggctggaggaccactttagcccaaggaagttgaggctgcagtgagctgtgatgacgccctgcacccaatctgggcaacagagtgagaccctgtctcagaa

SEQ ID NO: 453822 - DNA, 1996 bp, Homo sapiens
ctctgacgtcatcccgcagcgccggaagcggtgaggcacagatgagtaacgtgaatttgtccgtctccgacttctggagagtgatgatgcgggtgtgctggttggtgagacaggacagccggcaccagcgaatcagacttccacatttggaagcagttgtgattgggcgtggcccagagaccaagatcactgataagaaatgttctcgacagcaagtacagttgaaagcagagtgtaacaagggatatgtcaaggtaaagcaggtaggagtcaatcccaccagcattgactcagtcgtaattgggaaggaccaagaggtgaagctgcagcctggccaggttctccacatggtgaatgaactttatccatatattgtagagtttgaggaagaggcaaagaaccctggcctggaaacacacaggaagagaaagagatcaggcaacagtgattctatagaaagggatgctgctcaggaagctgaggctgggacagggctggaacctgggagcaactctggccaatgctctgtgcccctaaagaagggaaaagatgcacctatcaaaaaggaatccctgggccactggagtcaaggcttgaagatttctatgcaggaccccaaaatgcaggtttacaaagatgagcaggtggtggtgataaaggataaatacccaaaggcccgttaccattggctggtcttaccgtggacctccatttccagtctgaaggctgtggccagggaacaccttgaactccttaagcatatgcacactgtgggggaaaaggtgattgtagattttgctgggtccagcaaactccgcttccgattgggctaccacgccattccgagtatgagccatgtacatcttcatgtgatcagccaggattttgattctccttgccttaaaaacaaaaaacattggaattctttcaatacagaatacttcctagaatcacaagctgtgatcgagatggtacaagaggctggtagagtaactgtccgagatgggatgcctgagctcttgaagctgccccttcgttgtcatgagtgccagcagctgctgccttccattcctcagctgaaagaacatctcaggaagcactggacacagtgattctgcagagcctgagctgctgctgtggtgtggcccactggagcaaactgctggcacctattctgggttgcttgtgaacttctactcatttcctaaattaaaacatgcagctttttcacaaatttattctattattgagtggccacaatgtagagtggctcaaagtacttcaggattaggaatttgggtttgtcatagatgtattctctggtgagggtggctgggatatacctgacccaccatcttcagaaggacccatgtcaggtctgaccattgggagcaaagccatgttcacactgacctaatgcagagtatggaagcattgggctggttatacatttctgtttcttagatttatcctccgcctctgtaggcatggacaacctttaatcagagcatctagagtggcctcttgtttatcctgaagatactgatgggtcttgttttctgttagtctgttttgtaatattcttttcccttccttcatggggaggcttagtttgtccagtccttccatgcccttctatcccagattacctaaatgttcccttctcaggaattctgtctcatcagttcttcacagtgagaaaagaggctagatgatggtgtggggggttggagttttcttctaataccgagggttcctggctgtgaggaaacagccacatgttcgtcatgattgagctgtgaagtcttcttggacctgttgtctgaaaataaagttaatttgtttgaggcatctctcttaagtaggtggaaactattgaagttcagctaacaatcacagcataggttctgatgcatggaaaggtggttggtgaatgaaaaagttgcgtagagccactactttctttttccctgagaataaatttggataaaacagt

SEQ ID NO: 453823 - DNA, 2153 bp, Homo sapiens
ctctgacgtcatcccgcagcgccggaagcggtgaggcacagatgagtaacgtgaatttgtccgtctccgacttctggaggtaaggcggtcgtcagcctatctcttctgctggctgggctcaatgccgcggatttattttttttagatgaggtgttgctgtgttgcccaagctggacttgaacccctaggctcaagcaatccttccacctcagtctcccaagtagcagggactacagagtgatgatgcgggtgtgctggttggtgagacaggacagccggcaccagcgaatcagacttccacatttggaagcagttgtgattgggcgtggcccagagaccaagatcactgataagaaatgttctcgacagcaagtacagttgaaagcagagtgtaacaagggatatgtcaaggtaaagcaggtaggagtcaatcccaccagcattgactcagtcgtaattgggaaggaccaagaggtgaagctgcagcctggccaggttctccacatggtgaatgaactttatccatatattgtagagtttgaggaagaggcaaagaaccctggcctggaaacacacaggaagagaaagagatcaggcaacagtgattctatagaaagggatgctgctcaggaagctgaggctgggacagggctggaacctgggagcaactctggccaatgctctgtgcccctaaagaagggaaaagatgcacctatcaaaaaggaatccctgggccactggagtcaaggcttgaagatttctatgcaggaccccaaaatgcaggtttacaaagatgagcaggtggtggtgataaaggataaatacccaaaggcccgttaccattggctggtcttaccgtggacctccatttccagtctgaaggctgtggccagggaacaccttgaactccttaagcatatgcacactgtgggggaaaaggtgattgtagattttgctgggtccagcaaactccgcttccgattgggctaccacgccattccgagtatgagccatgtacatcttcatgtgatcagccaggattttgattctccttgccttaaaaacaaaaaacattggaattctttcaatacagaatacttcctagaatcacaagctgtgatcgagatggtacaagaggctggtagagtaactgtccgagatgggatgcctgagctcttgaagctgccccttcgttgtcatgagtgccagcagctgctgccttccattcctcagctgaaagaacatctcaggaagcactggacacagtgattctgcagagcctgagctgctgctgtggtgtggcccactggagcaaactgctggcacctattctgggttgcttgtgaacttctactcatttcctaaattaaaacatgcagctttttcacaaatttattctattattgagtggccacaatgtagagtggctcaaagtacttcaggattaggaatttgggtttgtcatagatgtattctctggtgagggtggctgggatatacctgacccaccatcttcagaaggacccatgtcaggtctgaccattgggagcaaagccatgttcacactgacctaatgcagagtatggaagcattgggctggttatacatttctgtttcttagatttatcctccgcctctgtaggcatggacaacctttaatcagagcatctagagtggcctcttgtttatcctgaagatactgatgggtcttgttttctgttagtctgttttgtaatattcttttcccttccttcatggggaggcttagtttgtccagtccttccatgcccttctatcccagattacctaaatgttcccttctcaggaattctgtctcatcagttcttcacagtgagaaaagaggctagatgatggtgtggggggttggagttttcttctaataccgagggttcctggctgtgaggaaacagccacatgttcgtcatgattgagctgtgaagtcttcttggacctgttgtctgaaaataaagttaatttgtttgaggcatctctcttaagtaggtggaaactattgaagttcagctaacaatcacagcataggttctgatgcatggaaaggtggttggtgaatgaaaaagttgcgtagagccactactttctttttccctgagaataaatttggataaaacagt

SEQ ID NO: 453824 - DNA, 2107 bp, Homo sapiens
gctcgaccggcttcccggcgctcgtggaatcttctggagcccttttctccactcagcgagcctgagagtgcggaagtctccggctggtggggcatggcccaggagcactgcaagtcctagggttcccaaacctgtggggtggccgcctgggcccgcgagggcgggaagggctcgagtacagtgacccagcgggagctgtgtgtgaacgggaaagctcttggaacagtcttgcccccccccccccccctcttacgggcgcctcttctctttttgggaacgtggcgagcaaaaaatgcttgagccagagtgatgatgcgggtgtgctggttggtgagacaggacagccggcaccagcgaatcagacttccacatttggaagcagttgtgattgggcgtggcccagagaccaagatcactgataagaaatgttctcgacagcaagtacagttgaaagcagagtgtaacaagggatatgtcaaggtaaagcagagtttgaggaagaggcaaagaaccctggcctggaaacacacaggaagagaaagagatcaggcaacagtgattctatagaaagggatgctgctcaggaagctgaggctgggacagggctggaacctgggagcaactctggccaatgctctgtgcccctaaagaagggaaaagatgcacctatcaaaaaggaatccctgggccactggagtcaaggcttgaagatttctatgcaggaccccaaaatgcaggtttacaaagatgagcaggtggtggtgataaaggataaatacccaaaggcccgttaccattggctggtcttaccgtggacctccatttccagtctgaaggctgtggccagggaacaccttgaactccttaagcatatgcacactgtgggggaaaaggtgattgtagattttgctgggtccagcaaactccgcttccgattgggctaccacgccattccgagtatgagccatgtacatcttcatgtgatcagccaggattttgattctccttgccttaaaaacaaaaaacattggaattctttcaatacagaatacttcctagaatcacaagctgtgatcgagatggtacaagaggctggtagagtaactgtccgagatgggatgcctgagctcttgaagctgccccttcgttgtcatgagtgccagcagctgctgccttccattcctcagctgaaagaacatctcaggaagcactggacacagtgattctgcagagcctgagctgctgctgtggtgtggcccactggagcaaactgctggcacctattctgggttgcttgtgaacttctactcatttcctaaattaaaacatgcagctttttcacaaatttattctattattgagtggccacaatgtagagtggctcaaagtacttcaggattaggaatttgggtttgtcatagatgtattctctggtgagggtggctgggatatacctgacccaccatcttcagaaggacccatgtcaggtctgaccattgggagcaaagccatgttcacactgacctaatgcagagtatggaagcattgggctggttatacatttctgtttcttagatttatcctccgcctctgtaggcatggacaacctttaatcagagcatctagagtggcctcttgtttatcctgaagatactgatgggtcttgttttctgttagtctgttttgtaatattcttttcccttccttcatggggaggcttagtttgtccagtccttccatgcccttctatcccagattacctaaatgttcccttctcaggaattctgtctcatcagttcttcacagtgagaaaagaggctagatgatggtgtggggggttggagttttcttctaataccgagggttcctggctgtgaggaaacagccacatgttcgtcatgattgagctgtgaagtcttcttggacctgttgtctgaaaataaagttaatttgtttgaggcatctctcttaagtaggtggaaactattgaagttcagctaacaatcacagcataggttctgatgcatggaaaggtggttggtgaatgaaaaagttgcgtagagccactactttctttttccctgagaataaatttggataaaacagt

SEQ ID NO: 453825 - DNA, 1881 bp, Homo sapiens
ctctgacgtcatcccgcagcgccggaagcggtgaggcacagatgagtaacgtgaatttgtccgtctccgacttctggagagtgatgatgcgggtgtgctggttggtgagacaggacagccggcaccagcgaatcagacttccacatttggaagcagttgtgattgggcgtggcccagagaccaagatcactgataagaaatgttctcgacagcaagtacagttgaaagcagagtgtaacaagggatatgtcaaggtaaagcagagtttgaggaagaggcaaagaaccctggcctggaaacacacaggaagagaaagagatcaggcaacagtgattctatagaaagggatgctgctcaggaagctgaggctgggacagggctggaacctgggagcaactctggccaatgctctgtgcccctaaagaagggaaaagatgcacctatcaaaaaggaatccctgggccactggagtcaaggcttgaagatttctatgcaggaccccaaaatgcaggtttacaaagatgagcaggtggtggtgataaaggataaatacccaaaggcccgttaccattggctggtcttaccgtggacctccatttccagtctgaaggctgtggccagggaacaccttgaactccttaagcatatgcacactgtgggggaaaaggtgattgtagattttgctgggtccagcaaactccgcttccgattgggctaccacgccattccgagtatgagccatgtacatcttcatgtgatcagccaggattttgattctccttgccttaaaaacaaaaaacattggaattctttcaatacagaatacttcctagaatcacaagctgtgatcgagatggtacaagaggctggtagagtaactgtccgagatgggatgcctgagctcttgaagctgccccttcgttgtcatgagtgccagcagctgctgccttccattcctcagctgaaagaacatctcaggaagcactggacacagtgattctgcagagcctgagctgctgctgtggtgtggcccactggagcaaactgctggcacctattctgggttgcttgtgaacttctactcatttcctaaattaaaacatgcagctttttcacaaatttattctattattgagtggccacaatgtagagtggctcaaagtacttcaggattaggaatttgggtttgtcatagatgtattctctggtgagggtggctgggatatacctgacccaccatcttcagaaggacccatgtcaggtctgaccattgggagcaaagccatgttcacactgacctaatgcagagtatggaagcattgggctggttatacatttctgtttcttagatttatcctccgcctctgtaggcatggacaacctttaatcagagcatctagagtggcctcttgtttatcctgaagatactgatgggtcttgttttctgttagtctgttttgtaatattcttttcccttccttcatggggaggcttagtttgtccagtccttccatgcccttctatcccagattacctaaatgttcccttctcaggaattctgtctcatcagttcttcacagtgagaaaagaggctagatgatggtgtggggggttggagttttcttctaataccgagggttcctggctgtgaggaaacagccacatgttcgtcatgattgagctgtgaagtcttcttggacctgttgtctgaaaataaagttaatttgtttgaggcatctctcttaagtaggtggaaactattgaagttcagctaacaatcacagcataggttctgatgcatggaaaggtggttggtgaatgaaaaagttgcgtagagccactactttctttttccctgagaataaatttggataaaacagt

SEQ ID NO: 453826 - DNA, 1834 bp, Homo sapiens
ctctgacgtcatcccgcagcgccggaagcggtgaggcacagatgagtaacgtgaatttgtccgtctccgacttctggagagtgatgatgcgggtgtgctggttggtgagacaggacagccggcaccagcgaatcagacttccacatttggaagcagttgtgattgggcgtggcccagagaccaagatcactgataagaaatgttctcgacagcaagagtttgaggaagaggcaaagaaccctggcctggaaacacacaggaagagaaagagatcaggcaacagtgattctatagaaagggatgctgctcaggaagctgaggctgggacagggctggaacctgggagcaactctggccaatgctctgtgcccctaaagaagggaaaagatgcacctatcaaaaaggaatccctgggccactggagtcaaggcttgaagatttctatgcaggaccccaaaatgcaggtttacaaagatgagcaggtggtggtgataaaggataaatacccaaaggcccgttaccattggctggtcttaccgtggacctccatttccagtctgaaggctgtggccagggaacaccttgaactccttaagcatatgcacactgtgggggaaaaggtgattgtagattttgctgggtccagcaaactccgcttccgattgggctaccacgccattccgagtatgagccatgtacatcttcatgtgatcagccaggattttgattctccttgccttaaaaacaaaaaacattggaattctttcaatacagaatacttcctagaatcacaagctgtgatcgagatggtacaagaggctggtagagtaactgtccgagatgggatgcctgagctcttgaagctgccccttcgttgtcatgagtgccagcagctgctgccttccattcctcagctgaaagaacatctcaggaagcactggacacagtgattctgcagagcctgagctgctgctgtggtgtggcccactggagcaaactgctggcacctattctgggttgcttgtgaacttctactcatttcctaaattaaaacatgcagctttttcacaaatttattctattattgagtggccacaatgtagagtggctcaaagtacttcaggattaggaatttgggtttgtcatagatgtattctctggtgagggtggctgggatatacctgacccaccatcttcagaaggacccatgtcaggtctgaccattgggagcaaagccatgttcacactgacctaatgcagagtatggaagcattgggctggttatacatttctgtttcttagatttatcctccgcctctgtaggcatggacaacctttaatcagagcatctagagtggcctcttgtttatcctgaagatactgatgggtcttgttttctgttagtctgttttgtaatattcttttcccttccttcatggggaggcttagtttgtccagtccttccatgcccttctatcccagattacctaaatgttcccttctcaggaattctgtctcatcagttcttcacagtgagaaaagaggctagatgatggtgtggggggttggagttttcttctaataccgagggttcctggctgtgaggaaacagccacatgttcgtcatgattgagctgtgaagtcttcttggacctgttgtctgaaaataaagttaatttgtttgaggcatctctcttaagtaggtggaaactattgaagttcagctaacaatcacagcataggttctgatgcatggaaaggtggttggtgaatgaaaaagttgcgtagagccactactttctttttccctgagaataaatttggataaaacagt

SEQ ID NO: 453827 - DNA, 1936 bp, Homo sapiens
ctctgacgtcatcccgcagcgccggaagcggtgaggcacagatgagtaacgtgaatttgtccgtctccgacttctggagagtgatgatgcgggtgtgctggttggtgagacaggacagccggcaccagcgaatcagacttccacatttggaagcagttgtgattgggcgtggcccagagaccaagatcactgataagaaatgttctcgacagcaagtacagttgaaagcagagtgtaacaagggatatgtcaaggtaaagcaggtaggagtcaatcccaccagcattgactcagtcgtaattgggaaggaccaagaggtgaagctgcagcctggccaggttctccacatggtgaatgaactttatccatatattgtagagtttgaggaagaggcaaagaaccctggcctggaaacacacaggaagagaaagagatcaggcaacagtgattctatagaaagggatgctgctcaggaagctgaggctgggacagggctggaacctgggagcaactctggccaatgctctgtgcccctaaagaagggaaaagatgcacctatcaaaaaggtttacaaagatgagcaggtggtggtgataaaggataaatacccaaaggcccgttaccattggctggtcttaccgtggacctccatttccagtctgaaggctgtggccagggaacaccttgaactccttaagcatatgcacactgtgggggaaaaggtgattgtagattttgctgggtccagcaaactccgcttccgattgggctaccacgccattccgagtatgagccatgtacatcttcatgtgatcagccaggattttgattctccttgccttaaaaacaaaaaacattggaattctttcaatacagaatacttcctagaatcacaagctgtgatcgagatggtacaagaggctggtagagtaactgtccgagatgggatgcctgagctcttgaagctgccccttcgttgtcatgagtgccagcagctgctgccttccattcctcagctgaaagaacatctcaggaagcactggacacagtgattctgcagagcctgagctgctgctgtggtgtggcccactggagcaaactgctggcacctattctgggttgcttgtgaacttctactcatttcctaaattaaaacatgcagctttttcacaaatttattctattattgagtggccacaatgtagagtggctcaaagtacttcaggattaggaatttgggtttgtcatagatgtattctctggtgagggtggctgggatatacctgacccaccatcttcagaaggacccatgtcaggtctgaccattgggagcaaagccatgttcacactgacctaatgcagagtatggaagcattgggctggttatacatttctgtttcttagatttatcctccgcctctgtaggcatggacaacctttaatcagagcatctagagtggcctcttgtttatcctgaagatactgatgggtcttgttttctgttagtctgttttgtaatattcttttcccttccttcatggggaggcttagtttgtccagtccttccatgcccttctatcccagattacctaaatgttcccttctcaggaattctgtctcatcagttcttcacagtgagaaaagaggctagatgatggtgtggggggttggagttttcttctaataccgagggttcctggctgtgaggaaacagccacatgttcgtcatgattgagctgtgaagtcttcttggacctgttgtctgaaaataaagttaatttgtttgaggcatctctcttaagtaggtggaaactattgaagttcagctaacaatcacagcataggttctgatgcatggaaaggtggttggtgaatgaaaaagttgcgtagagccactactttctttttccctgagaataaatttggataaaacagt

SEQ ID NO: 453828 - DNA, 2032 bp, Homo sapiens
ctctgacgtcatcccgcagcgccggaagcggtgaggcacagatgagtaacgtgaatttgtccgtctccgacttctggagagtgatgatgcgggtgtgctggttggtgagacaggacagccggcaccagcgaatcagacttccacatttggaagcagttgtgattgggcgtggcccagagaccaagatcactgataagaaatgttctcgacagcaagtacagttgaaagcagagtgtaacaagggatatgtcaaggtaaagcaggtaggagtcaatcccaccagcattgactcagtcgtaattgggaaggaccaagaggtgaagctgcagcctggccaggttctccacatggtgaatgaactttatccatatattgtagagtttgaggaagaggcaaagaaccctggcctggaaacacacaggaagagaaagagatcaggcaacagtgattctatagaaagggatgctgctcaggaagctgaggctgggacagggctggaacctgggagcaactctggccaatgctctgtgcccctaaagaagggaaaagatgcacctatcaaaaaggaatccctgggccactggagtcaaggcttgaagatttctatgcaggaccccaaaatgcaggtttacaaagatgagcaggtggtggtgataaaggataaatacccaaaggcccgttaccattggctggtcttaccgtggacctccatttccagtctgaaggctgtggccagggaacaccttgaactccttaagcatatgcacactgtgggggaaaaggtgattgtagattttgctgggtccagcaaactccgcttccgattgggctaccacgccattccgagtatgagccatgtacatcttcatgtgatcagccaggattttgattctccttgccttaaaaacaaaaaacattggaattctttcaatacagaatacttcctagaatcacaagagtagctgggatttgacttttcttccttgcctgcagctgtgatcgagatggtacaagaggctggtagagtaactgtccgagatgggatgcctgagctcttgaagctgccccttcgttgtcatgagtgccagcagctgctgccttccattcctcagctgaaagaacatctcaggaagcactggacacagtgattctgcagagcctgagctgctgctgtggtgtggcccactggagcaaactgctggcacctattctgggttgcttgtgaacttctactcatttcctaaattaaaacatgcagctttttcacaaatttattctattattgagtggccacaatgtagagtggctcaaagtacttcaggattaggaatttgggtttgtcatagatgtattctctggtgagggtggctgggatatacctgacccaccatcttcagaaggacccatgtcaggtctgaccattgggagcaaagccatgttcacactgacctaatgcagagtatggaagcattgggctggttatacatttctgtttcttagatttatcctccgcctctgtaggcatggacaacctttaatcagagcatctagagtggcctcttgtttatcctgaagatactgatgggtcttgttttctgttagtctgttttgtaatattcttttcccttccttcatggggaggcttagtttgtccagtccttccatgcccttctatcccagattacctaaatgttcccttctcaggaattctgtctcatcagttcttcacagtgagaaaagaggctagatgatggtgtggggggttggagttttcttctaataccgagggttcctggctgtgaggaaacagccacatgttcgtcatgattgagctgtgaagtcttcttggacctgttgtctgaaaataaagttaatttgtttgaggcatctctcttaagtaggtggaaactattgaagttcagctaacaatcacagcataggttctgatgcatggaaaggtggttggtgaatgaaaaagttgcgtagagccactactttctttttccctgagaataaatttggataaaacagt

SEQ ID NO: 453829 - DNA, 1780 bp, Homo sapiens
ctctgacgtcatcccgcagcgccggaagcggtgaggcacagatgagtaacgtgaatttgtccgtctccgacttctggagagtgatgatgcgggtgtgctggttggtgagacaggacagccggcaccagcgaatcagacttccacatttggaagcagttgtgattgggcgtggcccagagaccaagatcactgataagaaatgttctcgacagcaagtacagttgaaagcagagtgtaacaagggatatgtcaaggtaaagcaggtaggagtcaatcccaccagcattgactcagtcgtaattgggaaggaccaagaggtgaagctgcagcctggccaggttctccacatggaatccctgggccactggagtcaaggcttgaagatttctatgcaggaccccaaaatgcaggtttacaaagatgagcaggtggtggtgataaaggataaatacccaaaggcccgttaccattggctggtcttaccgtggacctccatttccagtctgaaggctgtggccagggaacaccttgaactccttaagcatatgcacactgtgggggaaaaggtgattgtagattttgctgggtccagcaaactccgcttccgattgggctaccacgccattccgagtatgagccatgtacatcttcatgtgatcagccaggattttgattctccttgccttaaaaacaaaaaacattggaattctttcaatacagaatacttcctagaatcacaagctgtgatcgagatggtacaagaggctggtagagtaactgtccgagatgggatgcctgagctcttgaagctgccccttcgttgtcatgagtgccagcagctgctgccttccattcctcagctgaaagaacatctcaggaagcactggacacagtgattctgcagagcctgagctgctgctgtggtgtggcccactggagcaaactgctggcacctattctgggttgcttgtgaacttctactcatttcctaaattaaaacatgcagctttttcacaaatttattctattattgagtggccacaatgtagagtggctcaaagtacttcaggattaggaatttgggtttgtcatagatgtattctctggtgagggtggctgggatatacctgacccaccatcttcagaaggacccatgtcaggtctgaccattgggagcaaagccatgttcacactgacctaatgcagagtatggaagcattgggctggttatacatttctgtttcttagatttatcctccgcctctgtaggcatggacaacctttaatcagagcatctagagtggcctcttgtttatcctgaagatactgatgggtcttgttttctgttagtctgttttgtaatattcttttcccttccttcatggggaggcttagtttgtccagtccttccatgcccttctatcccagattacctaaatgttcccttctcaggaattctgtctcatcagttcttcacagtgagaaaagaggctagatgatggtgtggggggttggagttttcttctaataccgagggttcctggctgtgaggaaacagccacatgttcgtcatgattgagctgtgaagtcttcttggacctgttgtctgaaaataaagttaatttgtttgaggcatctctcttaagtaggtggaaactattgaagttcagctaacaatcacagcataggttctgatgcatggaaaggtggttggtgaatgaaaaagttgcgtagagccactactttctttttccctgagaataaatttggataaaacagt

SEQ ID NO: 453830 - DNA, 990 bp, Homo sapiens
gctcgaccggcttcccggcgctcgtggaatcttctggagcccttttctccactcagcgagcctgagagtgcggaagtctccggctggtggggcatggcccaggagcactgcaagtcctagggttcccaaacctgtggggtggccgcctgggcccgcgagggcgggaagggctcgagtacagtgacccagcgggagctgtgtgtgaacgggaaagctcttggaacagtcttgcccccccccccccccctcttacgggcgcctcttctctttttgggaacgtggcgagcaaaaaatgcttgagccagtttacaaagaaaaggagtcggagccagggcggttatgtgggacgtggatgcagacgcaggcggaggcgccaactgcggggatggctagggtgatcacagctgccccgggggcgcggacaccccggcagctccggccagcggagctcccccaccgcacgtgtcaggtcctagcagaaacgcagcgtctgtggccaagggccaggaatgcggccgcacatattcaccctcagcgtgcctttcccgacccccttagaggtggaaattgcccatgggtccctggctccagatgccgaaccccaccaaagggtggttgggaaggatctcacagtgagcggcaggatcctggccgtccgctggaaagctgaagactgttgcctgctccgaatttcccttatcaactttctcgaccatctttctctggtggtgcggaccctgcagcactttgggcccccagtttcccgctaagcctggcctgggaaaatggggcgaggtctaaccttgcgtctcctcctaggcagtgcatccatcctccctagggcagggaattcccacagttgctactttcccgggagggcctcatggtcggcctgtactgcctttgtgtgctcaggggtcccttgttttctctggttcttaaatgtttgttaccacagaaaataaaactgagctactattaaaaagaaaa

SEQ ID NO: 453831 - DNA, 131 bp, Homo sapiens
ggtatctcatattggttttccagagtagctgggatttgacttttcttccttgcctgcagctgtgatcgagatggtacaagaggctggtagagtaactgtccgagatgggatgcctgagctcttgaagctgc

SEQ ID NO: 453832 - DNA, 1995 bp, Homo sapiens
attttcacaacagcctcctgagtcccatcattatcatggtttataggtgaggaaattgagactagggtggtgaagtcacttgcctcaagatgaacagctggtagatcacatgcgtggtggcaccgggtgtggccctggaggactcgtgctagtggatctgtttttctagtgattcttttgttttgtcccttagagtgatgatgcgggtgtgctggttggtgagacaggacagccggcaccagcgaatcagacttccacatttggaagcagttgtgattgggcgtggcccagagaccaagatcactgataagaaatgttctcgacagcaagtacagttgaaagcagagtgtaacaagggatatgtcaaggtaaagcagagtttgaggaagaggcaaagaaccctggcctggaaacacacaggaagagaaagagatcaggcaacagtgattctatagaaagggatgctgctcaggaagctgaggctgggacagggctggaacctgggagcaactctggccaatgctctgtgcccctaaagaagggaaaagatgcacctatcaaaaaggaatccctgggccactggagtcaaggcttgaagatttctatgcaggaccccaaaatgcaggtttacaaagatgagcaggtggtggtgataaaggataaatacccaaaggcccgttaccattggctggtcttaccgtggacctccatttccagtctgaaggctgtggccagggaacaccttgaactccttaagcatatgcacactgtgggggaaaaggtgattgtagattttgctgggtccagcaaactccgcttccgattgggctaccacgccattccgagtatgagccatgtacatcttcatgtgatcagccaggattttgattctccttgccttaaaaacaaaaaacattggaattctttcaatacagaatacttcctagaatcacaagctgtgatcgagatggtacaagaggctggtagagtaactgtccgagatgggatgcctgagctcttgaagctgccccttcgttgtcatgagtgccagcagctgctgccttccattcctcagctgaaagaacatctcaggaagcactggacacagtgattctgcagagcctgagctgctgctgtggtgtggcccactggagcaaactgctggcacctattctgggttgcttgtgaacttctactcatttcctaaattaaaacatgcagctttttcacaaatttattctattattgagtggccacaatgtagagtggctcaaagtacttcaggattaggaatttgggtttgtcatagatgtattctctggtgagggtggctgggatatacctgacccaccatcttcagaaggacccatgtcaggtctgaccattgggagcaaagccatgttcacactgacctaatgcagagtatggaagcattgggctggttatacatttctgtttcttagatttatcctccgcctctgtaggcatggacaacctttaatcagagcatctagagtggcctcttgtttatcctgaagatactgatgggtcttgttttctgttagtctgttttgtaatattcttttcccttccttcatggggaggcttagtttgtccagtccttccatgcccttctatcccagattacctaaatgttcccttctcaggaattctgtctcatcagttcttcacagtgagaaaagaggctagatgatggtgtggggggttggagttttcttctaataccgagggttcctggctgtgaggaaacagccacatgttcgtcatgattgagctgtgaagtcttcttggacctgttgtctgaaaataaagttaatttgtttgaggcatctctcttaagtaggtggaaactattgaagttcagctaacaatcacagcataggttctgatgcatggaaaggtggttggtgaatgaaaaagttgcgtagagccactactttctttttccctgagaataaatttggataaaacagt

SEQ ID NO: 453833 - DNA, 2230 bp, Homo sapiens
ctctgacgtcatcccgcagcgccggaagcggtgaggcacagatgagtaacgtgaatttgtccgtctccgacttctggaggtaaggcggtcgtcagcctatctcttctgctggctgggctcaatgccgcgggtgagcgttcggccgaggctgctcctacccttgagtgatgtgccttgaatgacgctgctttcattcgctgctctcacggctgctttctccgtcctcccctgttactaccttgggctgtttcagcgggcgctcgcgttggtcttcgacccactttgcgtttgttcacgtgtgctcccgacacctagtgatgatgcgggtgtgctggttggtgagacaggacagccggcaccagcgaatcagacttccacatttggaagcagttgtgattgggcgtggcccagagaccaagatcactgataagaaatgttctcgacagcaagtacagttgaaagcagagtgtaacaagggatatgtcaaggtaaagcaggtaggagtcaatcccaccagcattgactcagtcgtaattgggaaggaccaagaggtgaagctgcagcctggccaggttctccacatggtgaatgaactttatccatatattgtagagtttgaggaagaggcaaagaaccctggcctggaaacacacaggaagagaaagagatcaggcaacagtgattctatagaaagggatgctgctcaggaagctgaggctgggacagggctggaacctgggagcaactctggccaatgctctgtgcccctaaagaagggaaaagatgcacctatcaaaaaggaatccctgggccactggagtcaaggcttgaagatttctatgcaggaccccaaaatgcaggtttacaaagatgagcaggtggtggtgataaaggataaatacccaaaggcccgttaccattggctggtcttaccgtggacctccatttccagtctgaaggctgtggccagggaacaccttgaactccttaagcatatgcacactgtgggggaaaaggtgattgtagattttgctgggtccagcaaactccgcttccgattgggctaccacgccattccgagtatgagccatgtacatcttcatgtgatcagccaggattttgattctccttgccttaaaaacaaaaaacattggaattctttcaatacagaatacttcctagaatcacaagctgtgatcgagatggtacaagaggctggtagagtaactgtccgagatgggatgcctgagctcttgaagctgccccttcgttgtcatgagtgccagcagctgctgccttccattcctcagctgaaagaacatctcaggaagcactggacacagtgattctgcagagcctgagctgctgctgtggtgtggcccactggagcaaactgctggcacctattctgggttgcttgtgaacttctactcatttcctaaattaaaacatgcagctttttcacaaatttattctattattgagtggccacaatgtagagtggctcaaagtacttcaggattaggaatttgggtttgtcatagatgtattctctggtgagggtggctgggatatacctgacccaccatcttcagaaggacccatgtcaggtctgaccattgggagcaaagccatgttcacactgacctaatgcagagtatggaagcattgggctggttatacatttctgtttcttagatttatcctccgcctctgtaggcatggacaacctttaatcagagcatctagagtggcctcttgtttatcctgaagatactgatgggtcttgttttctgttagtctgttttgtaatattcttttcccttccttcatggggaggcttagtttgtccagtccttccatgcccttctatcccagattacctaaatgttcccttctcaggaattctgtctcatcagttcttcacagtgagaaaagaggctagatgatggtgtggggggttggagttttcttctaataccgagggttcctggctgtgaggaaacagccacatgttcgtcatgattgagctgtgaagtcttcttggacctgttgtctgaaaataaagttaatttgtttgaggcatctctcttaagtaggtggaaactattgaagttcagctaacaatcacagcataggttctgatgcatggaaaggtggttggtgaatgaaaaagttgcgtagagccactactttctttttccctgagaataaatttggataaaacagt

SEQ ID NO: 453834 - DNA, 2038 bp, Homo sapiens
ctctgacgtcatcccgcagcgccggaagcggtgaggcacagatgagtaacgtgaatttgtccgtctccgacttctggaggtaaggcggtcgtcagcctatctcttctgctggctgggctcaatgccgcggatttattttttttagatgaggtgttgctgtgttgcccaagctggacttgaacccctaggctcaagcaatccttccacctcagtctcccaagtagcagggactacagagtgatgatgcgggtgtgctggttggtgagacaggacagccggcaccagcgaatcagacttccacatttggaagcagttgtgattgggcgtggcccagagaccaagatcactgataagaaatgttctcgacagcaagtacagttgaaagcagagtgtaacaagggatatgtcaaggtaaagcagagtttgaggaagaggcaaagaaccctggcctggaaacacacaggaagagaaagagatcaggcaacagtgattctatagaaagggatgctgctcaggaagctgaggctgggacagggctggaacctgggagcaactctggccaatgctctgtgcccctaaagaagggaaaagatgcacctatcaaaaaggaatccctgggccactggagtcaaggcttgaagatttctatgcaggaccccaaaatgcaggtttacaaagatgagcaggtggtggtgataaaggataaatacccaaaggcccgttaccattggctggtcttaccgtggacctccatttccagtctgaaggctgtggccagggaacaccttgaactccttaagcatatgcacactgtgggggaaaaggtgattgtagattttgctgggtccagcaaactccgcttccgattgggctaccacgccattccgagtatgagccatgtacatcttcatgtgatcagccaggattttgattctccttgccttaaaaacaaaaaacattggaattctttcaatacagaatacttcctagaatcacaagctgtgatcgagatggtacaagaggctggtagagtaactgtccgagatgggatgcctgagctcttgaagctgccccttcgttgtcatgagtgccagcagctgctgccttccattcctcagctgaaagaacatctcaggaagcactggacacagtgattctgcagagcctgagctgctgctgtggtgtggcccactggagcaaactgctggcacctattctgggttgcttgtgaacttctactcatttcctaaattaaaacatgcagctttttcacaaatttattctattattgagtggccacaatgtagagtggctcaaagtacttcaggattaggaatttgggtttgtcatagatgtattctctggtgagggtggctgggatatacctgacccaccatcttcagaaggacccatgtcaggtctgaccattgggagcaaagccatgttcacactgacctaatgcagagtatggaagcattgggctggttatacatttctgtttcttagatttatcctccgcctctgtaggcatggacaacctttaatcagagcatctagagtggcctcttgtttatcctgaagatactgatgggtcttgttttctgttagtctgttttgtaatattcttttcccttccttcatggggaggcttagtttgtccagtccttccatgcccttctatcccagattacctaaatgttcccttctcaggaattctgtctcatcagttcttcacagtgagaaaagaggctagatgatggtgtggggggttggagttttcttctaataccgagggttcctggctgtgaggaaacagccacatgttcgtcatgattgagctgtgaagtcttcttggacctgttgtctgaaaataaagttaatttgtttgaggcatctctcttaagtaggtggaaactattgaagttcagctaacaatcacagcataggttctgatgcatggaaaggtggttggtgaatgaaaaagttgcgtagagccactactttctttttccctgagaataaatttggataaaacagt

SEQ ID NO: 453835 - DNA, 2047 bp, Homo sapiens
ctctgacgtcatcccgcagcgccggaagcggtgaggcacagatgagtaacgtgaatttgtccgtctccgacttctggaggtaaggcggtcgtcagcctatctcttctgctggctgggctcaatgccgcggagtgatgatgcgggtgtgctggttggtgagacaggacagccggcaccagcgaatcagacttccacatttggaagcagttgtgattgggcgtggcccagagaccaagatcactgataagaaatgttctcgacagcaagtacagttgaaagcagagtgtaacaagggatatgtcaaggtaaagcaggtaggagtcaatcccaccagcattgactcagtcgtaattgggaaggaccaagaggtgaagctgcagcctggccaggttctccacatggtgaatgaactttatccatatattgtagagtttgaggaagaggcaaagaaccctggcctggaaacacacaggaagagaaagagatcaggcaacagtgattctatagaaagggatgctgctcaggaagctgaggctgggacagggctggaacctgggagcaactctggccaatgctctgtgcccctaaagaagggaaaagatgcacctatcaaaaaggaatccctgggccactggagtcaaggcttgaagatttctatgcaggaccccaaaatgcaggtttacaaagatgagcaggtggtggtgataaaggataaatacccaaaggcccgttaccattggctggtcttaccgtggacctccatttccagtctgaaggctgtggccagggaacaccttgaactccttaagcatatgcacactgtgggggaaaaggtgattgtagattttgctgggtccagcaaactccgcttccgattgggctaccacgccattccgagtatgagccatgtacatcttcatgtgatcagccaggattttgattctccttgccttaaaaacaaaaaacattggaattctttcaatacagaatacttcctagaatcacaagctgtgatcgagatggtacaagaggctggtagagtaactgtccgagatgggatgcctgagctcttgaagctgccccttcgttgtcatgagtgccagcagctgctgccttccattcctcagctgaaagaacatctcaggaagcactggacacagtgattctgcagagcctgagctgctgctgtggtgtggcccactggagcaaactgctggcacctattctgggttgcttgtgaacttctactcatttcctaaattaaaacatgcagctttttcacaaatttattctattattgagtggccacaatgtagagtggctcaaagtacttcaggattaggaatttgggtttgtcatagatgtattctctggtgagggtggctgggatatacctgacccaccatcttcagaaggacccatgtcaggtctgaccattgggagcaaagccatgttcacactgacctaatgcagagtatggaagcattgggctggttatacatttctgtttcttagatttatcctccgcctctgtaggcatggacaacctttaatcagagcatctagagtggcctcttgtttatcctgaagatactgatgggtcttgttttctgttagtctgttttgtaatattcttttcccttccttcatggggaggcttagtttgtccagtccttccatgcccttctatcccagattacctaaatgttcccttctcaggaattctgtctcatcagttcttcacagtgagaaaagaggctagatgatggtgtggggggttggagttttcttctaataccgagggttcctggctgtgaggaaacagccacatgttcgtcatgattgagctgtgaagtcttcttggacctgttgtctgaaaataaagttaatttgtttgaggcatctctcttaagtaggtggaaactattgaagttcagctaacaatcacagcataggttctgatgcatggaaaggtggttggtgaatgaaaaagttgcgtagagccactactttctttttccctgagaataaatttggataaaacagt

SEQ ID NO: 453836 - DNA, 1885 bp, Homo sapiens
ctctgacgtcatcccgcagcgccggaagcggtgaggcacagatgagtaacgtgaatttgtccgtctccgacttctggaggtaaggcggtcgtcagcctatctcttctgctggctgggctcaatgccgcggagtgatgatgcgggtgtgctggttggtgagacaggacagccggcaccagcgaatcagacttccacatttggaagcagttgtgattgggcgtggcccagagaccaagatcactgataagaaatgttctcgacagcaagagtttgaggaagaggcaaagaaccctggcctggaaacacacaggaagagaaagagatcaggcaacagtgattctatagaaagggatgctgctcaggaagctgaggctgggacagggctggaacctgggagcaactctggccaatgctctgtgcccctaaagaagggaaaagatgcacctatcaaaaaggaatccctgggccactggagtcaaggcttgaagatttctatgcaggaccccaaaatgcaggtttacaaagatgagcaggtggtggtgataaaggataaatacccaaaggcccgttaccattggctggtcttaccgtggacctccatttccagtctgaaggctgtggccagggaacaccttgaactccttaagcatatgcacactgtgggggaaaaggtgattgtagattttgctgggtccagcaaactccgcttccgattgggctaccacgccattccgagtatgagccatgtacatcttcatgtgatcagccaggattttgattctccttgccttaaaaacaaaaaacattggaattctttcaatacagaatacttcctagaatcacaagctgtgatcgagatggtacaagaggctggtagagtaactgtccgagatgggatgcctgagctcttgaagctgccccttcgttgtcatgagtgccagcagctgctgccttccattcctcagctgaaagaacatctcaggaagcactggacacagtgattctgcagagcctgagctgctgctgtggtgtggcccactggagcaaactgctggcacctattctgggttgcttgtgaacttctactcatttcctaaattaaaacatgcagctttttcacaaatttattctattattgagtggccacaatgtagagtggctcaaagtacttcaggattaggaatttgggtttgtcatagatgtattctctggtgagggtggctgggatatacctgacccaccatcttcagaaggacccatgtcaggtctgaccattgggagcaaagccatgttcacactgacctaatgcagagtatggaagcattgggctggttatacatttctgtttcttagatttatcctccgcctctgtaggcatggacaacctttaatcagagcatctagagtggcctcttgtttatcctgaagatactgatgggtcttgttttctgttagtctgttttgtaatattcttttcccttccttcatggggaggcttagtttgtccagtccttccatgcccttctatcccagattacctaaatgttcccttctcaggaattctgtctcatcagttcttcacagtgagaaaagaggctagatgatggtgtggggggttggagttttcttctaataccgagggttcctggctgtgaggaaacagccacatgttcgtcatgattgagctgtgaagtcttcttggacctgttgtctgaaaataaagttaatttgtttgaggcatctctcttaagtaggtggaaactattgaagttcagctaacaatcacagcataggttctgatgcatggaaaggtggttggtgaatgaaaaagttgcgtagagccactactttctttttccctgagaataaatttggataaaacagt

SEQ ID NO: 453837 - DNA, 1880 bp, Homo sapiens
ctctgacgtcatcccgcagcgccggaagcggtgaggcacagatgagtaacgtgaatttgtccgtctccgacttctggaggtaaggcggtcgtcagcctatctcttctgctggctgggctcaatgccgcgggtgagcgttcggccgaggctgctcctacccttgagtgatgtgccttgaatgacgctgctttcattcgctgctctcacggctgctttctccgtcctcccctgttactaccttgggctgtttcagcgggcgctcgcgttggtcttcgacccactttgcgtttgttcacgtgtgctcccgacacctagtgatgatgcgggtgtgctggttggtgagacaggacagccggcaccagcgaatcagacttccacatttggaagcagttgtgattgggcgtggcccagagaccaagatcactgataagaaatgttctcgacagcaaggaatccctgggccactggagtcaaggcttgaagatttctatgcaggaccccaaaatgcaggtttacaaagatgagcaggtggtggtgataaaggataaatacccaaaggcccgttaccattggctggtcttaccgtggacctccatttccagtctgaaggctgtggccagggaacaccttgaactccttaagcatatgcacactgtgggggaaaaggtgattgtagattttgctgggtccagcaaactccgcttccgattgggctaccacgccattccgagtatgagccatgtacatcttcatgtgatcagccaggattttgattctccttgccttaaaaacaaaaaacattggaattctttcaatacagaatacttcctagaatcacaagctgtgatcgagatggtacaagaggctggtagagtaactgtccgagatgggatgcctgagctcttgaagctgccccttcgttgtcatgagtgccagcagctgctgccttccattcctcagctgaaagaacatctcaggaagcactggacacagtgattctgcagagcctgagctgctgctgtggtgtggcccactggagcaaactgctggcacctattctgggttgcttgtgaacttctactcatttcctaaattaaaacatgcagctttttcacaaatttattctattattgagtggccacaatgtagagtggctcaaagtacttcaggattaggaatttgggtttgtcatagatgtattctctggtgagggtggctgggatatacctgacccaccatcttcagaaggacccatgtcaggtctgaccattgggagcaaagccatgttcacactgacctaatgcagagtatggaagcattgggctggttatacatttctgtttcttagatttatcctccgcctctgtaggcatggacaacctttaatcagagcatctagagtggcctcttgtttatcctgaagatactgatgggtcttgttttctgttagtctgttttgtaatattcttttcccttccttcatggggaggcttagtttgtccagtccttccatgcccttctatcccagattacctaaatgttcccttctcaggaattctgtctcatcagttcttcacagtgagaaaagaggctagatgatggtgtggggggttggagttttcttctaataccgagggttcctggctgtgaggaaacagccacatgttcgtcatgattgagctgtgaagtcttcttggacctgttgtctgaaaataaagttaatttgtttgaggcatctctcttaagtaggtggaaactattgaagttcagctaacaatcacagcataggttctgatgcatggaaaggtggttggtgaatgaaaaagttgcgtagagccactactttctttttccctgagaataaatttggataaaacagt

SEQ ID NO: 453838 - DNA, 1756 bp, Homo sapiens
  misc_feature (22)..(22): n is a, c, g, or t
  misc_feature (103)..(103): n is a, c, g, or t
  misc_feature (107)..(107): n is a, c, g, or t
  misc_feature (110)..(110): n is a, c, g, or t
  misc_feature (115)..(115): n is a, c, g, or t
  misc_feature (150)..(150): n is a, c, g, or t
  misc_feature (152)..(152): n is a, c, g, or t
  misc_feature (156)..(158): n is a, c, g, or t
  misc_feature (160)..(161): n is a, c, g, or t
  misc_feature (172)..(174): n is a, c, g, or t
  misc_feature (176)..(176): n is a, c, g, or t
  misc_feature (178)..(180): n is a, c, g, or t
  misc_feature (183)..(184): n is a, c, g, or t
  misc_feature (186)..(186): n is a, c, g, or t
  misc_feature (188)..(190): n is a, c, g, or t
  misc_feature (192)..(192): n is a, c, g, or t
  misc_feature (194)..(194): n is a, c, g, or t
  misc_feature (197)..(197): n is a, c, g, or t
  misc_feature (201)..(201): n is a, c, g, or t
  misc_feature (204)..(204): n is a, c, g, or t
  misc_feature (208)..(208): n is a, c, g, or t
  misc_feature (213)..(213): n is a, c, g, or t
  misc_feature (215)..(215): n is a, c, g, or t
  misc_feature (217)..(219): n is a, c, g, or t
  misc_feature (223)..(223): n is a, c, g, or t
  misc_feature (232)..(232): n is a, c, g, or t
  misc_feature (235)..(236): n is a, c, g, or t
  misc_feature (241)..(241): n is a, c, g, or t
  misc_feature (249)..(249): n is a, c, g, or t
  misc_feature (251)..(251): n is a, c, g, or t
  misc_feature (259)..(260): n is a, c, g, or t
  misc_feature (272)..(272): n is a, c, g, or t
tgccggcgctttccgccggctnttgccgtcccggcgtcgcgtcctgggcggcgccttcttgcgtgtccttgggccgcggccgcgtgccgtgccggtggggcgntgtngcnctggncctgcctttctggctctcttgtcgggtttgggggngngggnnngnngggtggggtgnnngngnnnggnngngnnngngntgngggnagngtgnttgtntngnnngggntggtggtgnggnnggtgngggtgggngnggggtggnnggtgggaggaantgtggggaatggtgtgtgggggtaaagaagggaaaagatggaggtatgaaaaaggaatccctgggccactggagtcaaggcttgaagatttctatgcaggaccccaaaatgcaggtttacaaagatgagcaggtggtggtgataaaggataaatacccaaaggcccgttaccattggctggtcttaccgtggacctccatttccagtctgaaggctgtggccagggaacaccttgaactccttaagcatatgcacactgtgggggaaaaggtgattgtagattttgctgggtccagcaaactccgcttccgattgggctaccacgccattccgagtatgagccatgtacatcttcatgtgatcagccaggattttgattctccttgccttaaaaacaaaaaacattggaattctttcaatacagaatacttcctagaatcacaagctgtgatcgagatggtacaagaggctggtagagtaactgtccgagatgggatgcctgagctcttgaagctgccccttcgttgtcatgagtgccagcagctgctgccttccattcctcagctgaaagaacatctcaggaagcactggacacagtgattctgcagagcctgagctgctgctgtggtgtggcccactggagcaaactgctggcacctattctgggttgcttgtgaacttctactcatttcctaaattaaaacatgcagctttttcacaaatttattctattattgagtggccacaatgtagagtggctcaaagtacttcaggattaggaatttgggtttgtcatagatgtattctctggtgagggtggctgggatatacctgacccaccatcttcagaaggacccatgtcaggtctgaccattgggagcaaagccatgttcacactgacctaatgcagagtatggaagcattgggctggttatacatttctgtttcttagatttatcctccgcctctgtaggcatggacaacctttaatcagagcatctagagtggcctcttgtttatcctgaagatactgatgggtcttgttttctgttagtctgttttgtaatattcttttcccttccttcatggggaggcttagtttgtccagtccttccatgcccttctatcccagattacctaaatgttcccttctcaggaattctgtctcatcagttcttcacagtgagaaaagaggctagatgatggtgtggggggttggagttttcttctaataccgagggttcctggctgtgaggaaacagccacatgttcgtcatgattgagctgtgaagtcttcttggacctgttgtctgaaaataaagttaatttgtttgaggcatctctcttaagtaggtggaaactattgaagttcagctaacaatcacagcataggttctgatgcatggaaaggtggttggtgaatgaaaaagttgcgtagagccactactttctttttccctgagaataaatttggataaaacagt

SEQ ID NO: 453839 - DNA, 398 bp, Homo sapiens
gttggtgctcgaccggcttcccggcgctcgtggaatcttctggagcccttttctccactcagcgagcctgagagtgcggaagtctccggctggtggggcatggcccaggagcactgcaagtcctagggttcccaaacctgtggggtggccgcctgggcccgcgagggcgggaagggctcgagtacagtgacccagcgggagctgtgtgtgaacgggaaagctcttggaacagtcttgcccccccccccccccctcttacgggcgcctcttctctttttgggaacgtggcgagcaaaaaatgcttgagccaggtgggtctagtccccagaccaatagcataggccttgggtcttgctgtttttcacgcgtggtccaaggcggcataattaatcaaattg

SEQ ID NO: 453840 - DNA, 480 bp, Homo sapiens
ggtccggaattcccgggtcgaatactactatataattcgaggccgcgtcgactcgacttgatttatataacctggtttatcaaaatttaacatggcttcagtatgagatctttttcaaaactattttcttaaacatttatttcatgagattatgttcaaccctgtacctggtgtaattttaaaattaattgcttgtaacctcactttactaataatgtttattatctttcctaataatgcattaactgattaatcaggtgtttaaatttttataaaatactcttgcaaaaagtttatttgaaaaatttctagatggtctcatgagtttcaaaataataatttttgtgtatgaacaaagctgttgtttttaccatgcagtattgcatgattttaagttatgtggaattaacataactgattttgttttaattgtaagttgttaactcctgtatatatcattaaaataaatctgaagttgaa

SEQ ID NO: 453841 - DNA, 1443 bp, Homo sapiens
tgagtagacataaagaactagagtcaagaaacagtgaatcgggggaaaaaaggaactagagagccacctgtcccttagtaaaggtaatacgaataaaagcctctctactcttctgactccaacgtcttttctctctttgaagcgttaacccgacttgcctctgtcttctttgctacagtttggtgaagatgtttatgcttccttcgggaggagctgaataggtgctaggcagctagctgtgcgcttagaagaaacgagtgtattgggtctgtttttaccaagctgctgagttggttggtggttgtgagcagcaggacgtgtttcctgagagaaatggagatttacaccatcctgtgcttgtctaggaaggcgtccaaatatttatttcctaggcatttcagtaggagtattggtcatgctggtttacggaggtggtcagtgacacgcctaatttcgttggaaactagaattacgtgcggagatttcgtcgaatagtgcctattcgcgttccgagggcacatcttatgcatagttagggctatcagctttatgatatgccaccgatagtatttcccagtgcaggagtatttcataaacagctggaatcaactgaagtgactcatcgaacactaatggttgtttactcattgcagatagcgtcctctgttccttgagtttcactcatgtctccctgttgctttccctaccccattttgaattatttgacagcgtttgtggtttggtgtttggagtattagactaggcggctgaatgacaaatatgggcttggttttgctgttaatctgaagtatgaccttggaaaattgggcaattgtgacttttgtcttttcgcgttctttatctgtagaatggaggagatgccaatcattatttcttgtattggagttgttagggttatataaatttttttttaaataaacataaaattacacacttgtacctactggctcttttaaaggataggtgggcatccttttttggattattcgtgctccttggttgtcttgtcagtttttttctttttatattcagggtggatgctgatatactgcttgacttactgcgtatttgaagattatcctgtttgattttccatctaaactgatccaggctgggacttttcaagaggggatcccttccgtttaaacatctccctctttcaggtttggattgattttgaaagaatccttgaggcaacgaagcagagttgtgaaatgaaaaacatttttcactctttgcagccactacctttcatagtctgacttcttaaagtgagacttatatttagtaattctgcttcataacctcatttattctcattcactgcaaattcacatctattgccatcactccactgaaactagttttccatgccaaaagctgctcctctcccaagtaatactatcatgaccaacaaaacca

SEQ ID NO: 453842 - DNA, 3200 bp, Homo sapiens
acgtcattaccaggcacgcgcaggaaacatggcggcggcgggtgttgtgagcgggaagattatatatgaacaagaaggagtatatattcactcatcttgtggaaagaccaatgaccaagacggcttgatttcaggaatattacgtgttttagaaaaggatgccgaagtaatagtggactggagaccattggatgatgcattagattcctctagtattctctatgctagaaaggactccagttcagttgtagaatggactcaggccccaaaagaaagaggtcatcgaggatcagaacatctgaacagttacgaagcagaatgggacatggttaatacagtttcatttaaaaggaaaccacataccaatggagatgctccaagtcatagaaatgggaaaagcaaatggtcattcctgttcagtttgacagacctgaaatcaatcaagcaaaacaaagagggtatgggctggtcctatttggtattctgtctaaaggatgacgtcgttctccctgctctacactttcatcaaggagatagcaaactactgattgaatctcttgaaaaatatgtggtattgtgtgaatctccacaggataaaagaacacttcttgtgaattgtcagaataagagtctttcacagtcttttgaaaatcttcttgatgagccagcatatggtttaatacaaaaaattaaaaaggacccttatacggcaactatgataggattttccaaagtcacaaactacatttttgacagtttgagaggcagcgatccctctacacatcaacgaccaccttcagaaatggcagattttcttagtgatgctattccaggtctaaagataaatcaacaagaagaaccaggatttgaagtcatcacaagaattgatttgggggaacgccctgttgttcaaaggagagaaccggtatcactggaagaatggactaagaacattgattctgaaggaagaattttaaatgtagataatatgaagcagatgatatttagagggggacttagtcatgcattgagaaagcaagcatggaaatttcttctgggttattttccctgggacagtaccaaggaggaaagaacccaattacaaaagcaaaaaactgatgaatacttcagaatgaaactgcagtggaaatccatcagccaggaacaagagaaaagaaattcgaggttaagagattatagaagtcttatcgaaaaagatgttaacagaacagatcgaacaaacaagttttatgaaggccaagataatccagggttgattttacttcatgacattttgatgacctactgtatgtatgattttgatttaggatatgttcagggaatgagtgatttactttcccctcttttatatgtgatggaaaatgaagtggatgccttttggtgctttgcctcttacatggaccaaatgcatcagaattttgaagaacaaatgcaaggcatgaagacccagctaattcagctgagtaccttacttcgattgttagacagtggattttgcagttacttagaatctcaggactctggatacctttatttttgcttcaggtggcttttaatcagattcaaaagggaatttagttttctagatattcttcgattatgggaggtaatgtggaccgaactaccatgtacaaatttccatcttcttctctgttgtgctattctggaatcagaaaagcagcaaataatggaaaagcattatggcttcaatgaaatacttaagcatatcaatgaattgtccatgaaaattgatgtggaagatatactctgcaaggcagaagcaatttctctacagatggtaaaatgcaaggaattgccacaagcagtctgtgagatccttgggcttcaaggcagtgaagttacaacaccagattcagacgttggtgaagacgaaaatgttgtcatgactccttgtcctacatctgcatttcaaagtaatgccttgcctacactctctgccagtggagccagaaatgacagcccaacacagataccagtgtcctcagatgtctgcagattaacacctgcatgatcactgttcttgcttttttgggaagagacactttgttgcaaccctttttcaagtacttgaaagttgaaaatttgaaatcttggtattgatcatgctttaaggtttatgtaaagaaagtgtactgatgttcttacattaaagctttacaaagatttaaactaattatttttgtagttacttctaccaaatagcctttccttttcgataacattcctcagtatttttatagccaagtacattttattttcttgctgatgaactggaattggataaatattgcaagtggatgagttggaaattatgcactttgaaaaacattcactttgtttaagcttattgggtttcagatttgattaaattaaatgtggaggctttctatagcattctaagctgagaagtagattgttacccagtaatgaaataaaaaataaaaataaaaggatttttttctctattgtttacgacagtactcagcttaaatatttatgctggtcaaatgtgatttaaattggacattttcatcaatgcagtctaatgtgtagataaatatttcaaccataataagtggattggcagtatattttttacattgaacttttcttcacttgtatataaagattatatataagtacttatttatgagtataagaaaggttaggcatattttcattaactgaataaacgacttgatttatataacctggtttatcaaaatttaacatggcttcagtatgagatctttttcaaaactattttcttaaacatttatttcatgagattatgttcaaccctgtacctggtgtaattttaaaattaattgcttgtaacctcactttactaataatgtttattatctttcctaataatgcattaactgattaatcaggtgtttaaatttttataaaatactcttgcaaaaagtttatttgaaaaatttctagatggtctcatgagtttcaaaataataatttttgtgtatgaacaaagctgttgtttttaccatgcagtattgcatgattttaagttatgtggaattaacataactgattttgttttaattgtaagttgttaactcctgtatatatcattaaaataaatctgaagttgaagtagtgtttttagttaaattatacttagaaatagtctg

SEQ ID NO: 453843 - DNA, 2443 bp, Homo sapiens
atttgccttattctgtaagattgggcttagactcaccagtcacactgtctgtctgctgtagtctactgtattctgtagtctactgtattctgtgcactgtttaaactttctggcagctgcttacatcttttggatctagaagtaaaaaacaagatgatattcactgaattgaactatttacatatatgaaactacctcttaaagattagttttcctttttatatgcaagttttgtgaacttacagtattacattctttttcattcatgtatttaatatgtatgctttcttcagggacttagtcatgcattgagaaagcaagcatggaaatttcttctgggttattttccctgggacagtaccaaggaggaaagaacccaattacaaaagcaaaaaactgatgaatacttcagaatgaaactgcagtggaaatccatcagccaggaacaagagaaaagaaattcgaggttaagagattatagaagtcttatcgaaaaagatgttaacagaacagatcgaacaaacaagttttatgaaggccaagataatccagggttgattttacttcatgacattttgatgacctactgtatgtatgattttgatttaggatatgttcagggaatgagtgatttactttcccctcttttatatgtgatggaaaatgaagtggatgccttttggtgctttgcctcttacatggaccaaatgcatcagaattttgaagaacaaatgcaaggcatgaagacccagctaattcagctgagtaccttacttcgattgttagacagtggattttgcagttacttagaatctcaggactctggatacctttatttttgcttcaggtggcttttaatcagattcaaaagggaatttagttttctagatattcttcgattatgggaggtaatgtggaccgaactaccatgtacaaatttccatcttcttctctgttgtgctattctggaatcagaaaagcagcaaataatggaaaagcattatggcttcaatgaaatacttaagcatatcaatgaattgtccatgaaaattgatgtggaagatatactctgcaaggcagaagcaatttctctacagatggtaaaatgcaaggaattgccacaagcagtctgtgagatccttgggcttcaaggcagtgaagttacaacaccagattcagacgttggtgaagacgaaaatgttgtcatgactccttgtcctacatctgcatttcaaagtaatgccttgcctacactctctgccagtggagccagaaatgacagcccaacacagataccagtgtcctcagatgtctgcagattaacacctgcatgatcactgttcttgcttttttgggaagagacactttgttgcaaccctttttcaagtacttgaaagttgaaaatttgaaatcttggtattgatcatgctttaaggtttatgtaaagaaagtgtactgatgttcttacattaaagctttacaaagatttaaactaattatttttgtagttacttctaccaaatagcctttccttttcgataacattcctcagtatttttatagccaagtacattttattttcttgctgatgaactggaattggataaatattgcaagtggatgagttggaaattatgcactttgaaaaacattcactttgtttaagcttattgggtttcagatttgattaaattaaatgtggaggctttctatagcattctaagctgagaagtagattgttacccagtaatgaaataaaaaataaaaataaaaggatttttttctctattgtttacgacagtactcagcttaaatatttatgctggtcaaatgtgatttaaattggacattttcatcaatgcagtctaatgtgtagataaatatttcaaccataataagtggattggcagtatattttttacattgaacttttcttcacttgtatataaagattatatataagtacttatttatgagtataagaaaggttaggcatattttcattaactgaataaacgacttgatttatataacctggtttatcaaaatttaacatggcttcagtatgagatctttttcaaaactattttcttaaacatttatttcatgagattatgttcaaccctgtacctggtgtaattttaaaattaattgcttgtaacctcactttactaataatgtttattatctttcctaataatgcattaactgattaatcaggtgtttaaatttttataaaatactcttgcaaaaagtttatttgaaaaatttctagatggtctcatgagtttcaaaataataatttttgtgtatgaacaaagctgttgtttttaccatgcagtattgcatgattttaagttatgtggaattaacataactgattttgttttaattgtaagttgttaactcctgtatatatcattaaaataaatctgaagttgaa

SEQ ID NO: 453844 - DNA, 2209 bp, Homo sapiens
acgtcattaccaggcacgcgcaggaaacatggcggcggcgggtgttgtgagcgggaagattatatatgaacaagaaggagtatatattcactcatcttgtggaaagaccaatgaccaagacggcttgatttcaggaatattacgtgttttagaaaaggatgccgaagtaatagtggactggagaccattggatgatgcattagattcctctagtattctctatgctagaaaggactccagttcagttgtagaatggactcaggccccaaaagaaagaggtcatcgaggatcagaacatctgaacagttacgaagcagaatgggacatggttaatacagtttcatttaaaaggaaaccacataccaatggagatgctccaagtcatagaaatgggaaaagcaaatggtcattcctgttcagtttgacagacctgaaatcaatcaagcaaaacaaagagggtatgggctggtcctatttggtattctgtctaaaggatgacgtcgttctccctgctctacactttcatcaaggagatagcaaactactgattgaatctcttgaaaaatatgtggtattgtgtgaatctccacaggataaaagaacacttcttgtgaattgtcagaataagagtctttcacagtcttttgaaaatcttcttgatgagccagcatatggtttaatacaaaaaattaaaaaggacccttatacggcaactatgataggattttccaaagtcacaaactacatttttgacagtttgagaggcagcgatccctctacacatcaacgaccaccttcagaaatggcagattttcttagtgatgctattccaggtctaaagataaatcaacaagaagaaccaggatttgaagtcatcacaagaattgatttgggggaacgccctgttgttcaaaggagagaaccggtatcactggaagaatggactaagaacattgattctgaaggaagaattttaaatgtagataatatgaagcagatgatatttagagggggacttagtcatgcattgagaaagcaagcatggaaatttcttctgggttattttccctgggacagtaccaaggaggaaagaacccaattacaaaagcaaaaaactgatgaatacttcagaatgaaactgcagtggaaatccatcagccaggaacaagagaaaagaaattcgaggttaagagattatagaagtcttatcgaaaaagatgttaacagaacagatcgaacaaacaagttttatgaaggccaagataatccagggttgattttacttcatgacattttgatgacctactgtatgtatgattttgatttaggatatgttcagggaatgagtgatttactttcccctcttttatatgtgatggaaaatgaagtggatgccttttggtgctttgcctcttacatggaccaaatgcatcagaattttgaagaacaaatgcaaggcatgaagacccagctaattcagctgagtaccttacttcgattgttagacagtggattttgcagttacttagaatctcaggactctggatacctttatttttgcttcaggtggcttttaatcagattcaaaagggaatttagttttctagatattcttcgattatgggaggtaatgtggaccgaactaccatgtacaaatttccatcttcttctctgttgtgctattctggaatcagaaaagcagcaaataatggaaaagcattatggcttcaatgaaatacttaagcatatcaatgaattgtccatgaaaattgatgtggaagatatactctgcaaggcagaagcaatttctctacagatggtaaaatgcaaggaattgccacaagcagtctgtgagatccttgggcttcaaggcagtgaagttacaacaccagattcagacgttggtgaagacgaaaatgttgtcatgactccttgtcctacatctgcatttcaaagtaatgccttgcctacactctctgccagtggagccagaaatgacagcccaacacagataccagtgtcctcagatgtctgcagattaacacctgcatgatcactgttcttgcttttttgggaagagacactttgttgcaaccctttttcaagtacttgaaagttgaaaatttgaaatcttggtattgatcatgctttaaggtttatgtaaagaaagtgtactgatgttcttacattaaagctttacaaagattta

SEQ ID NO: 453845 - DNA, 2238 bp, Homo sapiens
ctttttggaagagtatttctattttaagttattcctcagacttgaaaggaaacacagaccaactttccagtgatgaatacttcagaatgaaactgcagtggaaatccatcagccaggaacaagagaaaagaaattcgaggttaagagattatagaagtcttatcgaaaaagatgttaacagaacagatcgaacaaacaagttttatgaaggccaagataatccagggttgattttacttcatgacattttgatgacctactgtatgtatgattttgatttagaaatttgttgtaagaactgatgccggggctgggtgcggaggctcacgcctgtaatcccagcacttcaggaagtcaaggcaggtggatcacctgaggacaggagttcaagaccagcctggccaacatggatatgttcagggaatgagtgatttactttcccctcttttatatgtgatggaaaatgaagtggatgccttttggtgctttgcctcttacatggaccaaatgcatcagaattttgaagaacaaatgcaaggcatgaagacccagctaattcagctgagtaccttacttcgattgttagacagtggattttgcagttacttagaatctcaggactctggatacctttatttttgcttcaggtggcttttaatcagattgtaatgtggaccgaactaccatgtacaaatttccatcttcttctctgttgtgctattctggaatcagaaaagcagcaaataatggaaaagcattatggcttcaatgaaatacttaagcatatcaatgaattgtccatgaaaattgatgtggaagatatactctgcaaggcagaagcaatttctctacagatggtaaaatgcaaggaattgccacaagcagtctgtgagatccttgggcttcaaggcagtgaagttacaacaccagattcagacgttggtgaagacgaaaatgttgtcatgactccttgtcctacatctgcatttcaaagtaatgccttgcctacactctctgccagtggagccagaaatgacagcccaacacagataccagtgtcctcagatgtctgcagattaacacctgcatgatcactgttcttgcttttttgggaagagacactttgttgcaaccctttttcaagtacttgaaagttgaaaatttgaaatcttggtattgatcatgctttaaggtttatgtaaagaaagtgtactgatgttcttacattaaagctttacaaagatttaaactaattatttttgtagttacttctaccaaatagcctttccttttcgataacattcctcagtatttttatagccaagtacattttattttcttgctgatgaactggaattggataaatattgcaagtggatgagttggaaattatgcactttgaaaaacattcactttgtttaagcttattgggtttcagatttgattaaattaaatgtggaggctttctatagcattctaagctgagaagtagattgttacccagtaatgaaataaaaaataaaaataaaaggatttttttctctattgtttacgacagtactcagcttaaatatttatgctggtcaaatgtgatttaaattggacattttcatcaatgcagtctaatgtgtagataaatatttcaaccataataagtggattggcagtatattttttacattgaacttttcttcacttgtatataaagattatatataagtacttatttatgagtataagaaaggttaggcatattttcattaactgaataaacgacttgatttatataacctggtttatcaaaatttaacatggcttcagtatgagatctttttcaaaactattttcttaaacatttatttcatgagattatgttcaaccctgtacctggtgtaattttaaaattaattgcttgtaacctcactttactaataatgtttattatctttcctaataatgcattaactgattaatcaggtgtttaaatttttataaaatactcttgcaaaaagtttatttgaaaaatttctagatggtctcatgagtttcaaaataataatttttgtgtatgaacaaagctgttgtttttaccatgcagtattgcatgattttaagttatgtggaattaacataactgattttgttttaattgtaagttgttaactcctgtatatatcattaaaataaatctgaagttgaagtagtgtttttagttaaattatacttagaaatagtctg

SEQ ID NO: 453846 - DNA, 2292 bp, Homo sapiens
acgtcattaccaggcacgcgcaggaaacatggcggcggcgggtgttgtgagcgggaagattatatatgaacaagaaggagtatatattcactcatcttgtggaaagaccaatgaccaagacggcttgatttcaggaatattacgtgttttagaaaaggatgccgaagtaatagtggactggagaccattggatgatgcattagattcctctagtattctctatgctagaaaggactccagttcagttgtagaatggactcaggccccaaaagaaagaggtcatcgaggatcagaacatctgaacagttacgaagcagaatgggacatggttaatacagtttcatttaaaaggaaaccacataccaatggagatgctccaagtcatagaaatgggaaaagcaaatggtcattcctgttcagtttgacagacctgaaatcaatcaagcaaaacaaagagggtatgggctggtcctatttggtattctgtctaaaggatgacgtcgttctccctgctctacactttcatcaaggagatagcaaactactgattgaatctcttgaaaaatatgtggtattgtgtgaatctccacaggataaaagaacacttcttgtgaattgtcagaataagagtctttcacagtcttttgaaaatcttcttgatgagccagcatatggtttaatacaaaaaattaaaaaggacccttatacggcaactatgataggattttccaaagtcacaaactacatttttgacagtttgagaggcagcgatccctctacacatcaacgaccaccttcagaaatggcagattttcttagtgatgctattccaggtctaaagataaatcaacaagaagaaccaggatttgaagtcatcacaagaattgatttgggggaacgccctgttgttcaaaggagagaaccggtatcactggaagaatggactaagaacattgattctgaaggaagaattttaaatgtagataatatgaagcagatgatatttagagggggacttagtcatgcattgagaaagcaagcatggaaatttcttctgggttattttccctgggacagtaccaaggaggaaagaacccaattacaaaagcaaaaaactgatgaatacttcagaatgaaactgcagtggaaatccatcagccaggaacaagagaaaagaaattcgaggttaagagattatagaagtcttatcgaaaaagatgttaacagaacagatcgaacaaacaagttttatgaaggccaagataatccagggttgattttacttcatgacattttgatgacctactgtatgtatgattttgatttaggatatgttcagggaatgagtgatttactttcccctcttttatatgtgatggaaaatgaagtggatgccttttggtgctttgcctcttacatggaccaaatgcatcagaattttgaagaacaaatgcaaggcatgaagacccagctaattcagctgagtaccttacttcgattgttagacagtggattttgcagttacttagaatctcaggactctggatacctttatttttgcttcaggtggcttttaatcagattcaaaagggaatttagttttctagatattcttcgattatgggaggtaatgtggaccgaactaccatgtacaaatttccatcttcttctctgttgtgctattctggaatcagaaaagcagcaaataatggaaaagcattatggcttcaatgaaatacttaagcatatcaatgaattgtccatgaaaattgatgtggaagatatactctgcaaggcagaagcaatttctctacagatggtaaaatgcaaggaattgccacaagcagtctgtgagatccttgggcttcaaggcagtgaagttacaacaccagattcagacgttggtgaagacgaaaatgttgtcatgactccttgtcctacatctgcatttcaaagtaatgccttgcctacactctctgccagtggagccagaaatgacagcccaacacagataccagtgtcctcagatgtctgcagattaacacctgcatgatcactgttcttgcttttttgggaagagacactttgttgcaaccctttttcaagtacttgaaagttgaaaatttgaaatcttggtatggctcagcgctgcgcgggcatacaactttctattctatgattaatatgtccaaaatctaactactcctcattggtccttggcagttttctatcttagtcatttgcagaaagagttccagcttgccaaaaccttttatatctaaaaggggggga

SEQ ID NO: 453847 - DNA, 1653 bp, Homo sapiens
aagagataaatgccaaatattaggacatgctatgtttgtgggaatgtggaggtgggatggagagtgactaatttggaagatatccaagaaccacttagggcgaaaggtggttagcatttcatttggagctgagaaaaatgttgtgagaagggtacatgacatttacactgttaggacaaatgctcagattctggaatcaatgtagtcttaaacagaagtgttactttgtggttatttttcctctgtagtgaaatatggttttgagtttgatttttcatatccaggaattgccacaagcagtctgtgagatccttgggcttcaaggcagtgaagttacaacaccagattcagacgttggtgaagacgaaaatgttgtcatgactccttgtcctacatctgcatttcaaagtaatgccttgcctacactctctgccagtggagccagaaatgacagcccaacacagataccagtgtcctcagatgtctgcagattaacacctgcatgatcactgttcttgcttttttgggaagagacactttgttgcaaccctttttcaagtacttgaaagttgaaaatttgaaatcttggtattgatcatgctttaaggtttatgtaaagaaagtgtactgatgttcttacattaaagctttacaaagatttaaactaattatttttgtagttacttctaccaaatagcctttccttttcgataacattcctcagtatttttatagccaagtacattttattttcttgctgatgaactggaattggataaatattgcaagtggatgagttggaaattatgcactttgaaaaacattcactttgtttaagcttattgggtttcagatttgattaaattaaatgtggaggctttctatagcattctaagctgagaagtagattgttacccagtaatgaaataaaaaataaaaataaaaggatttttttctctattgtttacgacagtactcagcttaaatatttatgctggtcaaatgtgatttaaattggacattttcatcaatgcagtctaatgtgtagataaatatttcaaccataataagtggattggcagtatattttttacattgaacttttcttcacttgtatataaagattatatataagtacttatttatgagtataagaaaggttaggcatattttcattaactgaataaacgacttgatttatataacctggtttatcaaaatttaacatggcttcagtatgagatctttttcaaaactattttcttaaacatttatttcatgagattatgttcaaccctgtacctggtgtaattttaaaattaattgcttgtaacctcactttactaataatgtttattatctttcctaataatgcattaactgattaatcaggtgtttaaatttttataaaatactcttgcaaaaagtttatttgaaaaatttctagatggtctcatgagtttcaaaataataatttttgtgtatgaacaaagctgttgtttttaccatgcagtattgcatgattttaagttatgtggaattaacataactgattttgttttaattgtaagttgttaactcctgtatatatcattaaaataaatctgaagttgaagtagtgtttttagttaaattatacttagaaatagtctg

SEQ ID NO: 453848 - DNA, 1737 bp, Homo sapiens
acgtcattaccaggcacgcgcaggaaacatggcggcggcgggtgttgtgagcgggaaggtaggtaacggcctccaggaagacctcggcttttctctgggacggggatgcttttgctccctggcagctggttgggggagggacacgagggactttctgtgtccggacaacccgtggcgtccgtaggagaagactgggtggtaccagctggtttcccgagaatgccagttcagccgcggagttatagagccggctactgctccaaggccagctaggcctcggcgctcttctgccccagagcagagaggcttttattcgtattacctttactaagggacaggtggctctctagttccttttttcccccgattcactgtttcttgactctagttctttatgtctactcttctgactccaacgtcttttctctctttgaagcgttaacccgacttgcctctgtcttctttgctacagtttggtgaagatgtttatgcttccttcgggaggagctgaataggtgctaggcagctagctgtgcgcttagaagaaacgagtgtattgggtctgtttttaccaagctgctgagttggttggtggttgtgagcagcaggacgtgtttcctgagagaaatggagatttacaccatcctgtgcttgtctaggaaggcgtccaaatatttatttcctaggcatttcagtaggagtattggtcatgctggtttacggaggtggtcagtgacacgcctaatttcgttggaaactagaattacgtgcggagatttcgtcgaatagtgcctattcgcgttccgagggcacatcttatgcatagttagggctatcagctttatgatatgccaccgatagtatttcccagtgcaggagtatttcataaacagctggaatcaactgaagtgactcatcgaacactaatggttgtttactcattgcagatagcgtcctctgttccttgagtttcactcatgtctccctgttgctttccctaccccattttgaattatttgacagcgtttgtggtttggtgtttggagtattagactaggcggctgaatgacaaatatgggcttggttttgctgttaatctgaagtatgaccttggaaaattgggcaattgtgacttttgtcttttcgcgttctttatctgtagaatggaggagatgccaatcattatttcttgtattggagttgttagggttatataaatttttttttaaataaacataaaattacacacttgtacctactggctcttttaaaggataggtgggcatccttttttggattattcgtgctccttggttgtcttgtcagtttttttctttttatattcagggtggatgctgatatactgcttgacttactgcgtatttgaagattatcctgtttgattttccatctaaactgatccaggctgggacttttcaagaggggatcccttccgtttaaacatctccctctttcaggtttggattgattttgaaagaatccttgaggcaacgaagcagagttgtgaaatgaaaaacatttttcactctttgcagccactacctttcatagtctgacttcttaaagtgagacttatatttagtaattctgcttcataacctcatttattctcattcactgcaaattcacatctattgccatcactccactgaaactagttttccatgccaaaagctgctcctctcccaagtaatactatcatgaccaacaaaacca

SEQ ID NO: 453849 - DNA, 3162 bp, Homo sapiens
acgtcattaccaggcacgcgcaggaaacatggcggcggcgggtgttgtgagcgggaagattatatatgaacaagaaggagtatatattcactcatcttgtggaaagaccaatgaccaagacggcttgatttcaggaatattacgtgttttagaaaaggatgccgaagtaatagtggactggagaccattggatgatgcattagattcctctagtattctctatgctagaaaggactccagttcagttgtagaatggactcaggccccaaaagaaagaggtcatcgaggatcagaacatctgaacagttacgaagcagaatgggacatggttaatacagtttcatttaaaaggaaaccacataccaatggagatgctccaagtcatagaaatgggaaaagcaaatggtcattcctgttcagtttgacagacctgaaatcaatcaagcaaaacaaagagggtatgggctggtcctatttggtattctgtctaaaggatgacgtcgttctccctgctctacactttcatcaaggagatagcaaactactgattgaatctcttgaaaaatatgtggtattgtgtgaatctccacaggataaaagaacacttcttgtgaattgtcagaataagagtctttcacagtcttttgaaaatcttcttgatgagccagcatatggtttaatacaaaaaattaaaaaggacccttatacggcaactatgataggattttccaaagtcacaaactacatttttgacagtttgagaggcagcgatccctctacacatcaacgaccaccttcagaaatggcagattttcttagtgatgctattccaggtctaaagataaatcaacaagaagaaccaggatttgaagtcatcacaagaattgatttgggggaacgccctgttgttcaaaggagagaaccggtatcactggaagaatggactaagaacattgattctgaaggaagaattttaaatgtagataatatgaagcagatgatatttagagggggacttagtcatgcattgagaaagcaagcatggaaatttcttctgggttattttccctgggacagtaccaaggaggaaagaacccaattacaaaagcaaaaaactgatgaatacttcagaatgaaactgcagtggaaatccatcagccaggaacaagagaaaagaaattcgaggttaagagattatagaagtcttatcgaaaaagatgttaacagaacagatcgaacaaacaagttttatgaaggccaagataatccagggttgattttacttcatgacattttgatgacctactgtatgtatgattttgatttaggatatgttcagggaatgagtgatttactttcccctcttttatatgtgatggaaaatgaagtggatgccttttggtgctttgcctcttacatggaccaaatgcatcagaattttgaagaacaaatgcaaggcatgaagacccagctaattcagctgagtaccttacttcgattgttagacagtggattttgcagttacttagaatctcaggactctggatacctttatttttgcttcaggtggcttttaatcagattcaaaagggaatttagttttctagatattcttcgattatgggaggtaatgtggaccgaactaccatgtacaaatttccatcttcttctctgttgtgctattctggaatcagaaaagcagcaaataatggaaaagcattatggcttcaatgaaatacttaagcatatcaatgaattgtccatgaaaattgatgtggaagatatactctgcaaggcagaagcaatttctctacagatggtaaaatgcaaggaattgccacaagcagtctgtgagatccttgggcttcaaggcagtgaagttacaacaccagattcagacgttggtgaagacgaaaatgttgtcatgactccttgtcctacatctgcatttcaaagtaatgccttgcctacactctctgccagtggagccagaaatgacagcccaacacagataccagtgtcctcagatgtctgcagattaacacctgcatgatcactgttcttgcttttttgggaagagacactttgttgcaaccctttttcaagtacttgaaagttgaaaatttgaaatcttggtattgatcatgctttaaggtttatgtaaagaaagtgtactgatgttcttacattaaagctttacaaagatttaaactaattatttttgtagttacttctaccaaatagcctttccttttcgataacattcctcagtatttttatagccaagtacattttattttcttgctgatgaactggaattggataaatattgcaagtggatgagttggaaattatgcactttgaaaaacattcactttgtttaagcttattgggtttcagatttgattaaattaaatgtggaggctttctatagcattctaagctgagaagtagattgttacccagtaatgaaataaaaaataaaaataaaaggatttttttctctattgtttacgacagtactcagcttaaatatttatgctggtcaaatgtgatttaaattggacattttcatcaatgcagtctaatgtgtagataaatatttcaaccataataagtggattggcagtatattttttacattgaacttttcttcacttgtatataaagattatatataagtacttatttatgagtataagaaaggttaggcatattttcattaactgaataaacgacttgatttatataacctggtttatcaaaatttaacatggcttcagtatgagatctttttcaaaactattttcttaaacatttatttcatgagattatgttcaaccctgtacctggtgtaattttaaaattaattgcttgtaacctcactttactaataatgtttattatctttcctaataatgcattaactgattaatcaggtgtttaaatttttataaaatactcttgcaaaaagtttatttgaaaaatttctagatggtctcatgagtttcaaaataataatttttgtgtatgaacaaagctgttgtttttaccatgcagtattgcatgattttaagttatgtggaattaacataactgattttgttttaattgtaagttgttaactcctgtatatatcattaaaataaatctgaagttgaa

SEQ ID NO: 453850 - DNA, 2951 bp, Homo sapiens
acgtcattaccaggcacgcgcaggaaacatggcggcggcgggtgttgtgagcgggaagattatatatgaacaagaaggagtatatattcactcatcttgtggaaagaccaatgaccaagacggcttgatttcaggaatattacgtgttttagaaaaggatgccgaagtaatagtggactggagaccattggatgatgcattagattcctctagtattctctatgctagaaaggactccagttcagttgtagaatggactcaggccccaaaagaaagaggtcatcgaggatcagaacatctgaacagttacgaagcagaatgggacatggttaatacagtttcatttaaaaggaaaccacataccaatggagatctccacaggataaaagaacacttcttgtgaattgtcagaataagagtctttcacagtcttttgaaaatcttcttgatgagccagcatatggtttaatacaaaaaattaaaaaggacccttatacggcaactatgataggattttccaaagtcacaaactacatttttgacagtttgagaggcagcgatccctctacacatcaacgaccaccttcagaaatggcagattttcttagtgatgctattccaggtctaaagataaatcaacaagaagaaccaggatttgaagtcatcacaagaattgatttgggggaacgccctgttgttcaaaggagagaaccggtatcactggaagaatggactaagaacattgattctgaaggaagaattttaaatgtagataatatgaagcagatgatatttagagggggacttagtcatgcattgagaaagcaagcatggaaatttcttctgggttattttccctgggacagtaccaaggaggaaagaacccaattacaaaagcaaaaaactgatgaatacttcagaatgaaactgcagtggaaatccatcagccaggaacaagagaaaagaaattcgaggttaagagattatagaagtcttatcgaaaaagatgttaacagaacagatcgaacaaacaagttttatgaaggccaagataatccagggttgattttacttcatgacattttgatgacctactgtatgtatgattttgatttaggatatgttcagggaatgagtgatttactttcccctcttttatatgtgatggaaaatgaagtggatgccttttggtgctttgcctcttacatggaccaaatgcatcagaattttgaagaacaaatgcaaggcatgaagacccagctaattcagctgagtaccttacttcgattgttagacagtggattttgcagttacttagaatctcaggactctggatacctttatttttgcttcaggtggcttttaatcagattcaaaagggaatttagttttctagatattcttcgattatgggaggtaatgtggaccgaactaccatgtacaaatttccatcttcttctctgttgtgctattctggaatcagaaaagcagcaaataatggaaaagcattatggcttcaatgaaatacttaagcatatcaatgaattgtccatgaaaattgatgtggaagatatactctgcaaggcagaagcaatttctctacagatggtaaaatgcaaggaattgccacaagcagtctgtgagatccttgggcttcaaggcagtgaagttacaacaccagattcagacgttggtgaagacgaaaatgttgtcatgactccttgtcctacatctgcatttcaaagtaatgccttgcctacactctctgccagtggagccagaaatgacagcccaacacagataccagtgtcctcagatgtctgcagattaacacctgcatgatcactgttcttgcttttttgggaagagacactttgttgcaaccctttttcaagtacttgaaagttgaaaatttgaaatcttggtattgatcatgctttaaggtttatgtaaagaaagtgtactgatgttcttacattaaagctttacaaagatttaaactaattatttttgtagttacttctaccaaatagcctttccttttcgataacattcctcagtatttttatagccaagtacattttattttcttgctgatgaactggaattggataaatattgcaagtggatgagttggaaattatgcactttgaaaaacattcactttgtttaagcttattgggtttcagatttgattaaattaaatgtggaggctttctatagcattctaagctgagaagtagattgttacccagtaatgaaataaaaaataaaaataaaaggatttttttctctattgtttacgacagtactcagcttaaatatttatgctggtcaaatgtgatttaaattggacattttcatcaatgcagtctaatgtgtagataaatatttcaaccataataagtggattggcagtatattttttacattgaacttttcttcacttgtatataaagattatatataagtacttatttatgagtataagaaaggttaggcatattttcattaactgaataaacgacttgatttatataacctggtttatcaaaatttaacatggcttcagtatgagatctttttcaaaactattttcttaaacatttatttcatgagattatgttcaaccctgtacctggtgtaattttaaaattaattgcttgtaacctcactttactaataatgtttattatctttcctaataatgcattaactgattaatcaggtgtttaaatttttataaaatactcttgcaaaaagtttatttgaaaaatttctagatggtctcatgagtttcaaaataataatttttgtgtatgaacaaagctgttgtttttaccatgcagtattgcatgattttaagttatgtggaattaacataactgattttgttttaattgtaagttgttaactcctgtatatatcattaaaataaatctgaagttgaa

SEQ ID NO: 453851 - DNA, 3146 bp, Homo sapiens
acgtcattaccaggcacgcgcaggaaacatggcggcggcgggtgttgtgagcgggaagattatatatgaacaagaaggagtatatattcactcatcttgtggaaagaccaatgaccaagacggcttgatttcaggaatattacgtgttttagaaaaggatgccgaagtaatagtggactggagaccattggatgatgcattagattcctctagtattctctatgctagaaaggactccagttcagttgtagaatggactcaggccccaaaagaaagaggtcatcgaggatcagaacatctgaacagttacgaagcagaatgggacatggttaatacagtttcatttaaaaggaaaccacataccaatggagatgctccaagtcatagaaatgggaaaagcaaatggtcattcctgttcagtttgacagacctgaaatcaatcaagcaaaacaaagagggtatgggctggtcctatttggtattctgtctaaaggatgacgtcgttctccctgctctacactttcatcaaggagatagcaaactactgattgaatctcttgaaaaatatgtggtattgtgtgaatctccacaggataaaagaacacttcttgtgaattgtcagaataagagtctttcacagtcttttgaaaatcttcttgatgagccagcatatggtttaatacaaaaaattaaaaaggacccttatacggcaactatgataggattttccaaagtcacaaactacatttttgacagtttgagaggcagcgatccctctacacatcaacgaccaccttcagaaatggcagattttcttagtgatgctattccaggtctaaagataaatcaacaagaagaaccaggatttgaagtcatcacaagaattgatttgggggaacgccctgttgttcaaaggagagaaccggtatcactggaagaatggactaagaacattgattctgaaggaagaattttaaatgtagataatatgaagcagatgatatttagagggggacttagtcatgcattgagaaagcaagcatggaaatttcttctgggttattttccctgggacagtaccaaggaggaaagaacccaattacaaaagcaaaaaactgatgaatacttcagaatgaaactgcagtggaaatccatcagccaggaacaagagaaaagaaattcgaggttaagagattatagaagtcttatcgaaaaagatgttaacagaacagatcgaacaaacaagttttatgaaggccaagataatccagggttgattttacttcatgacattttgatgacctactgtatgtatgattttgatttaggatatgttcagggaatgagtgatttactttcccctcttttatatgtgatggaaaatgaagtggatgccttttggtgctttgcctcttacatggaccaaatgcatcagaattttgaagaacaaatgcaaggcatgaagacccagctaattcagctgagtaccttacttcgattgttagacagtggattttgcagttacttagaatctcaggactctggatacctttatttttgcttcaggtggcttttaatcagattcaaaagggaatttagttttctagatattcttcgattatgggaggtaatgtggaccgaactaccatgtacaaatttccatcttcttctctgttgtgctattctggaatcagaaaagcagcaaataatggaaaagcattatggcttcaatgaaatacttaagcatatcaatgaattgtccatgaaaattgatgtggaagatatactctgcaaggcagaagcaatttctctacagatggtaaaatgcaaggaattgccacaagcagtctgtgagatccttgggcttcaaggcagtgaagttacaacaccagattcagacgttggtgaagacgctacactctctgccagtggagccagaaatgacagcccaacacagataccagtgtcctcagatgtctgcagattaacacctgcatgatcactgttcttgcttttttgggaagagacactttgttgcaaccctttttcaagtacttgaaagttgaaaatttgaaatcttggtattgatcatgctttaaggtttatgtaaagaaagtgtactgatgttcttacattaaagctttacaaagatttaaactaattatttttgtagttacttctaccaaatagcctttccttttcgataacattcctcagtatttttatagccaagtacattttattttcttgctgatgaactggaattggataaatattgcaagtggatgagttggaaattatgcactttgaaaaacattcactttgtttaagcttattgggtttcagatttgattaaattaaatgtggaggctttctatagcattctaagctgagaagtagattgttacccagtaatgaaataaaaaataaaaataaaaggatttttttctctattgtttacgacagtactcagcttaaatatttatgctggtcaaatgtgatttaaattggacattttcatcaatgcagtctaatgtgtagataaatatttcaaccataataagtggattggcagtatattttttacattgaacttttcttcacttgtatataaagattatatataagtacttatttatgagtataagaaaggttaggcatattttcattaactgaataaacgacttgatttatataacctggtttatcaaaatttaacatggcttcagtatgagatctttttcaaaactattttcttaaacatttatttcatgagattatgttcaaccctgtacctggtgtaattttaaaattaattgcttgtaacctcactttactaataatgtttattatctttcctaataatgcattaactgattaatcaggtgtttaaatttttataaaatactcttgcaaaaagtttatttgaaaaatttctagatggtctcatgagtttcaaaataataatttttgtgtatgaacaaagctgttgtttttaccatgcagtattgcatgattttaagttatgtggaattaacataactgattttgttttaattgtaagttgttaactcctgtatatatcattaaaataaatctgaagttgaagtagtgtttttagttaaattatacttagaaatagtctg

SEQ ID NO: 453852 - DNA, 1959 bp, Homo sapiens
acgtcattaccaggcacgcgcaggaaacatggcggcggcgggtgttgtgagcgggaagattatatatgaacaagaaggagtatatattcactcatcttgtggaaagaccaatgaccaagacggcttgatttcaggaatattacgtgttttagaaaaggatgccgaagtaatagtggactggagaccattggatgatgcattagattcctctagtattctctatgctagaaaggactccagttcagttgtagaatggactcaggccccaaaagaaagaggtcatcgaggatcagaacatctgaacagttacgaagcagaatgggacatggttaatacagtttcatttaaaaggaaaccacataccaatggagatgctccaagtcatagaaatgggaaaagcaaatggtcattcctgttcagtttgacagacctgaaatcaatcaagcaaaacaaagagggtatgggctggtcctatttggtattctgtctaaaggatgacgtcgttctccctgctctacactttcatcaaggagatagcaaactactgattgaatctcttgaaaaatatgtggtattgtgtgaatctccacaggataaaagaacacttcttgtgaattgtcagaataagagtctttcacagtcttttgaaaatcttcttgatgagccagcatatggtttaatacaaaaaattaaaaaggacccttatacggcaactatgataggattttccaaagtcacaaactacatttttgacagtttgagaggcagcgatccctctacacatcaacgaccaccttcagaaatggcagattttcttagtgatgctattccaggtctaaagataaatcaacaagaagaaccaggatttgaagtcatcacaagaattgatttgggggaacgccctgttgttcaaaggagagaaccggtatcactggaagaatggactaagaacattgattctgaaggaagaattttaaatgtagataatatgaagcagatgatatttagagggggacttagtcatgcattgagaaagcaagcatggaaatttcttctgggttattttccctgggacagtaccaaggaggaaagaacccaattacaaaagcaaaaaactgatgaatacttcagaatgaaactgcagtggaaatccatcagccaggaacaagagaaaagaaattcgaggttaagagattatagaagtcttatcgaaaaagatgttaacagaacagatcgaacaaacaagttttatgaaggccaagataatccagggttgattttacttcatgacattttgatgacctactgtatgtatgattttgatttaggatatgttcagggaatgagtgatttactttcccctcttttatatgtgatggaaaatgaagtggatgccttttggtgctttgcctcttacatggaccaaatgcatcagaattttgaagaacaaatgcaaggcatgaagacccagctaattcagctgagtaccttacttcgattgttagacagtggattttgcagttacttagaatctcaggactctggatacctttatttttgcttcaggtggcttttaatcagattcaaaagggaatttagttttctagatattcttcgattatgggaggtaatgtggaccgaactaccatgtacaaatttccatcttcttctctgttgtgctattctggaatcagaaaagcagcaaataatggaaaagcattatggcttcaatgaaatacttaagcatatcaatgaattgtccatgaaaattgatgtggaagatatactctgcaaggcagaagcaatttctctacagatggtaaaatgcaaggtatacagtgtttcaagtaattgcaagatttgtttgtttttggtgggttgagatcaagaaagatttttcttcttggaaataaaatagcaactttagtaagctgagggcaggcacaaagtattggctgg

SEQ ID NO: 453853 - DNA, 1298 bp, Homo sapiens
gattcaagtgctggctttgcgtccgcttccccatccacttactagcgcaggagaaggctatctcggtccccagagaagcctggacccacacgcgggctagatccagagaacctgacgacccggcgacggcgacgtctcttttgactaaaagacagtgtccagtgctccagcctaggagtctacggggaccgcctcccgcgccgccaccatgcccaacttctctggcaactggaaaatcatccgatcggaaaacttcgaggaattgctcaaagtgctgggggtgaatgtgatgctgaggaagattgctgtggctgcagcgtccaagccagcagtggagatcaaacaggagggagacactttctacatcaaaacctccaccaccgtgcgcaccacagagattaacttcaaggttggggaggagtttgaggagcagactgtggatgggaggccctgtaagagcctggtgaaatgggagagtgagaataaaatggtctgtgagcagaagctcctgaagggagagggccccaagacctcgtggaccagagaactgaccaacgatggggaactgatcctgaccatgacggcggatgacgttgtgtgcaccagggtctacgtccgagagtgagtggccacaggtagaaccgcggccgaagcccaccactggccatgctcaccgccctgcttcactgccccctccgtcccaccccctccttctaggatagcgctccccttaccccagtcacttctgggggtcactgggatgcctcttgcagggtcttgctttctttgacctcttctctcctcccctacaccaacaaagaggaatggctgcaagagcccagatcacccattccgggttcactccccgcctccccaagtcagcagtcctagccccaaaccagcccagagcagggtctctctaaaggggacttgagggcctgagcaggaaagactggccctctagcttctaccctttgtccctgtagcctatacagtttagaatatttatttgttaattttattaaaatgctttaaaaaaataaaacctgtctctggctcattgggcaggtagataagtcacctgagttcaaccttgcctctgaaatgtagtatgggaaagacttgtgtttctgcagcatggaactgagttatacaacaggagaggacagtccttccagtcaccgttctaaccaccaccccttcgtttgctgctgaatccacaagcctcacctccacattcccttctccaaggtccttccttggtgtcctgctctggcttccaaggtcacaagggcctc

SEQ ID NO: 453854 - DNA, 1224 bp, Homo sapiens
atatggcagtgaggaggctgggggtaatcggacgagggtccagagaagctggacccacacgcgggctagatccagagacagtgtccagtgctccagcctaggagtctacggggaccgcctcccgcgccgccaccatgcccaacttctctggcaactggaaaatcatccgatcggaaaacttcgaggaattgctcaaagtgctgggggtgaatgtgatgctgaggaagattgctgtggctgcagcgtccaagccagcagtggagatcaaacaggagggagacactttctacatcaaaacctccaccaccgtgcgcaccacagagattaacttcaaggttggggaggagtttgaggagcagactgtggatgggaggccctgtaagagcctggtgaaatgggagagtgagaataaaatggtctgtgagcagaagctcctgaagggagagggccccaagacctcgtggaccagagaactgaccaacgatggggaactgatcctgaccatgacggcggatgacgttgtgtgcaccagggtctacgtccgagagtgagtggccacaggtagaaccgcggccgaagcccaccactggccatgctcaccgccctgcttcactgccccctccgtcccaccccctccttctaggatagcgctccccttaccccagtcacttctgggggtcactgggatgcctcttgcagggtcttgctttctttgacctcttctctcctcccctacaccaacaaagaggaatggctgcaagagcccagatcacccattccgggttcactccccgcctccccaagtcagcagtcctagccccaaaccagcccagagcagggtctctctaaaggggacttgagggcctgagcaggaaagactggccctctagcttctaccctttgtccctgtagcctatacagtttagaatatttatttgttaattttattaaaatgctttaaaaaaataaaacctgtctctggctcattgggcaggtagataagtcacctgagttcaaccttgcctctgaaatgtagtatgggaaagacttgtgtttctgcagcatggaactgagttatacaacaggagaggacagtccttccagtcaccgttctaaccaccaccccttcgtttgctgctgaatccacaagcctcacctccacattcccttctccaaggtccttccttggtgtcctgctctggcttccaaggtcacaagggcctc

SEQ ID NO: 453855 - DNA, 727 bp, Homo sapiens
  misc_feature (19)..(19): n is a, c, g, or t
  misc_feature (63)..(63): n is a, c, g, or t
gtttggaaaggttgggggncccccaaacccaaggggggttaaagggaaaaaccccccccggcncccgggggcccgaaaaaagcccaccactggccatgctcaccgccctgcttcactgccccctccgtcccaccccctccttctaggatagcgctccccttaccccagtcacttctgggggtcactgggatgcctcttgcagggtcttgctttctttgacctcttctctcctcccctacaccaacaaagaggaatggctgcaagagcccagatcacccattccgggttcactccccgcctccccaagtcagcagtcctagccccaaaccagcccagagcagggtctctctaaaggggacttgagggcctgagcaggaaagactggccctctagcttctaccctttgtccctgtagcctatacagtttagaatatttatttgttaattttattaaaatgctttaaaaaaataaaacctgtctctggctcattgggcaggtagataagtcacctgagttcaaccttgcctctgaaatgtagtatgggaaagacttgtgtttctgcagcatggaactgagttatacaacaggagaggacagtccttccagtcaccgttctaaccaccaccccttcgtttgctgctgaatccacaagcctcacctccacattcccttctccaaggtccttccttggtgtcctgctctggcttccaaggtcacaagggcctc

SEQ ID NO: 453856 - DNA, 1249 bp, Homo sapiens
tgtccgcgcgggagcccaggccagctttggggttgtccctggacttgtcttggttccagaacctgacgacccggcgacggcgacgtctcttttgactaaaagacagtgtccagtgctccagcctaggagtctacggggaccgcctcccgcgccgccaccatgcccaacttctctggcaactggaaaatcatccgatcggaaaacttcgaggaattgctcaaagtgctgggggtgaatgtgatgctgaggaagattgctgtggctgcagcgtccaagccagcagtggagatcaaacaggagggagacactttctacatcaaaacctccaccaccgtgcgcaccacagagattaacttcaaggttggggaggagtttgaggagcagactgtggatgggaggccctgtaagagcctggtgaaatgggagagtgagaataaaatggtctgtgagcagaagctcctgaagggagagggccccaagacctcgtggaccagagaactgaccaacgatggggaactgatcctgaccatgacggcggatgacgttgtgtgcaccagggtctacgtccgagagtgagtggccacaggtagaaccgcggccgaagcccaccactggccatgctcaccgccctgcttcactgccccctccgtcccaccccctccttctaggatagcgctccccttaccccagtcacttctgggggtcactgggatgcctcttgcagggtcttgctttctttgacctcttctctcctcccctacaccaacaaagaggaatggctgcaagagcccagatcacccattccgggttcactccccgcctccccaagtcagcagtcctagccccaaaccagcccagagcagggtctctctaaaggggacttgagggcctgagcaggaaagactggccctctagcttctaccctttgtccctgtagcctatacagtttagaatatttatttgttaattttattaaaatgctttaaaaaaataaaacctgtctctggctcattgggcaggtagataagtcacctgagttcaaccttgcctctgaaatgtagtatgggaaagacttgtgtttctgcagcatggaactgagttatacaacaggagaggacagtccttccagtcaccgttctaaccaccaccccttcgtttgctgctgaatccacaagcctcacctccacattcccttctccaaggtccttccttggtgtcctgctctggcttccaaggtcacaagggcctc

SEQ ID NO: 453857 - DNA, 1222 bp, Homo sapiens
gcccaccccaagccggtttcacaaactccgtttcttaccgtaaggtttctcccctctcgccgctcgggcaagctgatcacaggtgtgtcgggagcctaggagtctacggggaccgcctcccgcgccgccaccatgcccaacttctctggcaactggaaaatcatccgatcggaaaacttcgaggaattgctcaaagtgctgggggtgaatgtgatgctgaggaagattgctgtggctgcagcgtccaagccagcagtggagatcaaacaggagggagacactttctacatcaaaacctccaccaccgtgcgcaccacagagattaacttcaaggttggggaggagtttgaggagcagactgtggatgggaggccctgtaagagcctggtgaaatgggagagtgagaataaaatggtctgtgagcagaagctcctgaagggagagggccccaagacctcgtggaccagagaactgaccaacgatggggaactgatcctgaccatgacggcggatgacgttgtgtgcaccagggtctacgtccgagagtgagtggccacaggtagaaccgcggccgaagcccaccactggccatgctcaccgccctgcttcactgccccctccgtcccaccccctccttctaggatagcgctccccttaccccagtcacttctgggggtcactgggatgcctcttgcagggtcttgctttctttgacctcttctctcctcccctacaccaacaaagaggaatggctgcaagagcccagatcacccattccgggttcactccccgcctccccaagtcagcagtcctagccccaaaccagcccagagcagggtctctctaaaggggacttgagggcctgagcaggaaagactggccctctagcttctaccctttgtccctgtagcctatacagtttagaatatttatttgttaattttattaaaatgctttaaaaaaataaaacctgtctctggctcattgggcaggtagataagtcacctgagttcaaccttgcctctgaaatgtagtatgggaaagacttgtgtttctgcagcatggaactgagttatacaacaggagaggacagtccttccagtcaccgttctaaccaccaccccttcgtttgctgctgaatccacaagcctcacctccacattcccttctccaaggtccttccttggtgtcctgctctggcttccaaggtcacaagggcctc

SEQ ID NO: 453858 - DNA, 1069 bp, Homo sapiens
tgtccgcgcgggagcccaggccagctttggggttgtccctggacttgtcttggttccagaacctgacgacccggcgacggcgacgtctcttttgactaaaagacagtgtccagtgctccagcctaggagtctacggggaccgcctcccgcgccgccaccatgcccaacttctctggcaactggaaaatcatccgatcggaaaacttcgaggaattgctcaaagtgctgggggtgaatgtgatgctgaggaagattgctgtggctgcagcgtccaagccagcagtggagatcaaacaggagggagacactttctacatcaaaacctccaccaccgtgcgcaccacagagattaacttcaaggttggggaggagtttgaggagcagactgtggatgggaggccctgtaagagcctggtgaaatgggagagtgagaataaaatggtctgtgagcagaagctcctgaagggagagggccccaagacctctaggatagcgctccccttaccccagtcacttctgggggtcactgggatgcctcttgcagggtcttgctttctttgacctcttctctcctcccctacaccaacaaagaggaatggctgcaagagcccagatcacccattccgggttcactccccgcctccccaagtcagcagtcctagccccaaaccagcccagagcagggtctctctaaaggggacttgagggcctgagcaggaaagactggccctctagcttctaccctttgtccctgtagcctatacagtttagaatatttatttgttaattttattaaaatgctttaaaaaaataaaacctgtctctggctcattgggcaggtagataagtcacctgagttcaaccttgcctctgaaatgtagtatgggaaagacttgtgtttctgcagcatggaactgagttatacaacaggagaggacagtccttccagtcaccgttctaaccaccaccccttcgtttgctgctgaatccacaagcctcacctccacattcccttctccaaggtccttccttggtgtcctgctctggcttccaaggtcacaagggcctc

SEQ ID NO: 453859 - DNA, 833 bp, Homo sapiens
  misc_feature (636)..(636): n is a, c, g, or t
tgtccgcgcgggagcccaggccagctttggggttgtccctggacttgtcttggttccagaacctgacgacccggcgacggcgacgtctcttttgactaaaagacagtgtccagtgctccagcctaggagtctacggggaccgcctcccgcgccgccaccatgcccaacttctctggcaactggaaaatcatccgatcggaaaacttcgaggaattgctcaaagtgctgggggtgaatgtgatgctgaggaagattgctgtggctgcagcgtccaagccagcagtggagatcaaacaggagggagacactttctacatcaaaacctccaccaccgtgcgcaccacagagattaacttcaaggttggggaggagtttgaggagcagactgtggatgggaggccctgtaagagcctggtgaaatgggagagtgagaataaaatggtctgtgagcagaagctcctgaagggagagggccccaagacctcgtggaccagagaactgaccaacgatggggaactgatcctgaccatgacggcggatgacgttgtgtgcaccagggtctacgtccgagagtgagtggccacaggtagaaccgcggccgaagcccaccactggccatgctcaccgccctatggncgcaaccagcaaccaacccacacaaacgaggcacagcgcacacctcagccaagagaagaacgccaagacaacgacaacgccatgcacgaacagacaacacgaccacccacacatcaccgcaagcaacaacgagaacggcgaaaaaccagaataaccacccgagacaacaccagagacacaaaaacaaaaagcccacg

SEQ ID NO: 453860 - DNA, 676 bp, Homo sapiens
ccaggcacgaccgtacgttctgactgtggataaatcggatgcggtgccccccccatcccattcttctcggcttactgctgcctgcctttggcatccttgtctacttggaattctgaatgtgttgtgacagctgctgttcccatcccagctcagaagacacccttcaaccctgggatgaccacaattccttccaatttctgcggctccatcctaagccaaataaattatactttaacaaactattcaactgatttacaacacacatgatgactgaggcattcgggaaccccttcatccaaaagaataaacttttaaatggatataaatgatttttaactcgttccaatatgccttataaaccacttaacctgattctgtgacagttgcatgatttaacccaatgggacaagttacagtgttcaattcaatactataggctgtagagtgaaagtcaaatcaccatatacaggtgctttaaatttaataacaagttgtgaaatataatagagattgaaatgttggttgtatgtggtaaatgtaagagtaatacagtctcttgtactttcctcactgttttgggtactgcatattattgaatggcccctatcattcatgacatcttgagttttcttgaaaagacaatagagtgtaacaaatattttgtcagaaatcccat

SEQ ID NO: 453861 - DNA, 3789 bp, Homo sapiens
agaggcgtattgtggtataactgttgctgtatttattcaaatggacaatttgcaatagatattatacccaggacgacagataagtcaacacataaggtgtttaaaattatccaactgccatagagctaaattcttttttggaaaattgaaccgaacttctactgaatacaagatgaaaatgtggttgctggtcagtcatcttgtgataatatctattactacctgtttagcagagtttacatggtatagaagatatggtcatggagtttctgaggaagacaaaggatttggaccaatttttgaagagcagccaatcaataccatttatccagaggaatcactggaaggaaaagtctcactcaactgtagggcacgagccagccctttcccggtttacaaatggagaatgaataatggggacgttgatctcacaagtgatcgatacagtatggtaggaggaaaccttgttatcaacaaccctgacaaacagaaagatgctggaatatactactgtttagcatctaataactacgggatggtcagaagcactgaagcaaccctgagctttggatatcttgatcctttcccacctgaggaacgtcctgaggtcagagtaaaagaagggaaaggaatggtgcttctctgtgaccccccataccattttccagatgatcttagctatcgctggcttctaaatgaatttcctgtatttatcacaatggataaacggcgatttgtgtctcagacaaatggcaatctctacattgcaaatgttgaggcttccgacaaaggcaattattcctgctttgtttccagtccttctattacaaagagcgtgttcagcaaattcatcccactcattccaatacctgaacgaacaacaaaaccatatcctgctgatattgtagttcagttcaaggatgtatatgcattgatgggccaaaatgtgaccttagaatgttttgcacttggaaatcctgttccggatatccgatggcggaaggttctagaaccaatgccaagcactgctgagattagcacctctggggctgttcttaagatcttcaatattcagctagaagatgaaggcatctatgaatgtgaggctgagaacattagaggaaaggataaacatcaagcaagaatttatgttcaagcattccctgagtgggtagaacacatcaatgacacagaggtggacataggcagtgatctctactggccttgtgtggccacaggaaagcccatccctacaatccgatggttgaaaaatggatatgcgtatcataaaggggaattaagactgtatgatgtgacttttgaaaatgccggaatgtatcagtgcatagctgaaaacacatatggagccatttatgcaaatgctgagttgaagatcttggcgttggctccaacttttgaaatgaatcctatgaagaaaaagatcctggctgctaaaggtggaagggtgataattgaatgcaaacctaaagctgcaccgaaaccaaagttttcatggagtaaagggacagagtggcttgtcaatagcagcagaatactcatttgggaagatggtagcttggaaatcaacaacattacaaggaatgatggaggtatctatacatgctttgcagaaaataacagagggaaagctaatagcactggaacccttgttatcacagatcctacgcgaattatattggccccaattaatgccgatatcacagttggagaaaacgccaccatgcagtgtgctgcgtcctttgatcctgccttggatctcacatttgtttggtccttcaatggctatgtgatcgattttaacaaagagaatattcactaccagaggaattttatgctggattccaatggggaattactaatccgaaatgcgcagctgaaacatgctggaagatacacatgcactgcccagacaattgtggacaattcttcagcttcagctgaccttgtagtgagaggccctccaggccctccaggtggtctgagaatagaagacattagagccacttctgtggcacttacttggagccgtggttcagacaatcatagtcctatttctaaatacactatccagaccaagactattctttcagatgactggaaagatgcaaagacagatcccccaattattgaaggaaatatggaggcagcaagagcagtggacttaatcccatggatggagtatgaattccgcgtggtagcaaccaatacactgggtagaggagagcccagtataccatctaacagaattaaaacagacggtgctgcaccaaatgtggctccttcagatgtaggaggtggaggtggaagaaacagagagctgaccataacatgggcgcctttgtcaagagaataccactatggcaacaattttggttacatagtggcatttaagccatttgatggagaagaatggaaaaaagtcacagttactaatcctgatactggccgatatgtccataaagatgaaaccatgagcccttccactgcatttcaagttaaagtcaaggccttcaacaacaaaggagatggaccttacagcctagtagcagtcattaattcagcacaagacgctcccagtgaagccccaacagaagtaggtgtaaaagtcttatcatcttctgagatatctgttcattgggaacatgttttagaaaaaatagtggaaagctatcagattcggtattgggctgcccatgacaaagaagaagctgcaaacagagttcaagtcaccagccaagagtactcggccaggctcgagaaccttctgccagacacccagtattttatagaagtcggggcctgcaatagtgcagggtgtggacctccaagtgacatgattgaggctttcaccaagaaagcacctcctagccagcctccaaggatcatcagttcagtaaggtctggttcacgctatataatcacctgggatcatgtcgttgcactatcaaatgaatctacagtgacgggatataaggtactctacagacctgatggccagcatgatggcaagctgtattcaactcacaaacactccatagaagtcccaatccccagagatggagaatacgttgtggaggttcgcgcgcacagtgatggaggagatggagtggtgtctcaagtcaaaatttcaggtgcacccaccctatccccaagtcttctcggcttactgctgcctgcctttggcatccttgtctacttggaattctgaatgtgttgtgacagctgctgttcccatcccagctcagaagacacccttcaaccctgggatgaccacaattccttccaatttctgcggctccatcctaagccaaataaattatactttaacaaactattcaactgatttacaacacacatgatgactgaggcattcgggaaccccttcatccaaaagaataaacttttaaatggatataaatgatttttaactcgttccaatatgccttataaaccacttaacctgattctgtgacagttgcatgatttaacccaatgggacaagttacagtgttcaattcaatactataggctgtagagtgaaagtcaaatcaccatatacaggtgctttaaatttaataacaagttgtgaaatataatagagattgaaatgttggttgtatgtggtaaatgtaagagtaatacagtctcttgtactttcctcactgttttgggtactgcatattattgaatggcccctatcattcatgacatcttgagttttcttgaaaagacaatagagtgtaacaaatattttgtcagaaatcccat

SEQ ID NO: 453862 - DNA, 3780 bp, Homo sapiens
agcggagccagggtgggctccgccgaggagaggaggggcgccggtggggagatgcgctcccaggtgtttgcagcggaagtgggaaacctgtagggtatggtccagctgtgccgcaccgaggcgagcaggagcagggaacaggtgtttaaaattatccaactgccatagagctaaattcttttttggaaaattgaaccgaacttctactgaatacaagatgaaaatgtggttgctggtcagtcatcttgtgataatatctattactacctgtttagcagagtttacatggtatagaagatatggtcatggagtttctgaggaagacaaaggatttggaccaatttttgaagagcagccaatcaataccatttatccagaggaatcactggaaggaaaagtctcactcaactgtagggcacgagccagccctttcccggtttacaaatggagaatgaataatggggacgttgatctcacaagtgatcgatacagtatggtaggaggaaaccttgttatcaacaaccctgacaaacagaaagatgctggaatatactactgtttagcatctaataactacgggatggtcagaagcactgaagcaaccctgagctttggatatcttgatcctttcccacctgaggaacgtcctgaggtcagagtaaaagaagggaaaggaatggtgcttctctgtgaccccccataccattttccagatgatcttagctatcgctggcttctaaatgaatttcctgtatttatcacaatggataaacggcgatttgtgtctcagacaaatggcaatctctacattgcaaatgttgaggcttccgacaaaggcaattattcctgctttgtttccagtccttctattacaaagagcgtgttcagcaaattcatcccactcattccaatacctgaacgaacaacaaaaccatatcctgctgatattgtagttcagttcaaggatgtatatgcattgatgggccaaaatgtgaccttagaatgttttgcacttggaaatcctgttccggatatccgatggcggaaggttctagaaccaatgccaagcactgctgagattagcacctctggggctgttcttaagatcttcaatattcagctagaagatgaaggcatctatgaatgtgaggctgagaacattagaggaaaggataaacatcaagcaagaatttatgttcaagcattccctgagtgggtagaacacatcaatgacacagaggtggacataggcagtgatctctactggccttgtgtggccacaggaaagcccatccctacaatccgatggttgaaaaatggatatgcgtatcataaaggggaattaagactgtatgatgtgacttttgaaaatgccggaatgtatcagtgcatagctgaaaacacatatggagccatttatgcaaatgctgagttgaagatcttggcgttggctccaacttttgaaatgaatcctatgaagaaaaagatcctggctgctaaaggtggaagggtgataattgaatgcaaacctaaagctgcaccgaaaccaaagttttcatggagtaaagggacagagtggcttgtcaatagcagcagaatactcatttgggaagatggtagcttggaaatcaacaacattacaaggaatgatggaggtatctatacatgctttgcagaaaataacagagggaaagctaatagcactggaacccttgttatcacagatcctacgcgaattatattggccccaattaatgccgatatcacagttggagaaaacgccaccatgcagtgtgctgcgtcctttgatcctgccttggatctcacatttgtttggtccttcaatggctatgtgatcgattttaacaaagagaatattcactaccagaggaattttatgctggattccaatggggaattactaatccgaaatgcgcagctgaaacatgctggaagatacacatgcactgcccagacaattgtggacaattcttcagcttcagctgaccttgtagtgagaggccctccaggccctccaggtggtctgagaatagaagacattagagccacttctgtggcacttacttggagccgtggttcagacaatcatagtcctatttctaaatacactatccagaccaagactattctttcagatgactggaaagatgcaaagacagatcccccaattattgaaggaaatatggaggcagcaagagcagtggacttaatcccatggatggagtatgaattccgcgtggtagcaaccaatacactgggtagaggagagcccagtataccatctaacagaattaaaacagacggtgctgcaccaaatgtggctccttcagatgtaggaggtggaggtggaagaaacagagagctgaccataacatgggcgcctttgtcaagagaataccactatggcaacaattttggttacatagtggcatttaagccatttgatggagaagaatggaacatgagcccttccactgcatttcaagttaaagtcaaggccttcaacaacaaaggagatggaccttacagcctagtagcagtcattaattcagcacaagacgctcccagtgaagccccaacagaagtaggtgtaaaagtcttatcatcttctgagatatctgttcattgggaacatgttttagaaaaaatagtggaaagctatcagattcggtattgggctgcccatgacaaagaagaagctgcaaacagagttcaagtcaccagccaagagtactcggccaggctcgagaaccttctgccagacacccagtattttatagaagtcggggcctgcaatagtgcagggtgtggacctccaagtgacatgattgaggctttcaccaagaaagcacctcctagccagcctccaaggatcatcagttcagtaaggtctggttcacgctatataatcacctgggatcatgtcgttgcactatcaaatgaatctacagtgacgggatataaggtactctacagacctgatggccagcatgatggcaagctgtattcaactcacaaacactccatagaagtcccaatccccagagatggagaatacgttgtggaggttcgcgcgcacagtgatggaggagatggagtggtgtctcaagtcaaaatttcaggtgcacccaccctatccccaagtcttctcggcttactgctgcctgcctttggcatccttgtctacttggaattctgaatgtgttgtgacagctgctgttcccatcccagctcagaagacacccttcaaccctgggatgaccacaattccttccaatttctgcggctccatcctaagccaaataaattatactttaacaaactattcaactgatttacaacacacatgatgactgaggcattcgggaaccccttcatccaaaagaataaacttttaaatggatataaatgatttttaactcgttccaatatgccttataaaccacttaacctgattctgtgacagttgcatgatttaacccaatgggacaagttacagtgttcaattcaatactataggctgtagagtgaaagtcaaatcaccatatacaggtgctttaaatttaataacaagttgtgaaatataatagagattgaaatgttggttgtatgtggtaaatgtaagagtaatacagtctcttgtactttcctcactgttttgggtactgcatattattgaatggcccctatcattcatgacatcttgagttttcttgaaaagacaatagagtgtaacaaatattttgtcagaaatcccat

SEQ ID NO: 453863 - DNA, 1576 bp, Homo sapiens
attcagtgtgtttttgtggtgtctggtgctggtctttcctttccatatctagtgattccttcaggagctctgcaccaaatgtggctccttcagatgtaggaggtggaggtggaagaaacagagagctgaccataacatgggcgcctttgtcaagagaataccactatggcaacaattttggttacatagtggcatttaagccatttgatggagaagaatggaaaaaagtcacagttactaatcctgatactggccgatatgtccataaagatgaaaccatgagcccttccactgcatttcaagttaaagtcaaggccttcaacaacaaaggagatggaccttacagcctagtagcagtcattaattcagcacaagacgctcccagtgaagccccaacagaagtaggtgtaaaagtcttatcatcttctgagatatctgttcattgggaacatgttttagaaaaaatagtggaaagctatcagattcggtattgggctgcccatgacaaagaagaagctgcaaacagagttcaagtcaccagccaagagtactcggccaggctcgagaaccttctgccagacacccagtattttatagaagtcggggcctgcaatagtgcagggtgtggacctccaagtgacatgattgaggctttcaccaagaaagcacctcctagccagcctccaaggatcatcagttcagtaaggtctggttcacgctatataatcacctgggatcatgtcgttgcactatcaaatgaatctacagtgacgggatataaggtactctacagacctgatggccagcatgatggcaagctgtattcaactcacaaacactccatagaagtcccaatccccagagatggagaatacgttgtggaggttcgcgcgcacagtgatggaggagatggagtggtgtctcaagtcaaaatttcaggtgcacccaccctatccccaagtcttctcggcttactgctgcctgcctttggcatccttgtctacttggaattctgaatgtgttgtgacagctgctgttcccatcccagctcagaagacacccttcaaccctgggatgaccacaattccttccaatttctgcggctccatcctaagccaaataaattatactttaacaaactattcaactgatttacaacacacatgatgactgaggcattcgggaaccccttcatccaaaagaataaacttttaaatggatataaatgatttttaactcgttccaatatgccttataaaccacttaacctgattctgtgacagttgcatgatttaacccaatgggacaagttacagtgttcaattcaatactataggctgtagagtgaaagtcaaatcaccatatacaggtgctttaaatttaataacaagttgtgaaatataatagagattgaaatgttggttgtatgtggtaaatgtaagagtaatacagtctcttgtactttcctcactgttttgggtactgcatattattgaatggcccctatcattcatgacatcttgagttttcttgaaaagacaatagagtgtaacaaatattttgtcagaaatcccat

SEQ ID NO: 453864 - DNA, 2227 bp, Homo sapiens
agcggagccagggtgggctccgccgaggagaggaggggcgccggtggggagatgcgctcccaggtgtttgcagcggaagtgggaaacctgtagggtatggtccagctgtgccgcaccgaggcgagcaggagcagggaacaggtgtttaaaattatccaactgccatagagctaaattcttttttggaaaattgaaccgaacttctactgaatacaagatgaaaatgtggttgctggtcagtcatcttgtgataatatctattactacctgtttagcagagtttacatggtatagaagatatggtcatggagtttctgaggaagacaaaggatttggaccaatttttgaagagcagccaatcaataccatttatccagaggaatcactggaaggaaaagtctcactcaactgtagggcacgagccagccctttcccggtttacaaatggagaatgaataatggggacgttgatctcacaagtgatcgatacagtatggtaggaggaaaccttgttatcaacaaccctgacaaacagaaagatgctggaatatactactgtttagcatctaataactacgggatggtcagaagcactgaagcaaccctgagctttggatatcttgatcctttcccacctgaggaacgtcctgaggtcagagtaaaagaagggaaaggaatggtgcttctctgtgaccccccataccattttccagatgatcttagctatcgctggcttctaaatgaatttcctgtatttatcacaatggataaacggcgatttgtgtctcagacaaatggcaatctctacattgcaaatgttgaggcttccgacaaaggcaattattcctgctttgtttccagtccttctattacaaagagcgtgttcagcaaattcatcccactcattccaatacctgaacgaacaacaaaaccatatcctgctgatattgtagttcagttcaaggatgtatatgcattgatgggccaaaatgtgaccttagaatgttttgcacttggaaatcctgttccggatatccgatggcggaaggttctagaaccaatgccaagcactgctgagattagcacctctggggctgttcttaagatcttcaatattcagctagaagatgaaggcatctatgaatgtgaggctgagaacattagaggaaaggataaacatcaagcaagaatttatgttcaagcattccctgagtgggtagaacacatcaatgacacagaggtggacataggcagtgatctctactggccttgtgtggccacaggaaagcccatccctacaatccgatggttgaaaaatggatatgcgtatcataaaggggaattaagactgtatgatgtgacttttgaaaatgccggaatgtatcagtgcatagctgaaaacacatatggagccatttatgcaaatgctgagttgaagatcttggcgttggctccaacttttgaaatgaatcctatgaagaaaaagatcctggctgctaaaggtggaagggtgataattgaatgcaaacctaaagctgcaccgaaaccaaagttttcatggagtaaagggacagagtggcttgtcaatagcagcagaatactcatttgggaagatggtagcttggaaatcaacaacattacaaggaatgatggaggtatctatacatgctttgcagaaaataacagagggaaagctaatagcactggaacccttgttatcacagatcctacgcgaattatattggccccaattaatgccgatatcacagttggagaaaacgccaccatgcagtgtgctgcgtcctttgatcctgccttggatctcacatttgtttggtccttcaatggctatgtgatcgattttaacaaagagaatattcactaccagaggaattttatgctggattccaatggggaattactaatccgaaatgcgcagctgaaacatgctggaagatacacatgcactgcccagacaattgtggacaattcttcagcttcagctgaccttgtagtgagaggtaaaaacagaaaaggtggagagaaaaacatggtggattcctttctccccgtctgtgcaagcctgcctccaacctgggtgatcgttgacactcaccatttctgtgaaagacttttttttttttaacatattatactagatttgactaactcaatcttgtagcttctgcagttctccccacccccaacctagttcttagagtatgtt

SEQ ID NO: 453865 - DNA, 3834 bp, Homo sapiens
agcggagccagggtgggctccgccgaggagaggaggggcgccggtggggagatgcgctcccaggtgtttgcagcggaagtgggaaacctgtagggtatggtccagctgtgccgcaccgaggcgagcaggagcagggaacaggtgtttaaaattatccaactgccatagagctaaattcttttttggaaaattgaaccgaacttctactgaatacaagatgaaaatgtggttgctggtcagtcatcttgtgataatatctattactacctgtttagcagagtttacatggtatagaagatatggtcatggagtttctgaggaagacaaaggatttggaccaatttttgaagagcagccaatcaataccatttatccagaggaatcactggaaggaaaagtctcactcaactgtagggcacgagccagccctttcccggtttacaaatggagaatgaataatggggacgttgatctcacaagtgatcgatacagtatggtaggaggaaaccttgttatcaacaaccctgacaaacagaaagatgctggaatatactactgtttagcatctaataactacgggatggtcagaagcactgaagcaaccctgagctttggatatcttgatcctttcccacctgaggaacgtcctgaggtcagagtaaaagaagggaaaggaatggtgcttctctgtgaccccccataccattttccagatgatcttagctatcgctggcttctaaatgaatttcctgtatttatcacaatggataaacggcgatttgtgtctcagacaaatggcaatctctacattgcaaatgttgaggcttccgacaaaggcaattattcctgctttgtttccagtccttctattacaaagagcgtgttcagcaaattcatcccactcattccaatacctgaacgaacaacaaaaccatatcctgctgatattgtagttcagttcaaggatgtatatgcattgatgggccaaaatgtgaccttagaatgttttgcacttggaaatcctgttccggatatccgatggcggaaggttctagaaccaatgccaagcactgctgagattagcacctctggggctgttcttaagatcttcaatattcagctagaagatgaaggcatctatgaatgtgaggctgagaacattagaggaaaggataaacatcaagcaagaatttatgttcaagcattccctgagtgggtagaacacatcaatgacacagaggtggacataggcagtgatctctactggccttgtgtggccacaggaaagcccatccctacaatccgatggttgaaaaatggatatgcgtatcataaaggggaattaagactgtatgatgtgacttttgaaaatgccggaatgtatcagtgcatagctgaaaacacatatggagccatttatgcaaatgctgagttgaagatcttggcgttggctccaacttttgaaatgaatcctatgaagaaaaagatcctggctgctaaaggtggaagggtgataattgaatgcaaacctaaagctgcaccgaaaccaaagttttcatggagtaaagggacagagtggcttgtcaatagcagcagaatactcatttgggaagatggtagcttggaaatcaacaacattacaaggaatgatggaggtatctatacatgctttgcagaaaataacagagggaaagctaatagcactggaacccttgttatcacagatcctacgcgaattatattggccccaattaatgccgatatcacagttggagaaaacgccaccatgcagtgtgctgcgtcctttgatcctgccttggatctcacatttgtttggtccttcaatggctatgtgatcgattttaacaaagagaatattcactaccagaggaattttatgctggattccaatggggaattactaatccgaaatgcgcagctgaaacatgctggaagatacacatgcactgcccagacaattgtggacaattcttcagcttcagctgaccttgtagtgagaggccctccaggccctccaggtggtctgagaatagaagacattagagccacttctgtggcacttacttggagccgtggttcagacaatcatagtcctatttctaaatacactatccagaccaagactattctttcagatgactggaaagatgcaaagacagatcccccaattattgaaggaaatatggaggcagcaagagcagtggacttaatcccatggatggagtatgaattccgcgtggtagcaaccaatacactgggtagaggagagcccagtataccatctaacagaattaaaacagacggtgctgcaccaaatgtggctccttcagatgtaggaggtggaggtggaagaaacagagagctgaccataacatgggcgcctttgtcaagagaataccactatggcaacaattttggttacatagtggcatttaagccatttgatggagaagaatggaaaaaagtcacagttactaatcctgatactggccgatatgtccataaagatgaaaccatgagcccttccactgcatttcaagttaaagtcaaggccttcaacaacaaaggagatggaccttacagcctagtagcagtcattaattcagcacaagacgctcccagtgaagccccaacagaagtaggtgtaaaagtcttatcatcttctgagatatctgttcattgggaacatgttttagaaaaaatagtggaaagctatcagattcggtattgggctgcccatgacaaagaagaagctgcaaacagagttcaagtcaccagccaagagtactcggccaggctcgagaaccttctgccagacacccagtattttatagaagtcggggcctgcaatagtgcagggtgtggacctccaagtgacatgattgaggctttcaccaagaaagcacctcctagccagcctccaaggatcatcagttcagtaaggtctggttcacgctatataatcacctgggatcatgtcgttgcactatcaaatgaatctacagtgacgggatataaggtactctacagacctgatggccagcatgatggcaagctgtattcaactcacaaacactccatagaagtcccaatccccagagatggagaatacgttgtggaggttcgcgcgcacagtgatggaggagatggagtggtgtctcaagtcaaaatttcaggtgcacccaccctatccccaagtcttctcggcttactgctgcctgcctttggcatccttgtctacttggaattctgaatgtgttgtgacagctgctgttcccatcccagctcagaagacacccttcaaccctgggatgaccacaattccttccaatttctgcggctccatcctaagccaaataaattatactttaacaaactattcaactgatttacaacacacatgatgactgaggcattcgggaaccccttcatccaaaagaataaacttttaaatggatataaatgatttttaactcgttccaatatgccttataaaccacttaacctgattctgtgacagttgcatgatttaacccaatgggacaagttacagtgttcaattcaatactataggctgtagagtgaaagtcaaatcaccatatacaggtgctttaaatttaataacaagttgtgaaatataatagagattgaaatgttggttgtatgtggtaaatgtaagagtaatacagtctcttgtactttcctcactgttttgggtactgcatattattgaatggcccctatcattcatgacatcttgagttttcttgaaaagacaatagagtgtaacaaatattttgtcagaaatcccat

SEQ ID NO: 453866 - DNA, 3801 bp, Homo sapiens
agcggagccagggtgggctccgccgaggagaggaggggcgccggtggggagatgcgctcccaggtgtttgcagcggaagtgggaaacctgtagggtatggtccagctgtgccgcaccgaggcgagcaggagcagggaacaggtgtttaaaattatccaactgccatagagctaaattcttttttggaaaattgaaccgaacttctactgaatacaagatgaaaatgtggttgctggtcagtcatcttgtgataatatctattactacctgtttagcagtttctgaggaagacaaaggatttggaccaatttttgaagagcagccaatcaataccatttatccagaggaatcactggaaggaaaagtctcactcaactgtagggcacgagccagccctttcccggtttacaaatggagaatgaataatggggacgttgatctcacaagtgatcgatacagtatggtaggaggaaaccttgttatcaacaaccctgacaaacagaaagatgctggaatatactactgtttagcatctaataactacgggatggtcagaagcactgaagcaaccctgagctttggatatcttgatcctttcccacctgaggaacgtcctgaggtcagagtaaaagaagggaaaggaatggtgcttctctgtgaccccccataccattttccagatgatcttagctatcgctggcttctaaatgaatttcctgtatttatcacaatggataaacggcgatttgtgtctcagacaaatggcaatctctacattgcaaatgttgaggcttccgacaaaggcaattattcctgctttgtttccagtccttctattacaaagagcgtgttcagcaaattcatcccactcattccaatacctgaacgaacaacaaaaccatatcctgctgatattgtagttcagttcaaggatgtatatgcattgatgggccaaaatgtgaccttagaatgttttgcacttggaaatcctgttccggatatccgatggcggaaggttctagaaccaatgccaagcactgctgagattagcacctctggggctgttcttaagatcttcaatattcagctagaagatgaaggcatctatgaatgtgaggctgagaacattagaggaaaggataaacatcaagcaagaatttatgttcaagcattccctgagtgggtagaacacatcaatgacacagaggtggacataggcagtgatctctactggccttgtgtggccacaggaaagcccatccctacaatccgatggttgaaaaatggatatgcgtatcataaaggggaattaagactgtatgatgtgacttttgaaaatgccggaatgtatcagtgcatagctgaaaacacatatggagccatttatgcaaatgctgagttgaagatcttggcgttggctccaacttttgaaatgaatcctatgaagaaaaagatcctggctgctaaaggtggaagggtgataattgaatgcaaacctaaagctgcaccgaaaccaaagttttcatggagtaaagggacagagtggcttgtcaatagcagcagaatactcatttgggaagatggtagcttggaaatcaacaacattacaaggaatgatggaggtatctatacatgctttgcagaaaataacagagggaaagctaatagcactggaacccttgttatcacagatcctacgcgaattatattggccccaattaatgccgatatcacagttggagaaaacgccaccatgcagtgtgctgcgtcctttgatcctgccttggatctcacatttgtttggtccttcaatggctatgtgatcgattttaacaaagagaatattcactaccagaggaattttatgctggattccaatggggaattactaatccgaaatgcgcagctgaaacatgctggaagatacacatgcactgcccagacaattgtggacaattcttcagcttcagctgaccttgtagtgagaggccctccaggccctccaggtggtctgagaatagaagacattagagccacttctgtggcacttacttggagccgtggttcagacaatcatagtcctatttctaaatacactatccagaccaagactattctttcagatgactggaaagatgcaaagacagatcccccaattattgaaggaaatatggaggcagcaagagcagtggacttaatcccatggatggagtatgaattccgcgtggtagcaaccaatacactgggtagaggagagcccagtataccatctaacagaattaaaacagacggtgctgcaccaaatgtggctccttcagatgtaggaggtggaggtggaagaaacagagagctgaccataacatgggcgcctttgtcaagagaataccactatggcaacaattttggttacatagtggcatttaagccatttgatggagaagaatggaaaaaagtcacagttactaatcctgatactggccgatatgtccataaagatgaaaccatgagcccttccactgcatttcaagttaaagtcaaggccttcaacaacaaaggagatggaccttacagcctagtagcagtcattaattcagcacaagacgctcccagtgaagccccaacagaagtaggtgtaaaagtcttatcatcttctgagatatctgttcattgggaacatgttttagaaaaaatagtggaaagctatcagattcggtattgggctgcccatgacaaagaagaagctgcaaacagagttcaagtcaccagccaagagtactcggccaggctcgagaaccttctgccagacacccagtattttatagaagtcggggcctgcaatagtgcagggtgtggacctccaagtgacatgattgaggctttcaccaagaaagcacctcctagccagcctccaaggatcatcagttcagtaaggtctggttcacgctatataatcacctgggatcatgtcgttgcactatcaaatgaatctacagtgacgggatataaggtactctacagacctgatggccagcatgatggcaagctgtattcaactcacaaacactccatagaagtcccaatccccagagatggagaatacgttgtggaggttcgcgcgcacagtgatggaggagatggagtggtgtctcaagtcaaaatttcaggtgcacccaccctatccccaagtcttctcggcttactgctgcctgcctttggcatccttgtctacttggaattctgaatgtgttgtgacagctgctgttcccatcccagctcagaagacacccttcaaccctgggatgaccacaattccttccaatttctgcggctccatcctaagccaaataaattatactttaacaaactattcaactgatttacaacacacatgatgactgaggcattcgggaaccccttcatccaaaagaataaacttttaaatggatataaatgatttttaactcgttccaatatgccttataaaccacttaacctgattctgtgacagttgcatgatttaacccaatgggacaagttacagtgttcaattcaatactataggctgtagagtgaaagtcaaatcaccatatacaggtgctttaaatttaataacaagttgtgaaatataatagagattgaaatgttggttgtatgtggtaaatgtaagagtaatacagtctcttgtactttcctcactgttttgggtactgcatattattgaatggcccctatcattcatgacatcttgagttttcttgaaaagacaatagagtgtaacaaatattttgtcagaaatcccat

SEQ ID NO: 453867 - DNA, 3957 bp, Homo sapiens
agcggagccagggtgggctccgccgaggagaggaggggcgccggtggggagatgcgctcccaggtgtttgcagcggaagtgggaaacctgtagggtatggtccagctgtgccgcaccgaggcgagcaggagcagggaacaggtgtttaaaattatccaactgccatagagctaaattcttttttggaaaattgaaccgaacttctactgaatacaagatgaaaatgtggttgctggtcagtcatcttgtgataatatctattactacctgtttagcagagtttacatggtatagaagatatggtcatggagtttctgaggaagacaaaggatttggaccaatttttgaagagcagccaatcaataccatttatccagaggaatcactggaaggaaaagtctcactcaactgtagggcacgagccagccctttcccggtttacaaatggagaatgaataatggggacgttgatctcacaagtgatcgatacagtatggtaggaggaaaccttgttatcaacaaccctgacaaacagaaagatgctggaatatactactgtttagcatctaataactacgggatggtcagaagcactgaagcaaccctgagctttggatatcttgatcctttcccacctgaggaacgtcctgaggtcagagtaaaagaagggaaaggaatggtgcttctctgtgaccccccataccattttccagatgatcttagctatcgctggcttctaaatgaatttcctgtatttatcacaatggataaacggcgatttgtgtctcagacaaatggcaatctctacattgcaaatgttgaggcttccgacaaaggcaattattcctgctttgtttccagtccttctattacaaagagcgtgttcagcaaattcatcccactcattccaatacctgaacgaacaacaaaaccatatcctgctgatattgtagttcagttcaaggatgtatatgcattgatgggccaaaatgtgaccttagaatgttttgcacttggaaatcctgttccggatatccgatggcggaaggttctagaaccaatgccaagcactgctgagattagcacctctggggctgttcttaagatcttcaatattcagctagaagatgaaggcatctatgaatgtgaggctgagaacattagaggaaaggataaacatcaagcaagaatttatgttcaagcattccctgagtgggtagaacacatcaatgacacagaggtggacataggcagtgatctctactggccttgtgtggccacaggaaagcccatccctacaatccgatggttgaaaaatggatatgcgtatcataaaggggaattaagactgtatgatgtgacttttgaaaatgccggaatgtatcagtgcatagctgaaaacacatatggagccatttatgcaaatgctgagttgaagatcttggcgttggctccaacttttgaaatgaatcctatgaagaaaaagatcctggctgctaaaggtggaagggtgataattgaatgcaaacctaaagctgcaccgaaaccaaagttttcatggagtaaagggacagagtggcttgtcaatagcagcagaatactcatttgggaagatggtagcttggaaatcaacaacattacaaggaatgatggaggtatctatacatgctttgcagaaaataacagagggaaagctaatagcactggaacccttgttatcacagatcctacgcgaattatattggccccaattaatgccgatatcacagttggagaaaacgccaccatgcagtgtgctgcgtcctttgatcctgccttggatctcacatttgtttggtccttcaatggctatgtgatcgattttaacaaagagaatattcactaccagaggaattttatgctggattccaatggggaattactaatccgaaatgcgcagctgaaacatgctggaagatacacatgcactgcccagacaattgtggacaattcttcagcttcagctgaccttgtagtgagaggccctccaggccctccaggtggtctgagaatagaagacattagagccacttctgtggcacttacttggagccgtggttcagacaatcatagtcctatttctaaatacactatccagaccaagactattctttcagatgactggaaagatgcaaagacagatcccccaattattgaaggaaatatggaggcagcaagagcagtggacttaatcccatggatggagtatgaattccgcgtggtagcaaccaatacactgggtagaggagagcccagtataccatctaacagaattaaaacagacggtgctgcaccaaatgtggctccttcagatgtaggaggtggaggtggaagaaacagagagctgaccataacatgggcgcctttgtcaagagaataccactatggcaacaattttggttacatagtggcatttaagccatttgatggagaagaatggaaaaaagtcacagttactaatcctgatactggccgatatgtccataaagatgaaaccatgagcccttccactgcatttcaagttaaagtcaaggccttcaacaacaaaggagatggaccttacagcctagtagcagtcattaattcagcacaagacgctcccagtgaagccccaacagaagtaggtgtaaaagtcttatcatcttctgagatatctgttcattgggaacatgttttagaaaaaatagtggaaagctatcagattcggtattgggctgcccatgacaaagaagaagctgcaaacagagttcaagtcaccagccaagagtactcggccaggctcgagaaccttctgccagacacccagtattttatagaagtcggggcctgcaatagtgcagggtgtggacctccaagtgacatgattgaggctttcaccaagaaagcacctcctagccagcctccaaggatcatcagttcagtaaggtctggttcacgctatataatcacctgggatcatgtcgttgcactatcaaatgaatctacagtgacgggatataaggtactctacagacctgatggccagcatgatggcaagctgtattcaactcacaaacactccatagaagtcccaatccccagagatggagaatacgttgtggaggttcgcgcgcacagtgatggaggagatggagtggtgtctcaagtcaaaatttcagaaggaaaatccacatccttgagaagtaaaacagccaaagatcacagaagcatcagaaccatgtcttgagcccaaatattctctgttgctaaagttatataactagctattgacagaactagaggtgcacccaccctatccccaagtcttctcggcttactgctgcctgcctttggcatccttgtctacttggaattctgaatgtgttgtgacagctgctgttcccatcccagctcagaagacacccttcaaccctgggatgaccacaattccttccaatttctgcggctccatcctaagccaaataaattatactttaacaaactattcaactgatttacaacacacatgatgactgaggcattcgggaaccccttcatccaaaagaataaacttttaaatggatataaatgatttttaactcgttccaatatgccttataaaccacttaacctgattctgtgacagttgcatgatttaacccaatgggacaagttacagtgttcaattcaatactataggctgtagagtgaaagtcaaatcaccatatacaggtgctttaaatttaataacaagttgtgaaatataatagagattgaaatgttggttgtatgtggtaaatgtaagagtaatacagtctcttgtactttcctcactgttttgggtactgcatattattgaatggcccctatcattcatgacatcttgagttttcttgaaaagacaatagagtgtaacaaatattttgtcagaaatcccat

SEQ ID NO: 453868 - DNA, 2418 bp, Homo sapiens
agcggagccagggtgggctccgccgaggagaggaggggcgccggtggggagatgcgctcccaggtgtttgcagcggaagtgggaaacctgtagggtatggtccagctgtgccgcaccgaggcgagcaggagcagggaacaggtgtttaaaattatccaactgccatagagctaaattcttttttggaaaattgaaccgaacttctactgaatacaagatgaaaatgtggttgctggtcagtcatcttgtgataatatctattactacctgtttagcagagtttacatggtatagaagatatggtcatggagtttctgaggaagacaaaggatttggaccaatttttgaagagcagccaatcaataccatttatccagaggaatcactggaaggaaaagtctcactcaactgtagggcacgagccagccctttcccggtttacaaatggagaatgaataatggggacgttgatctcacaagtgatcgatacagtatggtaggaggaaaccttgttatcaacaaccctgacaaacagaaagatgctggaatatactactgtttagcatctaataactacgggatggtcagaagcactgaagcaaccctgagctttggatatcttgatcctttcccacctgaggaacgtcctgaggtcagagtaaaagaagggaaaggaatggtgcttctctgtgaccccccataccattttccagatgatcttagctatcgctggcttctaaatgaatttcctgtatttatcacaatggataaacggcgatttgtgtctcagacaaatggcaatctctacattgcaaatgttgaggcttccgacaaaggcaattattcctgctttgtttccagtccttctattacaaagagcgtgttcagcaaattcatcccactcattccaatacctgaacgaacaacaaaaccatatcctgctgatattgtagttcagttcaaggatgtatatgcattgatgggccaaaatgtgaccttagaatgttttgcacttggaaatcctgttccggatatccgatggcggaaggttctagaaccaatgccaagcactgctgagattagcacctctggggctgttcttaagatcttcaatattcagctagaagatgaaggcatctatgaatgtgaggctgagaacattagaggaaaggataaacatcaagcaagaatttatgttcaagcattccctgagtgggtagaacacatcaatgacacagaggtggacataggcagtgatctctactggccttgtgtggccacaggaaagcccatccctacaatccgatggttgaaaaatggatatgcgtatcataaaggggaattaagactgtatgatgtgacttttgaaaatgccggaatgtatcagtgcatagctgaaaacacatatggagccatttatgcaaatgctgagttgaagatcttggcgttggctccaacttttgaaatgaatcctatgaagaaaaagatcctggctgctaaaggtggaagggtgataattgaatgcaaacctaaagctgcaccgaaaccaaagttttcatggagtaaagggacagagtggcttgtcaatagcagcagaatactcatttgggaagatggtagcttggaaatcaacaacattacaaggaatgatggaggtatctatacatgctttgcagaaaataacagagggaaagctaatagcactggaacccttgttatcacagatcctacgcgaattatattggccccaattaatgccgatatcacagttggagaaaacgccaccatgcagtgtgctgcgtcctttgatcctgccttggatctcacatttgtttggtccttcaatggctatgtgatcgattttaacaaagagaatattcactaccagaggaattttatgctggattccaatggggaattactaatccgaaatgcgcagctgaaacatgctggaagatacacatgcactgcccagacaattgtggacaattcttcagcttcagctgaccttgtagtgagaggccctccaggccctccaggtggtctgagaatagaagacattagagccacttctgtggcacttacttggagccgtggttcagacaatcatagtcctatttctaaatacactatccagaccaagactattctttcagatgactggaaagatgcaaagacagatcccccaattattgaaggaacaacagatacagtatcaaattatgacacttcccttacccaaattaatgcactggtacacacagtggctcatatttaacttcccccagattcccaatacacactggggggaaaaaaactaaatcatcgggagtcacttgccaacttggaagttgatatttctttactataaacattctaagactataagttctctggcatgagtatctctgcaatcat

SEQ ID NO: 453869 - DNA, 2255 bp, Homo sapiens
gcggggcgtctcccgcccgggcctagagcgctgccgggggcgccgggactatgtcgcgggcgcggagccacctgcgcgccgctctattcctggcagcggcgtctgcgcgcggcgtaacgacccaggtcgcggcgcggcggggcttgagcgcgtggccggtgccgcaggagccgagcatggagtaccaggatgccgtgcgcatgctcaataccctgcagaccaatgccggctacctggagcaggtgaagcgccagcggggtgaccctcagacacagttggaagccatggaactgtacctggcacggagtgggctgcaggtggaggacttggaccggctgaacatcatccacgtcactgggacgaaggggaagggctccacctgtgccttcacggaatgtatcctccgaagctatggcctgaagacgggattctttaggttcgggagcggatccgcatcaatgggcagcccatcagtcctgagctcttcaccaagtacttctggcgcctctaccaccggctggaggagaccaaggatggcagctgtgtctccatgcccccctacttccgcttcctgacactcatggccttccacgtcttcctccaagagaaggtggacctggcagtggtggaggtgggcattggcggggcttatgactgcaccaacatcatcaggaagcctgtggtgtgcggagtctcctctcttggcatcgaccacaccagcctcctgggggatacggtggagaagatcgcatggcagaaagggggcatctttaagcaaggtgtccctgccttcactgtgctccaacctgaaggtcccctggcagtgctgagggaccgagcccagcagatctcatgtcctctatacctgtgtccgatgctggaggccctcgaggaaggggggccgccgctgaccctgggcctggagggggagcaccagcggtccaacgccgccttggccttgcagctggcccactgctggctgcagcggcaggaccgccatggtgctggggagccaaaggcatccaggccagggctcctgtggcagctgcccctggcacctgtgttccagcccacatcccacatgcggctcgggcttcggaacacggagtggccgggccggacgcaggtgctgcggcgcgggcccctcacctggtacctggacggtgcgcacaccgccagcagcgcgcaggcctgcgtgcgctggttccgccaggcgctgcagggccgcgagaggccgagcggtggccccgaggttcgagtcttgctcttcaatgctaccggggaccgggacccggcggccctgctgaagctgctgcagccctgccagtttgactatgccgtcttctgccctaacctgacagaggtgtcatccacaggcaacgcagaccaacagaacttcacagtgacactggaccaggtcctgctccgctgcctggaacaccagcagcactggaaccacctggacgaagagcaggccagcccggacctctggagtgcccccagcccagagcccggtgggtccgcatccctgcttctggcgccccacccaccccacacctgcagtgccagctccctcgtcttcagctgcatttcacatgccttgcaatggatcagccaaggccgagaccccatcttccagccacctagtcccccaaagggcctcctcacccaccctgtggctcacagtggggccagcatactccgtgaggctgctgccatccatgtgctagtcactggcagcctgcacctggtgggtggtgtcctgaagctgctggagcccgcactgtcccagtagccaaggcccggggttggaggtgggagcttcccacacctgcctgcgttctccccatgaacttacatactaggtgccttttgtttttggctttcctggttctgtctagactggcctaggggccagggctttgggatgggaggccgggagaggatgtcttttttaaggctctgtgccttggtctctccttcctcttggctgagatagcagaggggctccccgggtctctcactgttgcagtggcctggccgttcagcctgtctcccccaacaccccgcctgcctcctggctcaggcccagcttattgtgtgcgctgcctggccaggccctgggtcttgccatgtgctgggtggtagatttcctcctcccagtgccttctgggaagggagagggcctctgcctgggacactgcgggacagagggtggctggagtgaattaaagcctttgttttttaaagaaatg

SEQ ID NO: 453870 - DNA, 1065 bp, Homo sapiens
  misc_feature (11)..(11): n is a, c, g, or t
  misc_feature (13)..(13): n is a, c, g, or t
  misc_feature (18)..(18): n is a, c, g, or t
  misc_feature (21)..(21): n is a, c, g, or t
tggcctaaggngntaacngtnactccccccccgcgattaatagcgaggcctgggtggcgcctgaaggtcccctggcagtgctgagggaccgagcccagcagatctcatgtcctctatacctgtgtccgatgctggaggccctcgaggaaggggggccgccgctgaccctgggcctggagggggagcaccagcggtccaacgccgccttggccttgcagctggcccactgctggctgcagcggcaggaccgccatggtgctggggagccaaaggcatccaggccagggctcctgtggcagctgcccctggcacctgtgttccagcccacatcccacatgcggctcgggcttcggaacacggagtggccgggccggacgcaggtgctgcggcgcgggcccctcacctggtacctggacggtgcgcacaccgccagcagcgcgcaggcctgcgtgcgctggttccgccaggcgctgcagggccgcgagaggccgagcggtggccccgaggttcgagtcttgctcttcaatgctaccggggaccgggacccggcggccctgctgaagctgctgcagccctgccagtttgactatgccgtcttctgccctaacctgacagaggtgtcatccacaggcaacgcagaccaacagaacttcacagtgacactggaccaggtcctgctccgctgcctggaacaccagcagcactggaaccacctggacgaagagcaggccagcccggacctctggagtgcccccagcccagagcccggtggcctgtctgtgagatgagaagaagaccagactgaagcctgttcaccatatgccaggcagtgctttctgcagacccccttgcagagaccttgtgatggagaattatacccatttgacagacgagggaactgtggctggtttcaagaagccatggaggccgggcacggtggctcacgcctgtaatcccagcactttgggaggctgaggcgggcggatcatgaggtcaagaggtcgagaccatctggccaacatggtgaaaccccgtctctgctaaaaatacaaaaattattagctg

SEQ ID NO: 453871 - DNA, 871 bp, Homo sapiens
tggctacctggcttctttttgcccaagtgatttggtgaaacaaagcctcttcctccagcggacttggactcttaagtcaggggtgtcgtgtgtccacgctgtactttgtatacgcctctccctggccaggatctcaccctggcagggcaagggcaaaacgggccctaactgtaaggtgggtgggctgggataaggaggcctggaagaggccagataaagccagccccaaggtctggaagcctcccaagcatagccccctcccctcccacccacctgcctgtctgcgtgcttacctttaacctccacccagttgttacttaactcgcggtaaggttctgaccagtcccatgctccactccagaaacccgccagggaggctaagtccctgggctgaccctaggatgagggcaggaacctatcaggtaaaacctttctccctgcacactggaaaggccagaacttctgcccccagtcctgtcaggggaggggaggccttggcgtctcccaaatcacgttttctgggtcaacaagcctcacagctctagttaaatcctgggcagagctggcttggcagagatgcccacacctgtgcgtcacttcgtgccctacccagaaggggagcaggaaaccaagggatgaaaggtgctgggtccctggctgcctccttgcccatggctgagaagttctggtgggaaggaaccatggagggcccatctggatatccttcctcagctaaaactgcctccttccaggtaggagaacccggtgaccaggcaggtggcctttcctgtctaagcctcagtttcttgggggcgatgctgccagcccctcacagggctcagcgcagcacccagcatgcttggagggtgag

SEQ ID NO: 453872 - DNA, 2512 bp, Homo sapiens
gcggggcgtctcccgcccgggcctagagcgctgccgggggcgccgggactatgtcgcgggcgcggagccacctgcgcgccgctctattcctggcagcggcgtctgcgcgcggcgtaacgacccaggtcgcggcgcggcggggcttgagcgcgtggccggtgccgcaggagccgagcatggagtaccaggatgccgtgcgcatgctcaataccctgcagaccaatgccggctacctggagcaggtgaagcgccagcggggtgaccctcagacacagttggaagccatggaactgtacctggcacggagtgggctgcaggtggaggacttggaccggctgaacatcatccacgtcactgggacgaaggggaagggctccacctgtgccttcacggaatgtatcctccgaagctatggcctgaagacgggattctttagctctccccacctggtgcaggttcgggagcggatccgcatcaatgggcagcccatcagtcctgagctcttcaccaagtacttctggcgcctctaccaccggctggaggagaccaaggatggcagctgtgtctccatgcccccctacttccgcttcctgacactcatggccttccacgtcttcctccaagagaaggtggacctggcagtggtggaggtgggcattggcggggcttatgactgcaccaacatcatcaggaagcctgtggtgtgcggagtctcctctcttggcatcgaccacaccagcctcctgggggatacggtggagaagatcgcatggcagaaagggggcatctttaagcaaggtgtccctgccttcactgtgctccaacctgaaggtcccctggcagtgctgagggaccgagcccagcagatctcatgtcctctatacctgtgtccgatgctggaggccctcgaggaaggggggccgccgctgaccctgggcctggagggggagcaccagcggtccaacgccgccttggccttgcagctggcccactgctggctgcagcggcaggaccgccatggtgctggggagccaaaggcatccaggccagggctcctgtggcagctgcccctggcacctgtgttccagcccacatcccacatgcggctcgggcttcggaacacggagtggccgggccggacgcaggtgctgcggcgcgggcccctcacctggtacctggacggtgcgcacaccgccagcagcgcgcaggcctgcgtgcgctggttccgccaggcgctgcagggccgcgagaggccgagcggtggccccgaggttcgagtcttgctcttcaatgctaccggggaccgggacccggcggccctgctgaagctgctgcagccctgccagtttgactatgccgtcttctgccctaacctgacagaggtgtcatccacaggcaacgcagaccaacagaacttcacagtgacactggaccaggtcctgctccgctgcctggaacaccagcagcactggaaccacctggacgaagagcaggccagcccggacctctggagtgcccccagcccagagcccggtgggtccgcatccctgcttctggcgccccacccaccccacacctgcagtgccagctccctcgtcttcagctgcatttcacatgccttgcaatggatcagccaaggccgagaccccatcttccagccacctagtcccccaaagggcctcctcacccaccctgtggctcacagtggggccagcatactccgtgaggctgctgccatccatgtgctagtcactggcagcctgcacctggtgggtggtgtcctgaagctgctggagcccgcactgtcccagtagccaaggcccggggttggaggtgggagcttcccacacctgcctgcgttctccccatgaacttacatactaggtgccttttgtttttggctttcctggttctgtctagactggcctaggggccagggctttgggatgggaggccgggagaggatgtcttttttaaggctctgtgccttggtctctccttcctcttggctgagatagcagaggggctccccgggtctctcactgttgcagtggcctggccgttcagcctgtctcccccaacaccccgcctgcctcctggctcaggcccagcttattgtgtgcgctgcctggccaggccctgggtcttgccatgtgctgggtggtagatttcctcctcccagtgccttctgggaagggagagggcctctgcctgggacactgcgggacagagggtggctggagtgaattaaagcctttgttttttaaagaaatgaaaaaaaaaaaaaaaaaaaaaaaaaaaaaaaaaaaaaaacaaaaaaaaaaaaaaaaagaaaagaacacacaacgaaaagagaagagagcgggacagagggcgagagagagaaagaaggagggaggagagcagcgggagagggggaagggaagaaggaaggagagagaggggggggagagagaggggggagggagggagagcggcagaggaggggggggggcggacagggggagggagg

SEQ ID NO: 453873 - DNA, 2714 bp, Homo sapiens
gcggggcgtctcccgcccgggcctagagcgctgccgggggcgccgggactatgtcgcgggcgcggagccacctgcgcgccgctctattcctggcagcggcgtctgcgcgcggcgtaacgacccaggtcgcggcgcggcggggcttgagcgcgtggccggtgccgcaggagccgagcatggagtaccaggatgccgtgcgcatgctcaataccctgcagaccaatgccggctacctggagcaggtgaagcgccagcggggtgaccctcagacacagttggaagccatggaactgtacctggcacggagtgggctgcaggtggaggacttggaccggctgaacatcatccacgtcactgggacgaaggggaagggctccacctgtgccttcacggaatgtatcctccgaagctatggcctgaagacgggattctttagctctccccacctggtgcaggttcgggagcggatccgcatcaatgggcagcccatcagtcctgagctcttcaccaagtacttctggcgcctctaccaccggctggaggagaccaaggatggcagctgtgtctccatgcccccctacttccgcttcctgacactcatggccttccacgtcttcctccaagagaaggtggacctggcagtggtggaggtgggcattggcggggcttatgactgcaccaacatcatcaggaagcctgtggtgtgcggagtctcctctcttggcatcgaccacaccagcctcctgggggatacggtggagaagatcgcatggcagaaagggggcatctttaagcaaggtgtccctgccttcactgtgctccaacctgaaggtcccctggcagtgctgagggaccgagcccagcagatctcatgtcctctatacctgtgtccgatgctggaggccctcgaggaaggggggccgccgctgaccctgggcctggagggggagcaccagcggtccaacgccgccttggccttgcagctggcccactgctggctgcagcggcaggaccgccatggtgctggggagccaaaggcatccaggccagggctcctgtggcagctgcccctggcacctgtgttccagcccacatcccacatgcggctcgggcttcggaacacggagtggccgggccggacgcaggtgctgcggcgcgggcccctcacctggtacctggacggtgcgcacaccgccagcagcgcgcaggcctgcgtgcgctggttccgccaggcgctgcagggccgcgagaggccgagcggtggccccgaggttcgagtcttgctcttcaatgctaccggggaccgggacccggcggccctgctgaagctgctgcagccctgccagtttgactatgccgtcttctgccctaacctgacagaggtgtcatccacaggcaacgcagaccaacagaacttcacagtgacactggaccaggtcctgctccgctgcctggaacaccagcagcactggaaccacctggacgaagagcaggccagcccggacctctggagtgcccccagcccagagcccggtgggtccgcatccctgcttctggcgccccacccaccccacacctgcagtgccagctccctcgtcttcagctgcatttcacatgccttgcaatggatcagccaaggccgagaccccatcttccagccacctagtcccccaaagggcctcctcacccaccctgtggctcacagtggggccagcatactccgtgaggctgctgccatccatgtgctagtcactggcagcctgcacctggtgggtggtgtcctgaagctgctggagcccgcactgtcccagtagccaaggcccggggttggaggtgggagcttcccacacctgcctgcgttctccccatgaacttacatactaggtgccttttgtttttggctttcctggttctgtctagactggcctaggggccagggctttgggatgggaggccgggagaggatgtcttttttaaggctctgtgccttggtctctccttcctcttggctgagatagcagaggggctccccgggtctctcactgttgcagtggcctggccgttcagcctgtctcccccaacaccccgcctgcctcctggctcaggcccagcttattgtgtgcgctgcctggccaggccctgggtcttgccatgtgctgggtggtagatttcctcctcccagtgccttctgggaagggagagggcctctgcctgggacactgcgggacagagggtggctggagtgaattaaagcctttgttttttaaagaaatggcaaagccttcgactgacccttgaccccctgctccctcagcagagacggagggaggggctgctggtggtcagggacctgcactgtgtagagggagcctggctgtgtggcctggaacaagtccctccctccctgtgcgcctcaggtggcctgtctgtgagatgagaagaagaccagactgaagcctgttcaccatatgccaggcagtgctttctgcagacccccttgcagagaccttgtgatggagaattatacccatttgacagacgagggaactgtggctggtttcaagaagccatggaggccgggcacggtggctcacgcctgtaatcccagcactttgggaggctgaggcgggcggatcatgaggtcaagaggtcgagaccatctggccaacatggtgaaaccccgtctctgctaaaaatacaaaaattattagctg

SEQ ID NO: 453874 - DNA, 2207 bp, Homo sapiens
gcggggcgtctcccgcccgggcctagagcgctgccgggggcgccgggactatgtcgcgggcgcggagccacctgcgcgccgctctattcctggcagcggcgtctgcgcgcggcgtaacgacccaggtcgcggcgcggcggggcttgagcgcgtggccggtgccgcaggagccgagcatggagtaccaggatgccgtgcgcatgctcaataccctgcagaccaatgccggctacctggagcaggtgaagcgccagcggggtgaccctcagacacagttggaagccatggaactgtacctggcacggagtgggctgcaggtggaggacttggaccggctgaacatcatccacgtcactgggacgaaggggaagggctccacctgtgccttcacggaatgtatcctccgaagctatggcctgaagacgggattctttagctctccccacctggtgcaggttcgggagcggatccgcatcaatgggcagcccatcagtcctgagctcttcaccaagtacttctggcgcctctaccaccggctggaggagaccaaggatggcagctgtgtctccatgcccccctacttccgcttcctgacactcatggccttccacgtcttcctccaagagaaggtggacctggcagtggtggaggtgggcattggcggggcttatgactgcaccaacatcatcaggaagcctgtggtgtgcggagtctcctctcttggcatcgaccacaccagcctcctgggggatacggtggagaagatcgcatggcagaaagggggcatctttaagcaaggtgtccctgccttcactgtgctccaacctgaaggtcccctggcagtgctgagggaccgagcccagcagatctcatgtcctctatacctgtgtccgatgctggaggccctcgaggaaggggggccgccgctgaccctgggcctggagggggagcaccagcggtccaacgccgccttggccttgcagctggcccactgctggctgcagcggcaggaccgccatggtgctggggagccaaaggcatccaggccagggctcctgtggcagctgcccctggcacctgtgttccagcccacatcccacatgcggctcgggcttcggaacacggagtggccgggccggacgcaggtgctgcggcgcgggcccctcacctggtacctggacggtgcgcacaccgccagcagcgcgcaggcctgcgtgcgctggttccgccaggcgctgcagggccgcgagaggccgagcggtggccccgaggttcgagtcttgctcttcaatgctaccggggaccgggacccggcggccctgctgaagctgctgcagaccaacagaacttcacagtgacactggaccaggtcctgctccgctgcctggaacaccagcagcactggaaccacctggacgaagagcaggccagcccggacctctggagtgcccccagcccagagcccggtgggtccgcatccctgcttctggcgccccacccaccccacacctgcagtgccagctccctcgtcttcagctgcatttcacatgccttgcaatggatcagccaaggccgagaccccatcttccagccacctagtcccccaaagggcctcctcacccaccctgtggctcacagtggggccagcatactccgtgaggctgctgccatccatgtgctagtcactggcagcctgcacctggtgggtggtgtcctgaagctgctggagcccgcactgtcccagtagccaaggcccggggttggaggtgggagcttcccacacctgcctgcgttctccccatgaacttacatactaggtgccttttgtttttggctttcctggttctgtctagactggcctaggggccagggctttgggatgggaggccgggagaggatgtcttttttaaggctctgtgccttggtctctccttcctcttggctgagatagcagaggggctccccgggtctctcactgttgcagtggcctggccgttcagcctgtctcccccaacaccccgcctgcctcctggctcaggcccagcttattgtgtgcgctgcctggccaggccctgggtcttgccatgtgctgggtggtagatttcctcctcccagtgccttctgggaagggagagggcctctgcctgggacactgcgggacagagggtggctggagtgaattaaagcctttgttttttaaagaaatg

SEQ ID NO: 453875 - DNA, 2286 bp, Homo sapiens
agactcccatttttgccagagctggaaagatgccatactctctgttgcttaacctacaggctaggctaacagtgctggcatggcaggcgggcctggtactggccttgttgccctggcttggccactggtctgctggctgtctctgtgcctgtggaccctgagtgagccttaacctactatctgggcactgtggttgccaggatgccgtgcgcatgctcaataccctgcagaccaatgccggctacctggagcaggtgaagcgccagcggggtgaccctcagacacagttggaagccatggaactgtacctggcacggagtgggctgcaggtggaggacttggaccggctgaacatcatccacgtcactgggacgaaggggaagggctccacctgtgccttcacggaatgtatcctccgaagctatggcctgaagacgggattctttagctctccccacctggtgcaggttcgggagcggatccgcatcaatgggcagcccatcagtcctgagctcttcaccaagtacttctggcgcctctaccaccggctggaggagaccaaggatggcagctgtgtctccatgcccccctacttccgcttcctgacactcatggccttccacgtcttcctccaagagaaggtggacctggcagtggtggaggtgggcattggcggggcttatgactgcaccaacatcatcaggaagcctgtggtgtgcggagtctcctctcttggcatcgaccacaccagcctcctgggggatacggtggagaagatcgcatggcagaaagggggcatctttaagcaaggtgtccctgccttcactgtgctccaacctgaaggtcccctggcagtgctgagggaccgagcccagcagatctcatgtcctctatacctgtgtccgatgctggaggccctcgaggaaggggggccgccgctgaccctgggcctggagggggagcaccagcggtccaacgccgccttggccttgcagctggcccactgctggctgcagcggcaggaccgccatggtgctggggagccaaaggcatccaggccagggctcctgtggcagctgcccctggcacctgtgttccagcccacatcccacatgcggctcgggcttcggaacacggagtggccgggccggacgcaggtgctgcggcgcgggcccctcacctggtacctggacggtgcgcacaccgccagcagcgcgcaggcctgcgtgcgctggttccgccaggcgctgcagggccgcgagaggccgagcggtggccccgaggttcgagtcttgctcttcaatgctaccggggaccgggacccggcggccctgctgaagctgctgcagccctgccagtttgactatgccgtcttctgccctaacctgacagaggtgtcatccacaggcaacgcagaccaacagaacttcacagtgacactggaccaggtcctgctccgctgcctggaacaccagcagcactggaaccacctggacgaagagcaggccagcccggacctctggagtgcccccagcccagagcccggtgggtccgcatccctgcttctggcgccccacccaccccacacctgcagtgccagctccctcgtcttcagctgcatttcacatgccttgcaatggatcagccaaggccgagaccccatcttccagccacctagtcccccaaagggcctcctcacccaccctgtggctcacagtggggccagcatactccgtgaggctgctgccatccatgtgctagtcactggcagcctgcacctggtgggtggtgtcctgaagctgctggagcccgcactgtcccagtagccaaggcccggggttggaggtgggagcttcccacacctgcctgcgttctccccatgaacttacatactaggtgccttttgtttttggctttcctggttctgtctagactggcctaggggccagggctttgggatgggaggccgggagaggatgtcttttttaaggctctgtgccttggtctctccttcctcttggctgagatagcagaggggctccccgggtctctcactgttgcagtggcctggccgttcagcctgtctcccccaacaccccgcctgcctcctggctcaggcccagcttattgtgtgcgctgcctggccaggccctgggtcttgccatgtgctgggtggtagatttcctcctcccagtgccttctgggaagggagagggcctctgcctgggacactgcgggacagagggtggctggagtgaattaaagcctttgttttttaaagaaatg

SEQ ID NO: 453876 - DNA, 2368 bp, Homo sapiens
gcggggcgtctcccgcccgggcctagagcgctgccgggggcgccgggactatgtcgcgggcgcggagccacctgcgcgccgctctattcctggcagcggcgtctgcgcgcggcgtaacgacccaggtcgcggcgcggcggggcttgagcgcgtggccggtgccgcaggagccgagcatggagtaccaggtatcaggcgggccagcgggccagcgggcctgggcgcgacgacacgtgggcctgcgctgagccgcagaacatccgggctccgctagccgagagggatgccgtgcgcatgctcaataccctgcagaccaatgccggctacctggagcaggtgaagcgccagcggggtgaccctcagacacagttggaagccatggaactgtacctggcacggagtgggctgcaggtggaggacttggaccggctgaacatcatccacgtcactgggacgaaggggaagggctccacctgtgccttcacggaatgtatcctccgaagctatggcctgaagacgggattctttagctctccccacctggtgcaggttcgggagcggatccgcatcaatgggcagcccatcagtcctgagctcttcaccaagtacttctggcgcctctaccaccggctggaggagaccaaggatggcagctgtgtctccatgcccccctacttccgcttcctgacactcatggccttccacgtcttcctccaagagaaggtggacctggcagtggtggaggtgggcattggcggggcttatgactgcaccaacatcatcaggaagcctgtggtgtgcggagtctcctctcttggcatcgaccacaccagcctcctgggggatacggtggagaagatcgcatggcagaaagggggcatctttaagcaaggtgtccctgccttcactgtgctccaacctgaaggtcccctggcagtgctgagggaccgagcccagcagatctcatgtcctctatacctgtgtccgatgctggaggccctcgaggaaggggggccgccgctgaccctgggcctggagggggagcaccagcggtccaacgccgccttggccttgcagctggcccactgctggctgcagcggcaggaccgccatggtgctggggagccaaaggcatccaggccagggctcctgtggcagctgcccctggcacctgtgttccagcccacatcccacatgcggctcgggcttcggaacacggagtggccgggccggacgcaggtgctgcggcgcgggcccctcacctggtacctggacggtgcgcacaccgccagcagcgcgcaggcctgcgtgcgctggttccgccaggcgctgcagggccgcgagaggccgagcggtggccccgaggttcgagtcttgctcttcaatgctaccggggaccgggacccggcggccctgctgaagctgctgcagccctgccagtttgactatgccgtcttctgccctaacctgacagaggtgtcatccacaggcaacgcagaccaacagaacttcacagtgacactggaccaggtcctgctccgctgcctggaacaccagcagcactggaaccacctggacgaagagcaggccagcccggacctctggagtgcccccagcccagagcccggtgggtccgcatccctgcttctggcgccccacccaccccacacctgcagtgccagctccctcgtcttcagctgcatttcacatgccttgcaatggatcagccaaggccgagaccccatcttccagccacctagtcccccaaagggcctcctcacccaccctgtggctcacagtggggccagcatactccgtgaggctgctgccatccatgtgctagtcactggcagcctgcacctggtgggtggtgtcctgaagctgctggagcccgcactgtcccagtagccaaggcccggggttggaggtgggagcttcccacacctgcctgcgttctccccatgaacttacatactaggtgccttttgtttttggctttcctggttctgtctagactggcctaggggccagggctttgggatgggaggccgggagaggatgtcttttttaaggctctgtgccttggtctctccttcctcttggctgagatagcagaggggctccccgggtctctcactgttgcagtggcctggccgttcagcctgtctcccccaacaccccgcctgcctcctggctcaggcccagcttattgtgtgcgctgcctggccaggccctgggtcttgccatgtgctgggtggtagatttcctcctcccagtgccttctgggaagggagagggcctctgcctgggacactgcgggacagagggtggctggagtgaattaaagcctttgttttttaaagaaatg

SEQ ID NO: 453877 - DNA, 2314 bp, Homo sapiens
ccctgtctcaaaaataaataaataaaaactacaatcatttttgggataaaaacctagccttcaacttgggcccacatggccttgagggccagcccagggctgcagcttgaacattggttgtgggctttgtctctgagagctgtaagacagatgacattgtgggacagatgtcagcagagtgactgattggtatgggactgttggagcccatagaatgtgcaagaccagcctgggtgaggaggctgtcttagttgagaccaacgtggtgaatagggtgagccaggtgcagaggcctggagatagaagatggggaggactggggggctacagatagtccggggggatggggcaccaggaacaaaccgagggacacaggagagatgaggcacggaggccagtagcatcagtccctgcagggtgggggaaggccaggacgctcgggaagggagtcctgatgaccccagctgtcccggcagctctccccacctggtgcaggttcgggagcggatccgcatcaatgggcagcccatcagtcctgagctcttcaccaagtacttctggcgcctctaccaccggctggaggagaccaaggatggcagctgtgtctccatgcccccctacttccgcttcctgacactcatggccttccacgtcttcctccaagagaaggtggacctggcagtggtggaggtgggcattggcggggcttatgactgcaccaacatcatcaggaagcctgtggtgtgcggagtctcctctcttggcatcgaccacaccagcctcctgggggatacggtggagaagatcgcatggcagaaagggggcatctttaagcaaggtgtccctgccttcactgtgctccaacctgaaggtcccctggcagtgctgagggaccgagcccagcagatctcatgtcctctatacctgtgtccgatgctggaggccctcgaggaaggggggccgccgctgaccctgggcctggagggggagcaccagcggtccaacgccgccttggccttgcagctggcccactgctggctgcagcggcaggaccgccatggtgctggggagccaaaggcatccaggccagggctcctgtggcagctgcccctggcacctgtgttccagcccacatcccacatgcggctcgggcttcggaacacggagtggccgggccggacgcaggtgctgcggcgcgggcccctcacctggtacctggacggtgcgcacaccgccagcagcgcgcaggcctgcgtgcgctggttccgccaggcgctgcagggccgcgagaggccgagcggtggccccgaggttcgagtcttgctcttcaatgctaccggggaccgggacccggcggccctgctgaagctgctgcagccctgccagtttgactatgccgtcttctgccctaacctgacagaggtgtcatccacaggcaacgcagaccaacagaacttcacagtgacactggaccaggtcctgctccgctgcctggaacaccagcagcactggaaccacctggacgaagagcaggccagcccggacctctggagtgcccccagcccagagcccggtgggtccgcatccctgcttctggcgccccacccaccccacacctgcagtgccagctccctcgtcttcagctgcatttcacatgccttgcaatggatcagccaaggccgagaccccatcttccagccacctagtcccccaaagggcctcctcacccaccctgtggctcacagtggggccagcatactccgtgaggctgctgccatccatgtgctagtcactggcagcctgcacctggtgggtggtgtcctgaagctgctggagcccgcactgtcccagtagccaaggcccggggttggaggtgggagcttcccacacctgcctgcgttctccccatgaacttacatactaggtgccttttgtttttggctttcctggttctgtctagactggcctaggggccagggctttgggatgggaggccgggagaggatgtcttttttaaggctctgtgccttggtctctccttcctcttggctgagatagcagaggggctccccgggtctctcactgttgcagtggcctggccgttcagcctgtctcccccaacaccccgcctgcctcctggctcaggcccagcttattgtgtgcgctgcctggccaggccctgggtcttgccatgtgctgggtggtagatttcctcctcccagtgccttctgggaagggagagggcctctgcctgggacactgcgggacagagggtggctggagtgaattaaagcctttgttttttaaagaaatg

SEQ ID NO: 453878 - DNA, 2205 bp, Homo sapiens
tgggggtggggacagggaccaggaagttgggcccgggccgccggggctgggaattcggagactatagcgtccccgccccgggttgggaagtgggaagtggcacaggagctaggatccagaagcccagaggctcagcggtgcttctggagttccagtgatcccggagtctgaaccggcagtgagagtggggaaagagggatgccgtgcgcatgctcaataccctgcagaccaatgccggctacctggagcaggtgaagcgccagcggggtgaccctcagacacagttggaagccatggaactgtacctggcacggagtgggctgcaggtggaggacttggaccggctgaacatcatccacgtcactgggacgaaggggaagggctccacctgtgccttcacggaatgtatcctccgaagctatggcctgaagacgggattctttagctctccccacctggtgcaggttcgggagcggatccgcatcaatgggcagcccatcagtcctgagctcttcaccaagtacttctggcgcctctaccaccggctggaggagaccaaggtggacctggcagtggtggaggtgggcattggcggggcttatgactgcaccaacatcatcaggaagcctgtggtgtgcggagtctcctctcttggcatcgaccacaccagcctcctgggggatacggtggagaagatcgcatggcagaaagggggcatctttaagcaaggtgtccctgccttcactgtgctccaacctgaaggtcccctggcagtgctgagggaccgagcccagcagatctcatgtcctctatacctgtgtccgatgctggaggccctcgaggaaggggggccgccgctgaccctgggcctggagggggagcaccagcggtccaacgccgccttggccttgcagctggcccactgctggctgcagcggcaggaccgccatggtgctggggagccaaaggcatccaggccagggctcctgtggcagctgcccctggcacctgtgttccagcccacatcccacatgcggctcgggcttcggaacacggagtggccgggccggacgcaggtgctgcggcgcgggcccctcacctggtacctggacggtgcgcacaccgccagcagcgcgcaggcctgcgtgcgctggttccgccaggcgctgcagggccgcgagaggccgagcggtggccccgaggttcgagtcttgctcttcaatgctaccggggaccgggacccggcggccctgctgaagctgctgcagccctgccagtttgactatgccgtcttctgccctaacctgacagaggtgtcatccacaggcaacgcagaccaacagaacttcacagtgacactggaccaggtcctgctccgctgcctggaacaccagcagcactggaaccacctggacgaagagcaggccagcccggacctctggagtgcccccagcccagagcccggtgggtccgcatccctgcttctggcgccccacccaccccacacctgcagtgccagctccctcgtcttcagctgcatttcacatgccttgcaatggatcagccaaggccgagaccccatcttccagccacctagtcccccaaagggcctcctcacccaccctgtggctcacagtggggccagcatactccgtgaggctgctgccatccatgtgctagtcactggcagcctgcacctggtgggtggtgtcctgaagctgctggagcccgcactgtcccagtagccaaggcccggggttggaggtgggagcttcccacacctgcctgcgttctccccatgaacttacatactaggtgccttttgtttttggctttcctggttctgtctagactggcctaggggccagggctttgggatgggaggccgggagaggatgtcttttttaaggctctgtgccttggtctctccttcctcttggctgagatagcagaggggctccccgggtctctcactgttgcagtggcctggccgttcagcctgtctcccccaacaccccgcctgcctcctggctcaggcccagcttattgtgtgcgctgcctggccaggccctgggtcttgccatgtgctgggtggtagatttcctcctcccagtgccttctgggaagggagagggcctctgcctgggacactgcgggacagagggtggctggagtgaattaaagcctttgttttttaaagaaatg

SEQ ID NO: 453879 - DNA, 1491 bp, Homo sapiens
  misc_feature (6)..(6): n is a, c, g, or t
  misc_feature (9)..(9): n is a, c, g, or t
  misc_feature (11)..(11): n is a, c, g, or t
  misc_feature (17)..(17): n is a, c, g, or t
  misc_feature (20)..(20): n is a, c, g, or t
gggggnggngnaaaaantangcaggtacgaggctgggtgttactgaaggtcccctggcagtgctgagggaccgagcccagcagatctcatgtcctctatacctgtgtccgatgctggaggccctcgaggaaggggggccgccgctgaccctgggcctggagggggagcaccagcggtccaacgccgccttggccttgcagctggcccactgctggctgcagcggcaggaccgccatggtgctggggagccaaaggcatccaggccagggctcctgtggcagctgcccctggcacctgtgttccagcccacatcccacatgcggctcgggcttcggaacacggagtggccgggccggacgcaggtgctgcggcgcgggcccctcacctggtacctggacggtgcgcacaccgccagcagcgcgcaggcctgcgtgcgctggttccgccaggcgctgcagggccgcgagaggccgagcggtggccccgaggttcgagtcttgctcttcaatgctaccggggaccgggacccggcggccctgctgaagctgctgcagccctgccagtttgactatgccgtcttctgccctaacctgacagaggtgtcatccacaggcaacgcagaccaacagaacttcacagtgacactggaccaggtcctgctccgctgcctggaacaccagcagcactggaaccacctggacgaagagcaggccagcccggacctctggagtgcccccagcccagagcccggtgggtccgcatccctgcttctggcgccccacccaccccacacctgcagtgccagctccctcgtcttcagctgcatttcacatgccttgcaatggatcagccaaggccgagaccccatcttccagccacctagtcccccaaagggcctcctcacccaccctgtggctcacagtggggccagcatactccgtgaggctgctgccatccatgtgctagtcactggcagcctgcacctggtgggtggtgtcctgaagctgctggagcccgcactgtcccagtagccaaggcccggggttggaggtgggagcttcccacacctgcctgcgttctccccatgaacttacatactaggtgccttttgtttttggctttcctggttctgtctagactggcctaggggccagggctttgggatgggaggccgggagaggatgtcttttttaaggctctgtgccttggtctctccttcctcttggctgagatagcagaggggctccccgggtctctcactgttgcagtggcctggccgttcagcctgtctcccccaacaccccgcctgcctcctggctcaggcccagcttattgtgtgcgctgcctggccaggccctgggtcttgccatgtgctgggtggtagatttcctcctcccagtgccttctgggaagggagagggcctctgcctgggacactgcgggacagagggtggctggagtgaattaaagcctttgttttttaaagaaatg

SEQ ID NO: 453880 - DNA, 2059 bp, Homo sapiens
gcggggcgtctcccgcccgggcctagagcgctgccgggggcgccgggactatgtcgcgggcgcggagccacctgcgcgccgctctattcctggcagcggcgtctgcgcgcggcgtaacgacccaggtcgcggcgcggcggggcttgagcgcgtggccggtgccgcaggagccgagcatggagtaccaggatgccgtgcgcatgctcaataccctgcagaccaatgccggctacctggagcaggtgaagcgccagcggggtgaccctcagacacagttggaagccatggaactgtacctggcacggagtgggctgcaggtggaggacttggaccggctgaacatcatccacgtcactgggacgaaggggaagggctccacctgtgccttcacggaatgtatcctccgaagctatggcctgaagacgggattctttagctctccccacctggtgcaggttcgggagcggatccgcatcaatgggcagcccatcagtcctgagctcttcaccaagtacttctggcgcctctaccaccggctggaggagaccaaggatggcagctgtgtctccatgcccccctacttccgcttcctgacactcatggccttccacgtcttcctccaagagaaggtggacctggcagtggtggaggtgggcattggcggggcttatgactgcaccaacatcatcaggaagcctgtggtgtgcggagtctcctctcttggcatcgaccacaccagcctcctgggggatacggtggagaagatcgcatggcagaaagggggcatctttaagcaaggtgtccctgccttcactgtgctccaacctgaaggtcccctggcagtgctgagggaccgagcccagcagatctcagtgctggggagccaaaggcatccaggccagggctcctgtggcagctgcccctggcacctgtgttccagcccacatcccacatgcggctcgggcttcggaacacggagtggccgggccggacgcaggtgctgcggcgcgggcccctcacctggtacctggacggtgcgcacaccgccagcagcgcgcaggcctgcgtgcgctggttccgccaggcgctgcagggccgcgagaggccgagcggtggccccgaggttcgagtcttgctcttcaatgctaccggggaccgggacccggcggccctgctgaagctgctgcagaccaacagaacttcacagtgacactggaccaggtcctgctccgctgcctggaacaccagcagcactggaaccacctggacgaagagcaggccagcccggacctctggagtgcccccagcccagagcccggtgggtccgcatccctgcttctggcgccccacccaccccacacctgcagtgccagctccctcgtcttcagctgcatttcacatgccttgcaatggatcagccaaggccgagaccccatcttccagccacctagtcccccaaagggcctcctcacccaccctgtggctcacagtggggccagcatactccgtgaggctgctgccatccatgtgctagtcactggcagcctgcacctggtgggtggtgtcctgaagctgctggagcccgcactgtcccagtagccaaggcccggggttggaggtgggagcttcccacacctgcctgcgttctccccatgaacttacatactaggtgccttttgtttttggctttcctggttctgtctagactggcctaggggccagggctttgggatgggaggccgggagaggatgtcttttttaaggctctgtgccttggtctctccttcctcttggctgagatagcagaggggctccccgggtctctcactgttgcagtggcctggccgttcagcctgtctcccccaacaccccgcctgcctcctggctcaggcccagcttattgtgtgcgctgcctggccaggccctgggtcttgccatgtgctgggtggtagatttcctcctcccagtgccttctgggaagggagagggcctctgcctgggacactgcgggacagagggtggctggagtgaattaaagcctttgttttttaaagaaatg

SEQ ID NO: 453881 - DNA, 2116 bp, Homo sapiens
tgggggtggggacagggaccaggaagttgggcccgggccgccggggctgggaattcggagactatagcgtccccgccccgggttgggaagtgggaagtggcacaggagctaggatccagaagcccagaggctcagcggtgcttctggagttccagtgatcccggagtctgaaccggcagtgagagtggggaaagagggatgccgtgcgcatgctcaataccctgcagaccaatgccggctacctggagcaggtgaagcgccagcggggtgaccctcagacacagttggaagccatggaactgtacctggcacggagtgggctgcaggtggaggacttggaccggctgaacatcatccacgtcactgggacgaaggggaagggctccacctgtgccttcacggaatgtatcctccgaagctatggcctgaagacgggattctttaggttcgggagcggatccgcatcaatgggcagcccatcagtcctgagctcttcaccaagtacttctggcgcctctaccaccggctggaggagaccaaggatggcagctgtgtctccatgcccccctacttccgcttcctgacactcatggccttccacgtcttcctccaagagaaggtggacctggcagtggtggaggtgggcattggcggggcttatgactgcaccaacatcatcaggaagcctgtggtgtgcggagtctcctctcttggcatcgaccacaccagcctcctgggggatacggtggagaagatcgcatggcagaaagggggcatctttaagcaaggtgtccctgccttcactgtgctccaacctgaaggtcccctggcagtgctgagggaccgagcccagcagatctcagtgctggggagccaaaggcatccaggccagggctcctgtggcagctgcccctggcacctgtgttccagcccacatcccacatgcggctcgggcttcggaacacggagtggccgggccggacgcaggtgctgcggcgcgggcccctcacctggtacctggacggtgcgcacaccgccagcagcgcgcaggcctgcgtgcgctggttccgccaggcgctgcagggccgcgagaggccgagcggtggccccgaggttcgagtcttgctcttcaatgctaccggggaccgggacccggcggccctgctgaagctgctgcagccctgccagtttgactatgccgtcttctgccctaacctgacagaggtgtcatccacaggcaacgcagaccaacagaacttcacagtgacactggaccaggtcctgctccgctgcctggaacaccagcagcactggaaccacctggacgaagagcaggccagcccggacctctggagtgcccccagcccagagcccggtgggtccgcatccctgcttctggcgccccacccaccccacacctgcagtgccagctccctcgtcttcagctgcatttcacatgccttgcaatggatcagccaaggccgagaccccatcttccagccacctagtcccccaaagggcctcctcacccaccctgtggctcacagtggggccagcatactccgtgaggctgctgccatccatgtgctagtcactggcagcctgcacctggtgggtggtgtcctgaagctgctggagcccgcactgtcccagtagccaaggcccggggttggaggtgggagcttcccacacctgcctgcgttctccccatgaacttacatactaggtgccttttgtttttggctttcctggttctgtctagactggcctaggggccagggctttgggatgggaggccgggagaggatgtcttttttaaggctctgtgccttggtctctccttcctcttggctgagatagcagaggggctccccgggtctctcactgttgcagtggcctggccgttcagcctgtctcccccaacaccccgcctgcctcctggctcaggcccagcttattgtgtgcgctgcctggccaggccctgggtcttgccatgtgctgggtggtagatttcctcctcccagtgccttctgggaagggagagggcctctgcctgggacactgcgggacagagggtggctggagtgaattaaagcctttgttttttaaagaaatg

SEQ ID NO: 453882 - DNA, 1050 bp, Homo sapiens
gcggggcgtctcccgcccgggcctagagcgctgccgggggcgccgggactatgtcgcgggcgcggagccacctgcgcgccgctctattcctggcagcggcgtctgcgcgcggcgtaacgacccaggtcgcggcgcggcggggcttgagcgcgtggccggtgccgcaggagccgagcatggagtaccaggatgccgtgcgcatgctcaataccctgcagaccaatgccggctacctggagcaggtgaagcgccagcggggtgaccctcagacacagttggaagccatggaactgtacctggcacggagtgggctgcaggtggaggacttggaccggctgaacatcatccacgtcactgggacgaaggggaagggctccacctgtgccttcacggaatgtatcctccgaagctatggcctgaagacgggattctttagctctccccacctggtgcaggttcgggagcggatccgcatcaatgggcagcccatcagtcctgagctcttcaccaagtacttctggcgcctctaccaccggctggaggagaccaaggatggcagctgtgtctccatgcccccctacttccgcttcctgacactcatggccttccacgtcttcctccaagagaaggtggacctggcagtggtggaggtgggcattggcggggcttatgactgcaccaacatcatcaggaagcctgtggtgtgcggagtctcctctcttggcatcgaccacaccagcctcctgggggatacggtggagaagatcgcatggcagaaagggggcatctttaagcaaggtgtccctgccttcactgtgctccaacctgaaggtcccctggcagtgctgagggaccgagcccagcagatctcacacagttggaagccatggaactgtacctggcacggagtgggctgcaggtggaggagcttggaccggctgaacatcatccacgtcactgggacgaaggggaagggctccacctgtgccttcacggaatgtatcctccgaagctatggcctgaagacgggattctttagctctccccacc

SEQ ID NO: 453883 - DNA, 639 bp, Homo sapiens
tgggggtggggacagggaccaggaagttgggcccgggccgccggggctgggaattcggagactatagcgtccccgccccgggttgggaagtgggaagtggcacaggagctaggatccagaagcccagaggctcagcggtgcttctggagttccagtgatcccggagtctgaaccggcagtgagagtggggaaagagggatgccgtgcgcatgctcaataccctgcagaccaatgccggctacctggagcaggtgaagcgccagcggggtgaccctcagacacagttggaagccatggaactgtacctggcacggagtgggctgcagaggatgtcttttttaaggctctgtgccttggtctctccttcctcttggctgagatagcagaggggctccccgggtctctcactgttgcagtggcctggccgttcagcctgtctcccccaacaccccgcctgcctcctggctcaggcccagcttattgtgtgcgctgcctggccaggccctgggtcttgccatgtgctgggtggtagatttcctcctcccagtgccttctgggaagggagagggcctctgcctgggacactgcgggacagagggtggctggagtgaattaaagcctttgttttttaaagaaatg

SEQ ID NO: 453884 - DNA, 418 bp, Homo sapiens
tacgcctgtagttccagctacttgggagactgaggcaggagaatcactcgaacccgggaggcagacgttgcagtgagccgagattgcgccacagcactccagcctgggtgacagagtgagacttcatctcgaaaaagaaaagaaaagaaacatgagggatgagagacagtggtagcccagacccagggatgtgggggccagagataggagtgtggaggatgctaggtagccctttctctctccttcttccctccacacaaggtgtccctgccttcactgtgctccaacctgaaggtcccctggcagtgctgagggaccgagcccagcagatctcaagtaagtctgattggaatggggcagcggcagggtgggtttgtgtccctcctgtttgaggaggcactgcatcctctggggcctc

SEQ ID NO: 453885 - DNA, 2274 bp, Homo sapiens
gcggggcgtctcccgcccgggcctagagcgctgccgggggcgccgggactatgtcgcgggcgcggagccacctgcgcgccgctctattcctggcagcggcgtctgcgcgcggcgtaacgacccaggtcgcggcgcggcggggcttgagcgcgtggccggtgccgcaggagccgagcatggagtaccaggatgccgtgcgcatgctcaataccctgcagaccaatgccggctacctggagcaggtgaagcgccagcggggtgaccctcagacacagttggaagccatggaactgtacctggcacggagtgggctgcaggtggaggacttggaccggctgaacatcatccacgtcactgggacgaaggggaagggctccacctgtgccttcacggaatgtatcctccgaagctatggcctgaagacgggattctttagctctccccacctggtgcaggttcgggagcggatccgcatcaatgggcagcccatcagtcctgagctcttcaccaagtacttctggcgcctctaccaccggctggaggagaccaaggatggcagctgtgtctccatgcccccctacttccgcttcctgacactcatggccttccacgtcttcctccaagagaaggtggacctggcagtggtggaggtgggcattggcggggcttatgactgcaccaacatcatcaggaagcctgtggtgtgcggagtctcctctcttggcatcgaccacaccagcctcctgggggatacggtggagaagatcgcatggcagaaagggggcatctttaagcaaggtgtccctgccttcactgtgctccaacctgaaggtcccctggcagtgctgagggaccgagcccagcagatctcatgtcctctatacctgtgtccgatgctggaggccctcgaggaaggggggccgccgctgaccctgggcctggagggggagcaccagcggtccaacgccgccttggccttgcagctggcccactgctggctgcagcggcaggaccgccatggtgctggggagccaaaggcatccaggccagggctcctgtggcagctgcccctggcacctgtgttccagcccacatcccacatgcggctcgggcttcggaacacggagtggccgggccggacgcaggtgctgcggcgcgggcccctcacctggtacctggacggtgcgcacaccgccagcagcgcgcaggcctgcgtgcgctggttccgccaggcgctgcagggccgcgagaggccgagcggtggccccgaggttcgagtcttgctcttcaatgctaccggggaccgggacccggcggccctgctgaagctgctgcagccctgccagtttgactatgccgtcttctgccctaacctgacagaggtgtcatccacaggcaacgcagaccaacagaacttcacagtgacactggaccaggtcctgctccgctgcctggaacaccagcagcactggaaccacctggacgaagagcaggccagcccggacctctggagtgcccccagcccagagcccggtgggtccgcatccctgcttctggcgccccacccaccccacacctgcagtgccagctccctcgtcttcagctgcatttcacatgccttgcaatggatcagccaaggccgagaccccatcttccagccacctagtcccccaaagggcctcctcacccaccctgtggctcacagtggggccagcatactccgtgaggctgctgccatccatgtgctagtcactggcagcctgcacctggtgggtggtgtcctgaagctgctggagcccgcactgtcccagtagccaaggcccggggttggaggtgggagcttcccacacctgcctgcgttctccccatgaacttacatactaggtgccttttgtttttggctttcctggttctgtctagactggcctaggggccagggctttgggatgggaggccgggagaggatgtcttttttaaggctctgtgccttggtctctccttcctcttggctgagatagcagaggggctccccgggtctctcactgttgcagtggcctggccgttcagcctgtctcccccaacaccccgcctgcctcctggctcaggcccagcttattgtgtgcgctgcctggccaggccctgggtcttgccatgtgctgggtggtagatttcctcctcccagtgccttctgggaagggagagggcctctgcctgggacactgcgggacagagggtggctggagtgaattaaagcctttgttttttaaagaaatg

SEQ ID NO: 453886 - DNA, 1047 bp, Homo sapiens
  misc_feature (6)..(6): n is a, c, g, or t
  misc_feature (9)..(9): n is a, c, g, or t
  misc_feature (11)..(11): n is a, c, g, or t
  misc_feature (17)..(17): n is a, c, g, or t
  misc_feature (20)..(20): n is a, c, g, or t
gggggnggngnaaaaantangcaggtacgaggctgggtgttactgaaggtcccctggcagtgctgagggaccgagcccagcagatctcatgtcctctatacctgtgtccgatgctggaggccctcgaggaaggggggccgccgctgaccctgggcctggagggggagcaccagcggtccaacgccgccttggccttgcagctggcccactgctggctgcagcggcaggaccgccatggtgctggggagccaaaggcatccaggccagggctcctgtggcagctgcccctggcacctgtgttccagcccacatcccacatgcggctcgggcttcggaacacggagtggccgggccggacgcaggtgctgcggcgcgggcccctcacctggtacctggacggtgcgcacaccgccagcagcgcgcaggcctgcgtgcgctggttccgccaggcgctgcagggccgcgagaggccgagcggtggccccgaggttcgagtcttgctcttcaatgctaccggggaccgggacccggcggccctgctgaagctgctgcagccctgccagtttgactatgccgtcttctgccctaacctgacagaggtgtcatccacaggcaacgcagaccaacagaacttcacagtgacactggaccaggtcctgctccgctgcctggaacaccagcagcactggaaccacctggacgaagagcaggccagcccggacctctggagtgcccccagcccagagcccggtggcctgtctgtgagatgagaagaagaccagactgaagcctgttcaccatatgccaggcagtgctttctgcagacccccttgcagagaccttgtgatggagaattatacccatttgacagacgagggaactgtggctggtttcaagaagccatggaggccgggcacggtggctcacgcctgtaatcccagcactttgggaggctgaggcgggcggatcatgaggtcaagaggtcgagaccatctggccaacatggtgaaaccccgtctctgctaaaaatacaaaaattattagctg

SEQ ID NO: 453887 - DNA, 1187 bp, Homo sapiens
tggctacctggcttctttttgcccaagtgatttggtgaaacaaagcctcttcctccagcggacttggactcttaagtcaggggtgtcgtgtgtccacgctgtactttgtatacgcctctccctggccaggatctcaccctggcagggcaagggcaaaacgggccctaactgtaaggtgggtgggctgggataaggaggcctggaagaggccagataaagccagccccaaggtctggaagcctcccaagcatagccccctcccctcccacccacctgcctgtctgcgtgcttacctttaacctccacccagttgttacttaactcgcggtaaggttctgaccagtcccatgctccactccagaaacccgccagggaggctaagtccctgggctgaccctaggatgagggcaggaacctatcaggtaaaacctttctccctgcacactggaaaggccagaacttctgcccccagtcctgtcaggggaggggaggccttggcgtctcccaaatcacgttttctgggtcaacaagcctcacagctctagttaaatcctgggcagagctggcttggcagagatgcccacacctgtgcgtcacttcgtgccctacccagaaggggagcaggaaaccaagggatgaaaggtgctgggtccctggctgcctccttgcccatggctgagaagttctggtgggaaggaaccatggagggcccatctggatatccttcctcagctaaaactgcctccttccaggatgccgtgcgcatgctcaataccctgcagaccaatgccggctacctggagcaggtgaagcgccagcggggtgaccctcagacacagttggaagccatggaactgtacctggcacggagtgggctgcaggtggaggacttggaccggctgaacatcatccacgtcactgggacgaaggggaagggctccacctgtgccttcacggaatgtatcctccgaagctatggcctgaagacgggattctttaggtactggcttgtggggggatgtggtgtctgtgtcccaatggaccctggggggctatggaaccagccagtgcttcaggaccagggtcacccccaggaggtcagctgcatgtctctctgcccagtgtttattcattcaataaacattcagttagcaatcagcctgggcgacagagcaaactgctatctt

SEQ ID NO: 453888 - DNA, 2283 bp, Homo sapiens
tgggggtggggacagggaccaggaagttgggcccgggccgccggggctgggaattcggagactatagcgtccccgccccgggttgggaagtgggaagtggcacaggagctaggatccagaagcccagaggctcagcggtgcttctggagttccagtgatcccggagtctgaaccggcagtgagagtggggaaagagggatgccgtgcgcatgctcaataccctgcagaccaatgccggctacctggagcaggtgaagcgccagcggggtgaccctcagacacagttggaagccatggaactgtacctggcacggagtgggctgcaggtggaggacttggaccggctgaacatcatccacgtcactgggacgaaggggaagggctccacctgtgccttcacggaatgtatcctccgaagctatggcctgaagacgggattctttagctctccccacctggtgcaggttcgggagcggatccgcatcaatgggcagcccatcagtcctgagctcttcaccaagtacttctggcgcctctaccaccggctggaggagaccaaggatggcagctgtgtctccatgcccccctacttccgcttcctgacactcatggccttccacgtcttcctccaagagaaggtggacctggcagtggtggaggtgggcattggcggggcttatgactgcaccaacatcatcaggaagcctgtggtgtgcggagtctcctctcttggcatcgaccacaccagcctcctgggggatacggtggagaagatcgcatggcagaaagggggcatctttaagcaaggtgtccctgccttcactgtgctccaacctgaaggtcccctggcagtgctgagggaccgagcccagcagatctcatgtcctctatacctgtgtccgatgctggaggccctcgaggaaggggggccgccgctgaccctgggcctggagggggagcaccagcggtccaacgccgccttggccttgcagctggcccactgctggctgcagcggcaggaccgccatggtgctggggagccaaaggcatccaggccagggctcctgtggcagctgcccctggcacctgtgttccagcccacatcccacatgcggctcgggcttcggaacacggagtggccgggccggacgcaggtgctgcggcgcgggcccctcacctggtacctggacggtgcgcacaccgccagcagcgcgcaggcctgcgtgcgctggttccgccaggcgctgcagggccgcgagaggccgagcggtggccccgaggttcgagtcttgctcttcaatgctaccggggaccgggacccggcggccctgctgaagctgctgcagccctgccagtttgactatgccgtcttctgccctaacctgacagaggtgtcatccacaggcaacgcagaccaacagaacttcacagtgacactggaccaggtcctgctccgctgcctggaacaccagcagcactggaaccacctggacgaagagcaggccagcccggacctctggagtgcccccagcccagagcccggtgggtccgcatccctgcttctggcgccccacccaccccacacctgcagtgccagctccctcgtcttcagctgcatttcacatgccttgcaatggatcagccaaggccgagaccccatcttccagccacctagtcccccaaagggcctcctcacccaccctgtggctcacagtggggccagcatactccgtgaggctgctgccatccatgtgctagtcactggcagcctgcacctggtgggtggtgtcctgaagctgctggagcccgcactgtcccagtagccaaggcccggggttggaggtgggagcttcccacacctgcctgcgttctccccatgaacttacatactaggtgccttttgtttttggctttcctggttctgtctagactggcctaggggccagggctttgggatgggaggccgggagaggatgtcttttttaaggctctgtgccttggtctctccttcctcttggctgagatagcagaggggctccccgggtctctcactgttgcagtggcctggccgttcagcctgtctcccccaacaccccgcctgcctcctggctcaggcccagcttattgtgtgcgctgcctggccaggccctgggtcttgccatgtgctgggtggtagatttcctcctcccagtgccttctgggaagggagagggcctctgcctgggacactgcgggacagagggtggctggagtgaattaaagcctttgttttttaaagaaatg

SEQ ID NO: 453889 - DNA, 2838 bp, Homo sapiens
tggctacctggcttctttttgcccaagtgatttggtgaaacaaagcctcttcctccagcggacttggactcttaagtcaggggtgtcgtgtgtccacgctgtactttgtatacgcctctccctggccaggatctcaccctggcagggcaagggcaaaacgggccctaactgtaaggtgggtgggctgggataaggaggcctggaagaggccagataaagccagccccaaggtctggaagcctcccaagcatagccccctcccctcccacccacctgcctgtctgcgtgcttacctttaacctccacccagttgttacttaactcgcggtaaggttctgaccagtcccatgctccactccagaaacccgccagggaggctaagtccctgggctgaccctaggatgagggcaggaacctatcaggtaaaacctttctccctgcacactggaaaggccagaacttctgcccccagtcctgtcaggggaggggaggccttggcgtctcccaaatcacgttttctgggtcaacaagcctcacagctctagttaaatcctgggcagagctggcttggcagagatgcccacacctgtgcgtcacttcgtgccctacccagaaggggagcaggaaaccaagggatgaaaggtgctgggtccctggctgcctccttgcccatggctgagaagttctggtgggaaggaaccatggagggcccatctggatatccttcctcagctaaaactgcctccttccaggatgccgtgcgcatgctcaataccctgcagaccaatgccggctacctggagcaggtgaagcgccagcggggtgaccctcagacacagttggaagccatggaactgtacctggcacggagtgggctgcaggtggaggacttggaccggctgaacatcatccacgtcactgggacgaaggggaagggctccacctgtgccttcacggaatgtatcctccgaagctatggcctgaagacgggattctttagctctccccacctggtgcaggttcgggagcggatccgcatcaatgggcagcccatcagtcctgagctcttcaccaagtacttctggcgcctctaccaccggctggaggagaccaaggatggcagctgtgtctccatgcccccctacttccgcttcctgacactcatggccttccacgtcttcctccaagagaaggtggacctggcagtggtggaggtgggcattggcggggcttatgactgcaccaacatcatcaggaagcctgtggtgtgcggagtctcctctcttggcatcgaccacaccagcctcctgggggatacggtggagaagatcgcatggcagaaagggggcatctttaagcaaggtgtccctgccttcactgtgctccaacctgaaggtcccctggcagtgctgagggaccgagcccagcagatctcatgtcctctatacctgtgtccgatgctggaggccctcgaggaaggggggccgccgctgaccctgggcctggagggggagcaccagcggtccaacgccgccttggccttgcagctggcccactgctggctgcagcggcaggaccgccatggtgctggggagccaaaggcatccaggccagggctcctgtggcagctgcccctggcacctgtgttccagcccacatcccacatgcggctcgggcttcggaacacggagtggccgggccggacgcaggtgctgcggcgcgggcccctcacctggtacctggacggtgcgcacaccgccagcagcgcgcaggcctgcgtgcgctggttccgccaggcgctgcagggccgcgagaggccgagcggtggccccgaggttcgagtcttgctcttcaatgctaccggggaccgggacccggcggccctgctgaagctgctgcagccctgccagtttgactatgccgtcttctgccctaacctgacagaggtgtcatccacaggcaacgcagaccaacagaacttcacagtgacactggaccaggtcctgctccgctgcctggaacaccagcagcactggaaccacctggacgaagagcaggccagcccggacctctggagtgcccccagcccagagcccggtgggtccgcatccctgcttctggcgccccacccaccccacacctgcagtgccagctccctcgtcttcagctgcatttcacatgccttgcaatggatcagccaaggccgagaccccatcttccagccacctagtcccccaaagggcctcctcacccaccctgtggctcacagtggggccagcatactccgtgaggctgctgccatccatgtgctagtcactggcagcctgcacctggtgggtggtgtcctgaagctgctggagcccgcactgtcccagtagccaaggcccggggttggaggtgggagcttcccacacctgcctgcgttctccccatgaacttacatactaggtgccttttgtttttggctttcctggttctgtctagactggcctaggggccagggctttgggatgggaggccgggagaggatgtcttttttaaggctctgtgccttggtctctccttcctcttggctgagatagcagaggggctccccgggtctctcactgttgcagtggcctggccgttcagcctgtctcccccaacaccccgcctgcctcctggctcaggcccagcttattgtgtgcgctgcctggccaggccctgggtcttgccatgtgctgggtggtagatttcctcctcccagtgccttctgggaagggagagggcctctgcctgggacactgcgggacagagggtggctggagtgaattaaagcctttgttttttaaagaaatg

SEQ ID NO: 453890 - DNA, 2361 bp, Homo sapiens
gcggggcgtctcccgcccgggcctagagcgctgccgggggcgccgggactatgtcgcgggcgcggagccacctgcgcgccgctctattcctggcagcggcgtctgcgcgcggcgtaacgacccaggtcgcggcgcggcggggcttgagcgcgtggccggtgccgcaggagccgagcatggagtaccaggatgccgtgcgcatgctcaataccctgcagaccaatgccggctacctggagcaggtgaagcgccagcggggtgaccctcagacacagttggaagccatggaactgtacctggcacggagtgggctgcaggtggaggacttggaccggctgaacatcatccacgtcactgggacgaaggggaagggctccacctgtgccttcacggaatgtatcctccgaagctatggcctgaagacgggattctttagctctccccacctggtgcaggttcgggagcggatccgcatcaatgggcagcccatcagtcctgagctcttcaccaagtacttctggcgcctctaccaccggctggaggagaccaaggatggcagctgtgtctccatgcccccctacttccgcttcctgacactcatggccttccacgtcttcctccaagagaaggtggacctggcagtggtggaggtgggcattggcggggcttatgactgcaccaacatcatcaggaagcctgtggtgtgcggagtctcctctcttggcatcgaccacaccagcctcctgggggatacggtggagaagatcgcatggcagaaagggggcatctttaaggtgaccaggcagactgggggaagggagagacatggaaggcctgggagtctacgttttcatcctggcttcactgtgtgactggaacaacaaggtgtccctgccttcactgtgctccaacctgaaggtcccctggcagtgctgagggaccgagcccagcagatctcatgtcctctatacctgtgtccgatgctggaggccctcgaggaaggggggccgccgctgaccctgggcctggagggggagcaccagcggtccaacgccgccttggccttgcagctggcccactgctggctgcagcggcaggaccgccatggtgctggggagccaaaggcatccaggccagggctcctgtggcagctgcccctggcacctgtgttccagcccacatcccacatgcggctcgggcttcggaacacggagtggccgggccggacgcaggtgctgcggcgcgggcccctcacctggtacctggacggtgcgcacaccgccagcagcgcgcaggcctgcgtgcgctggttccgccaggcgctgcagggccgcgagaggccgagcggtggccccgaggttcgagtcttgctcttcaatgctaccggggaccgggacccggcggccctgctgaagctgctgcagccctgccagtttgactatgccgtcttctgccctaacctgacagaggtgtcatccacaggcaacgcagaccaacagaacttcacagtgacactggaccaggtcctgctccgctgcctggaacaccagcagcactggaaccacctggacgaagagcaggccagcccggacctctggagtgcccccagcccagagcccggtgggtccgcatccctgcttctggcgccccacccaccccacacctgcagtgccagctccctcgtcttcagctgcatttcacatgccttgcaatggatcagccaaggccgagaccccatcttccagccacctagtcccccaaagggcctcctcacccaccctgtggctcacagtggggccagcatactccgtgaggctgctgccatccatgtgctagtcactggcagcctgcacctggtgggtggtgtcctgaagctgctggagcccgcactgtcccagtagccaaggcccggggttggaggtgggagcttcccacacctgcctgcgttctccccatgaacttacatactaggtgccttttgtttttggctttcctggttctgtctagactggcctaggggccagggctttgggatgggaggccgggagaggatgtcttttttaaggctctgtgccttggtctctccttcctcttggctgagatagcagaggggctccccgggtctctcactgttgcagtggcctggccgttcagcctgtctcccccaacaccccgcctgcctcctggctcaggcccagcttattgtgtgcgctgcctggccaggccctgggtcttgccatgtgctgggtggtagatttcctcctcccagtgccttctgggaagggagagggcctctgcctgggacactgcgggacagagggtggctggagtgaattaaagcctttgttttttaaagaaatg

SEQ ID NO: 453891 - DNA, 2126 bp, Homo sapiens
gcggggcgtctcccgcccgggcctagagcgctgccgggggcgccgggactatgtcgcgggcgcggagccacctgcgcgccgctctattcctggcagcggcgtctgcgcgcggcgtaacgacccaggtcgcggcgcggcggggcttgagcgcgtggccggtgccgcaggagccgagcatggagtaccaggatgccgtgcgcatgctcaataccctgcagaccaatgccggctacctggagcaggtgaagcgccagcggggtgaccctcagacacagttggaagccatggaactgtacctggcacggagtgggctgcaggtggaggacttggaccggctgaacatcatccacgtcactgggacgaaggggaagggctccacctgtgccttcacggaatgtatcctccgaagctatggcctgaagacgggattctttagctctccccacctggtgcaggttcgggagcggatccgcatcaatgggcagcccatcagtcctgagctcttcaccaagtacttctggcgcctctaccaccggctggaggagaccaaggatggcagctgtgtctccatgcccccctacttccgcttcctgacactcatggccttccacgtcttcctccaagagaaggtggacctggcagtggtggaggtgggcattggcggggcttatgactgcaccaacatcatcaggaagcctgtggtgtgcggagtctcctctcttggcatcgaccacaccagcctcctgggggatacggtggagaagatcgcatggcagaaagggggcatctttaagcaaggtgtccctgccttcactgtgctccaacctgaaggtcccctggcagtgctgagggaccgagcccagcagatctcagtgctggggagccaaaggcatccaggccagggctcctgtggcagctgcccctggcacctgtgttccagcccacatcccacatgcggctcgggcttcggaacacggagtggccgggccggacgcaggtgctgcggcgcgggcccctcacctggtacctggacggtgcgcacaccgccagcagcgcgcaggcctgcgtgcgctggttccgccaggcgctgcagggccgcgagaggccgagcggtggccccgaggttcgagtcttgctcttcaatgctaccggggaccgggacccggcggccctgctgaagctgctgcagccctgccagtttgactatgccgtcttctgccctaacctgacagaggtgtcatccacaggcaacgcagaccaacagaacttcacagtgacactggaccaggtcctgctccgctgcctggaacaccagcagcactggaaccacctggacgaagagcaggccagcccggacctctggagtgcccccagcccagagcccggtgggtccgcatccctgcttctggcgccccacccaccccacacctgcagtgccagctccctcgtcttcagctgcatttcacatgccttgcaatggatcagccaaggccgagaccccatcttccagccacctagtcccccaaagggcctcctcacccaccctgtggctcacagtggggccagcatactccgtgaggctgctgccatccatgtgctagtcactggcagcctgcacctggtgggtggtgtcctgaagctgctggagcccgcactgtcccagtagccaaggcccggggttggaggtgggagcttcccacacctgcctgcgttctccccatgaacttacatactaggtgccttttgtttttggctttcctggttctgtctagactggcctaggggccagggctttgggatgggaggccgggagaggatgtcttttttaaggctctgtgccttggtctctccttcctcttggctgagatagcagaggggctccccgggtctctcactgttgcagtggcctggccgttcagcctgtctcccccaacaccccgcctgcctcctggctcaggcccagcttattgtgtgcgctgcctggccaggccctgggtcttgccatgtgctgggtggtagatttcctcctcccagtgccttctgggaagggagagggcctctgcctgggacactgcgggacagagggtggctggagtgaattaaagcctttgttttttaaagaaatg

SEQ ID NO: 453892 - DNA, 1533 bp, Homo sapiens
tcatatgtgatccggccctcggaagatcgcgtggcagaacgggggcatctttacaaggtgtccctgccttcactgtgctccaacctgaaggtcccctggcagtgctgagggaccgagcccagcagatctcatgtcctctatacctgtgtccgatgctggaggccctcgaggaaggggggccgccgctgaccctgggcctggagggggagcaccagcggtccaacgccgccttggccttgcagctggcccactgctggctgcagcggcaggaccgccatggtgctggggagccaaaggcatccaggccagggctcctgtggcagctgcccctggcacctgtgttccagcccacatcccacatgcggctcgggcttcggaacacggagtggccgggccggacgcaggtgctgcggcgcgggcccctcacctggtacctggacggtgcgcacaccgccagcagcgcgcaggcctgcgtgcgctggttccgccaggcgctgcagggccgcgagaggccgagcggtggccccgaggttcgagtcttgctcttcaatgctaccggggaccgggacccggcggccctgctgaagctgctgcagccctgccagtttgactatgccgtcttctgccctaacctgacagaggtgtcatccacaggcaacgcagaccaacagaacttcacagtgacactggaccaggtcctgctccgctgcctggaacaccagcagcactggaaccacctggacgaagagcaggccagcccggacctctggagtgcccccagcccagagcccggtgggtccgcatccctgcttctggcgccccacccaccccacacctgcagtgccagctccctcgtcttcagctgcatttcacatgccttgcaatggatcagccaaggccgagaccccatcttccagccacctagtcccccaaagggcctcctcacccaccctgtggctcacagtggggccagcatactccgtgaggctgctgccatccatgtgctagtcactggcagcctgcacctggtgggtggtgtcctgaagctgctggagcccgcactgtcccagtagccaaggcccggggttggaggtgggagcttcccacacctgcctgcgttctccccatgaacttacatactaggtgccttttgtttttggctttcctggttctgtctagactggcctaggggccagggctttgggatgggaggccgggagaggatgtcttttttaaggctctgtgccttggtctctccttcctcttggctgagatagcagaggggctccccgggtctctcactgttgcagtggcctggccgttcagcctgtctcccccaacaccccgcctgcctcctggctcaggcccagcttattgtgtgcgctgcctggccaggccctgggtcttgccatgtgctgggtggtagatttcctcctcccagtgccttctgggaagggagagggcctctgcctgggacactgcgggacagagggtggctggagtgaattaaagcctttgttttttaaagaaatg

SEQ ID NO: 453893 - DNA, 1830 bp, Homo sapiens
gcggggcgtctcccgcccgggcctagagcgctgccgggggcgccgggactatgtcgcgggcgcggagccacctgcgcgccgctctattcctggcagcggcgtctgcgcgcggcgtaacgacccaggtcgcggcgcggcggggcttgagcgcgtggccggtgccgcaggagccgagcatggagtaccaggatgccgtgcgcatgctcaataccctgcagaccaatgccggctacctggagcaggtgaagcgccagcggggtgaccctcagacacagttggaagccatggaactgtacctggcacggagtgggctgcaggtggaggacttggaccggctgaacatcatccacgtcactgggacgaaggggaagggctccacctgtgccttcacggaatgtatcctccgaagctatggcctgaagacgggattctttagctctccccacctggtgcaggttcgggagcggatccgcatcaatgggcagcccatcagtcctgagctcttcaccaagtacttctggcgcctctaccaccggctggaggagaccaaggatggcagctgtgtctccatgcccccctacttccgcttcctgacactcatggccttccacgtcttcctccaagagaaggtggacctggcagtggtggaggtgggcattggcggggcttatgactgcaccaacatcatcaggaagcctgtggtgtgcggagtctcctctcttggcatcgaccacaccagcctcctgggggatacggtggagaagatcgcatggcagaaagggggcatctttaagcaaggtgtccctgccttcactgtgctccaacctgaaggtcccctggcagtgctgagggaccgagcccagcagatctcatgtcctctatacctgtgtccgatgctggaggccctcgaggaaggggggccgccgctgaccctgggcctggagggggagcaccagcggtccaacgccgccttggccttgcagctggcccactgctggctgcagcggcaggaccgccatggtgctggggagccaaaggcatccaggccagggctcctgtggcagctgcccctggcacctgtgttccagcccacatcccacatgcggctcgggcttcggaacacggagtggccgggccggacgcaggtgctgcggcgcgggcccctcacctggtacctggacggtgcgcacaccgccagcagcgcgcaggcctgcgtgcgctggttccgccaggcgctgcagggccgcgagaggccgagcggtggccccgaggttcgagtcttgctcttcaatgctaccggggaccgggacccggcggccctgctgaagctgctgcagccctgccagtttgactatgccgtcttctgccctaacctgacagaggtgtcatccacaggcaacgcagaccaacagaacttcacagtgacactggaccaggtcctgctccgctgcctggaacaccagcagcactggaaccacctggacgaagagcaggccagcccggacctctggagtgcccccagcccagagcccggtggcctgtctgtgagatgagaagaagaccagactgaagcctgttcaccatatgccaggcagtgctttctgcagacccccttgcagagaccttgtgatggagaattatacccatttgacagacgagggaactgtggctggtttcaagaagccatggaggccgggcacggtggctcacgcctgtaatcccagcactttgggaggctgaggcgggcggatcatgaggtcaagaggtcgagaccatctggccaacatggtgaaaccccgtctctgctaaaaatacaaaaattattagctg

SEQ ID NO: 453894 - DNA, 1367 bp, Homo sapiens
cgcaggcctgcgtgcgctggttccgccaggcgctgcagggccgcgagaggccgagcggtggccccgaggttcgagtcttgctcttcaatgctaccggggaccgggacccggcggccctgctgaagctgctgcagccctgccagtttgactatgccgtcttctgccctaacctgacagaggtgtcatccacaggcaacgcagatggagtcttgctctgtcgcccaggctggagtgcaatgtgctgcggcgcgggcccctcacctggtacctggacggtgcgcacaccgccagcagcgcgcaggcctgcgtgcgctggttccgccaggcgctgcagggccgcgagaggccgagcggtggccccgaggttcgagtcttgctcttcaatgctaccggggaccgggacccggcggccctgctgaagctgctgcagccctgccagtttgactatgccgtcttctgccctaacctgacagaggtgtcatccacaggcaacgcagaccaacagaacttcacagtgacactggaccaggtcctgctccgctgcctggaacaccagcagcactggaaccacctggacgaagagcaggccagcccggacctctggagtgcccccagcccagagcccggtgggtccgcatccctgcttctggcgccccacccaccccacacctgcagtgccagctccctcgtcttcagctgcatttcacatgccttgcaatggatcagccaaggccgagaccccatcttccagccacctagtcccccaaagggcctcctcacccaccctgtggctcacagtggggccagcatactccgtgaggctgctgccatccatgtgctagtcactggcagcctgcacctggtgggtggtgtcctgaagctgctggagcccgcactgtcccagtagccaaggcccggggttggaggtgggagcttcccacacctgcctgcgttctccccatgaacttacatactaggtgccttttgtttttggctttcctggttctgtctagactggcctaggggccagggctttgggatgggaggccgggagaggatgtcttttttaaggctctgtgccttggtctctccttcctcttggctgagatagcagaggggctccccgggtctctcactgttgcagtggcctggccgttcagcctgtctcccccaacaccccgcctgcctcctggctcaggcccagcttattgtgtgcgctgcctggccaggccctgggtcttgccatgtgctgggtggtagatttcctcctcccagtgccttctgggaagggagagggcctctgcctgggacactgcgggacagagggtggctggagtgaattaaagcctttgttttttaaagaaatg

SEQ ID NO: 453895 - DNA, 983 bp, Homo sapiens
agcttgaacattttgtgattacttttccctccccggatctagtccttttaaggagtaagtctaaagaatgaggccatgaagtcactatttcctcccacctcagtttgtctcctggtacttagctggcctatcgctttgtgtggcaatacccctgggtcgcttccccactcagccttctgtatctgctgttcacaggacatgccattatgtctttccagtacggatcacagtgctgccatatcacagaccctgccagccggcacagaaccatgcctcgtcacagctctgcccaactcacaggctgccaagatgaggccacaggtccacctagggcggcagatgctggtgctatttgtcacgacttttgccaaaacatgtacactgttgctcacatctttcgtaagaatggttgacactaaggggccatggaaaagcacttttaaaaaattatgtggtggaatcaaactcacagaggcagaaatgttagtgccgtgctctaaccaagtaagcttagtgttccccacagtgatctgtatctggcctgagtctcctcaagcagcaacccccactgtccagcatgtggaaggtagatccttatgacaacaccagacccatagttaccaggaaagaaaaaggaagctgagtgttgtgaaggggaagaaatcctttttataagaagtaatcatttttaggccgggtgcagtggctcatgcctgtaatcccagcactttgggaggctgagacaggtggatcacttgaggtcaggagtttgagacctgcctggccaacatgatgaaaccctgtctctactaaaaatgcaaaaaaaaattagccaggcatggtggcatgtgcctgtagtcccaactactcaggaggctgaggcaggagaatcacttgaacctgggaggcagaggttgcaatgagctgagatcgcaacactgcactccagcctgggcgacagagcaagactccatctcaaaaac

SEQ ID NO: 453896 - DNA, 6837 bp, Homo sapiens
  misc_feature (5)..(7): n is a, c, g, or t
  misc_feature (18)..(18): n is a, c, g, or t
  misc_feature (20)..(22): n is a, c, g, or t
  misc_feature (1864)..(1865): n is a, c, g, or t
tactnnncaaacatttcntnnnaggacacagctctctgcctccatgtcaccacctttgaaggactgactgattccctcggctggtgccagtgcctgctcctgccatggggcccgcggggagcctgctgggcagcggacagatgcagatcaccctgtggggaagtctggctgctgtcgccattttcttcgtcatcaccttcctcatcttcctgtgctctagttgtgacagggaaaagaagccgcgacagcatagtggggaccatgagaacctgatgaacgtgccttcagacaaggagatgttcagccgttcagttactagcctggcaacagatgctcctgccagcagtgagcagaatggggcactcaccaatggggacattctttcagaggacagtactctgacctgcatgcagcattacgaggaagtccagacatcggcctcggatctgctggattcccaggacagcacagggaaaccaaaatgtcatcagagtcgggagctgcccagaatccctcccgagagcgcagtggataccatgctcacggcgagaagtgtggacggggaccaggggctggggatggaagggccctatgaagtgctcaaggacagctcctcccaagaaaacatggtggaggactgcttgtatgaaactgtgaaagagatcaaggaggtggctgcagctgcacacctggagaaaggccacagtggcaaggcaaaatctacttctgcctcgaaagagctcccagggccccagactgaaggcaaagctgagtttgctgaatatgcctcggtggacagaaacaaaaaatgtcgtcaaagtgttaatgtagagagtatccttggaaattcatgtgatccagaagaggaggccccaccacctgtccctgttaagcttctggacgagaatgaaaaccttcaggagaaggaagggggagaggcggaagagagtgccacagacacgaccagtgaaactaacaagagatttagctcattgtcatacaagtctcgggaagaagaccccactctcacagaagaagagatctcagctatgtactcatcagtaaataaacctggacagttagtgaataaatcggggcagtcgcttacagttccggagtccacctacacctccattcaaggggacccacagaggtcaccctcctcctgtaatgatctctatgctactgttaaagacttcgaaaaaactccaaacagcacacttccaccagcagggaggcccagcgaggagccagagcctgattatgaagcgatacagactctcaacagagaggaagaaaaggccaccctggggaccaatggccaccacggtctcgtcccaaaggagaacgactacgagagcataagtgacttgcagcaaggcagagatattaccaggctctagcaacccagaagacaaccctgggtagcctgtgatcagtgtctggagacgtttcttctgtggaagagaagaagtgacacaaacctatacttcatatgctgctttagtcacctgaagatggttggagaggccctgtcgactgttctcccagttgttcagtttctgagacagagaggtacggactaggctgcacctgagtgtgcccctgcctgccagatggacaggtacacccaagcacatctccctgctgcaccctcaccacccacaaaagatcccagctgtcagtggtctcatctcattagtgaggaaagccaagctgtatggaaaagctgcactcaccaaggaccacaatgcccccggcctaaagtactgccattcagaaaagcaggtttttcttcctctctttccttttctctgtctgctactgactttaaggctttttcccccttgaaatgtccagattnntgtggttcatcccaaggaaattttcacacaaagcttggcctttgccctcaatataggtgttttaggatggtgacaaaccatggctgctgctttctgcccagctcgccagtcctccccaaagagttgcgcatcagcacctggggatctggaccctgcgggtgaagggatggggagggacgtccctggagtctcttctgtctttgttccttcttattttggcattcgatatcagcagcctctccccaaagtacttgaagtcagttttagatgctttattttatttttctagtcaaaaacgtgtttcccccagtgtttgaaaactcgtccgaatcttttcagtattttccatgagtattgtggtacttctagacttgtttaagcccagaactcattccttcaaaacagagagccttaatctttatgttgggacacagaccacatatttggacggcagccatgcatccatcgctgaagggctgtggacatgaatgtgtatttcccatggtctccgctgcccacaccaacagtgtggcatctcataagttaactgctaccctaaggtaatctaagattaaaatgtaaacatttatttttgttatgtaagtttataagatgttttatgttcaatgcctaatttctcaaaagtgccagaaaaaaatgtatattagctattttgattttatgtacaatgatttatactctccttttgaaaagataccataaagcacataagctagatcactacaaggagctgttatcttttttctaatcaagtgtttaaaacactgatggtttttaaagactcacctttttaaatggtacttggagctcctgattcaaattacctagaccccctagagaaataaatggaatatacataaataatcattttcagtggtttatggtgggcaatattgcaatatttgaaatggtaaaaatggaaagaagaacaaaatatgatgagaggtggctgtgaattataaacctcataaaagtgtcataattccattaaggtttaattatattttttcagaaaacagtgatgaattctgtagtccagtgcttgccaatgcaaattgcctattggaatcttcttcctatattttacaaacatcagtggctgaaatagctcagagtaagagctcagcctggtttgaatttaatcatctctttagatcttataaggccagcattaggaaacttgttcacttttcattttcaaaggagcctagttgaagtgctattatgagtgtgggctatggaaagacagcttttcctacactgataaagaaaaaaaatgaggaaattatttcatccccttgtgacatctgtgactttttggatttaataatcttgctgtttttcctctttatgacaaagaatataattgggaggatgaagtgtcttaaaaattgtagagaccagctcactggaatgtttttccatccctgtattcatggcttgactttgtgactgctctacactgcatgtctgacattgcagagtgagctatgttgaggtaaactggttggttgtcattattttgcaatcagcctggtctctcccatgaagatgtcgtgtgcataagcacaatcatcactgattagaagatcacagcagaatacccttggattagagagaagttcgtaccttgcatttctctgaattctagtctctcataagcactgctttgctggatgattttcactgctttgtgttaatgactttgagcgatctctcacatgatggggttctttagtacatggtaacagccatgtcatcttacacacctagcattgtgaatgctgtagtgacatcctttataggcaccttacagctcaaaacttttgtttcatttcatgccttacttatcaaaaaggcaggaaagtaggtatgatctctaaagtaaaaaaaaaaaaaaaaaaaaaaactttttatagaaagctcataaataatcatgtcattttgcaattttgttaccaaaatttcccccaagagttttcaaatattagttctgcaatgtggctatgaaatatgcactgaaatataccttttaatttgagaaccagtggttagaataagctgtgatataaagtattttcagtgtacttttaaaggaactataaggccctccagcataaacgctaaaagaatagatggtagcacaggccatgagggctgggggagagaagcagagtgaaccttagaaagatggctcagctatttggagcactggatattttactgaagtatatttactgaggcaccatcactgttttgactgtacagtatagtttttcataaatttcatcacatttactttgttcagaatctgggcttgaatctttgagttggacaaaagcctatggtttcttttaaaaagtttcatcttgagctaatgctacagtttaaataaaatgtatgaaaggtagttatcaaaaacaatttgtatatttaaaattctattttgacatccattttttacagcgaattatagcaggttatgtgaaatttaaaaataaattttaggaaatttttttatcttgtaagtaagaattataaatctatctcagttaaaagtaggatctttgtttttattcagatattttgaaagtttagaagcattttgtatgctactttggtatttcttaagtatagtcagcaggaaagggtaacctgttttatgcaaaatttttttaatttgtcaaatgtttttagtgtgtctactttctgaaatagtctcaatatcctgtctgtatcctaggcagataactacacaagaacaaaacgctatatagaaaagaaaatatttgaggaaatcttaaattccataagaaagtaattcttgcaagaatgttggctacatatttttttttctgtcctgaataaattacatcattaggtctgttgaagcttttgaagctaccactattctttctgggataaaggctaattactgatttatctgccctcaaaatcccagagttaattctaattgagtactaaattaacagtaagtagttaacacagagaactaaaatttaaccgcattatatcactgtatatatttctcatgatttttgctaattagagcatttacttaaccagtaataaactacacacacacacacacacacacacacgtatacgtgtgtgtgtgtatatacttggctctgacacaactctggtgcttaattaggatatgttctattatgtattttgaatgtttatcctgctagtgcgatgaacttttgttggaaaagcagaattagaaggaacagtttttcaatcagtttcatttggtaattacaggaaaaccttgagttgctctaatttaatttttccaattaatacatttagactttaaattgcatccgtaattctcttggctgaaaaacagtggtattttaagacagttttgttatacatgtgacttacttttgactcagcctgagaggaggaaatgtaaagagataagagatttggcccaaagcagcaagagactagtaaccttgagccaggacgaagccaagacaacgtgactcccaagtagcaggagcagaggtcggtcacctgtggcattctgtttcattcccttttaaaattatgagactttataggcagtgtaaaacatcagcaggcagcgatgtgataggatgtgcgaaaaagctggtctgataccatggctataattacagagctttagttcaattaggattttgtaaatgagcaaatgacctttttttccagtgccccttgtaatagttaatatgagtccatgcaatcttgtgatgccattctcctgaaggtgttgatttctggtacccagccagcttagctttggctgctggaagcacagtaggtactgatgattacttcctggaaatcttgacaggcttattgtactgtgtaatggggaaaagttaaagtataatgtttggtgttaataaatgactgatgtgaaaataggaacatgtgtctttaatatcaaatatggctttatttgcagtgaaatctaaattccttattctacagtagtattttcttgccctgtgttgtatattttcctaaatacatttttcctgacagtggctttaggccagttgaacacacttagactgaaagtgtttaacttaaagagatcagtccagaaaccatgataaattagaatctttatctggaattaccaaattaaaatttaaaatcatggtccagaagagaacaaacattcatggttttttttatcctactgctcatttttaggtctgtgtttacatctagtctctactatttgtgaagtatgtcattatttttttcaagttcttctttgacttaactgaaaaataatattccaaattcttaatgtaacatgaaaagagaaatacaatttttgcttaaaagacattttttaaaaagcgttcaattcagtaatcatttctgttaatacaggaagtttttttggcttgccagttatatactgtgggtattttttaaaatgtgctacccttgggttgtctcatatcaccttgcgtaatcatgtattacaaaggttgataattgtcatttctcagatgtctgtatgttacattggcagcagtaaaatgttttaatgttgttaccttttaaataattgtgttgtattaacatgcctcatattttctggggaaacttgaaatatatctaaacaaaaaaggtctgttataaataggaattggcatttcattgttaatgttttttcctcataaaaatagttacaccaaaagtgacatattgtctattacatgggcccaatcagtattaaagtactccccttactcaaaaatattaaaaaataattcatgacacttagtagcattttcattgattgtttcaaaagatcttcataatggtcaaattgtccaattcacaaaagagtgagaaagttgttttcagtactgggaatttttaaaccttagttttaagaccaaaaata

SEQ ID NO: 453897 - DNA, 6625 bp, Homo sapiens
  misc_feature (1652)..(1653): n is a, c, g, or t
tcctctgctctgcagtccagattcttagcaatgtgatgcatttgtttttgtttttgtttttgttttcagccttcagacaaggagatgttcagccgttcagttactagcctggcaacagatgctcctgccagcagtgagcagaatggggcactcaccaatggggacattctttcagaggacagtactctgacctgcatgcagcattacgaggaagtccagacatcggcctcggatctgctggattcccaggacagcacagggaaaccaaaatgtcatcagagtcgggagctgcccagaatccctcccgagagcgcagtggataccatgctcacggcgagaagtgtggacggggaccaggggctggggatggaagggccctatgaagtgctcaaggacagctcctcccaagaaaacatggtggaggactgcttgtatgaaactgtgaaagagatcaaggaggtggctgcagctgcacacctggagaaaggccacagtggcaaggcaaaatctacttctgcctcgaaagagctcccagggccccagactgaaggcaaagctgagtttgctgaatatgcctcggtggacagaaacaaaaaatgtcgtcaaagtgttaatgtagagagtatccttggaaattcatgtgatccagaagaggaggccccaccacctgtccctgttaagcttctggacgagaatgaaaaccttcaggagaaggaagggggagaggcggaagagagtgccacagacacgaccagtgaaactaacaagagatttagctcattgtcatacaagtctcgggaagaagaccccactctcacagaagaagagatctcagctatgtactcatcagtaaataaacctggacagttagtgaataaatcggggcagtcgcttacagttccggagtccacctacacctccattcaaggggacccacagaggtcaccctcctcctgtaatgatctctatgctactgttaaagacttcgaaaaaactccaaacagcacacttccaccagcagggaggcccagcgaggagccagagcctgattatgaagcgatacagactctcaacagagaggaagaaaaggccaccctggggaccaatggccaccacggtctcgtcccaaaggagaacgactacgagagcataagtgacttgcagcaaggcagagatattaccaggctctagcaacccagaagacaaccctgggtagcctgtgatcagtgtctggagacgtttcttctgtggaagagaagaagtgacacaaacctatacttcatatgctgctttagtcacctgaagatggttggagaggccctgtcgactgttctcccagttgttcagtttctgagacagagaggtacggactaggctgcacctgagtgtgcccctgcctgccagatggacaggtacacccaagcacatctccctgctgcaccctcaccacccacaaaagatcccagctgtcagtggtctcatctcattagtgaggaaagccaagctgtatggaaaagctgcactcaccaaggaccacaatgcccccggcctaaagtactgccattcagaaaagcaggtttttcttcctctctttccttttctctgtctgctactgactttaaggctttttcccccttgaaatgtccagattnntgtggttcatcccaaggaaattttcacacaaagcttggcctttgccctcaatataggtgttttaggatggtgacaaaccatggctgctgctttctgcccagctcgccagtcctccccaaagagttgcgcatcagcacctggggatctggaccctgcgggtgaagggatggggagggacgtccctggagtctcttctgtctttgttccttcttattttggcattcgatatcagcagcctctccccaaagtacttgaagtcagttttagatgctttattttatttttctagtcaaaaacgtgtttcccccagtgtttgaaaactcgtccgaatcttttcagtattttccatgagtattgtggtacttctagacttgtttaagcccagaactcattccttcaaaacagagagccttaatctttatgttgggacacagaccacatatttggacggcagccatgcatccatcgctgaagggctgtggacatgaatgtgtatttcccatggtctccgctgcccacaccaacagtgtggcatctcataagttaactgctaccctaaggtaatctaagattaaaatgtaaacatttatttttgttatgtaagtttataagatgttttatgttcaatgcctaatttctcaaaagtgccagaaaaaaatgtatattagctattttgattttatgtacaatgatttatactctccttttgaaaagataccataaagcacataagctagatcactacaaggagctgttatcttttttctaatcaagtgtttaaaacactgatggtttttaaagactcacctttttaaatggtacttggagctcctgattcaaattacctagaccccctagagaaataaatggaatatacataaataatcattttcagtggtttatggtgggcaatattgcaatatttgaaatggtaaaaatggaaagaagaacaaaatatgatgagaggtggctgtgaattataaacctcataaaagtgtcataattccattaaggtttaattatattttttcagaaaacagtgatgaattctgtagtccagtgcttgccaatgcaaattgcctattggaatcttcttcctatattttacaaacatcagtggctgaaatagctcagagtaagagctcagcctggtttgaatttaatcatctctttagatcttataaggccagcattaggaaacttgttcacttttcattttcaaaggagcctagttgaagtgctattatgagtgtgggctatggaaagacagcttttcctacactgataaagaaaaaaaatgaggaaattatttcatccccttgtgacatctgtgactttttggatttaataatcttgctgtttttcctctttatgacaaagaatataattgggaggatgaagtgtcttaaaaattgtagagaccagctcactggaatgtttttccatccctgtattcatggcttgactttgtgactgctctacactgcatgtctgacattgcagagtgagctatgttgaggtaaactggttggttgtcattattttgcaatcagcctggtctctcccatgaagatgtcgtgtgcataagcacaatcatcactgattagaagatcacagcagaatacccttggattagagagaagttcgtaccttgcatttctctgaattctagtctctcataagcactgctttgctggatgattttcactgctttgtgttaatgactttgagcgatctctcacatgatggggttctttagtacatggtaacagccatgtcatcttacacacctagcattgtgaatgctgtagtgacatcctttataggcaccttacagctcaaaacttttgtttcatttcatgccttacttatcaaaaaggcaggaaagtaggtatgatctctaaagtaaaaaaaaaaaaaaaaaaaaaaactttttatagaaagctcataaataatcatgtcattttgcaattttgttaccaaaatttcccccaagagttttcaaatattagttctgcaatgtggctatgaaatatgcactgaaatataccttttaatttgagaaccagtggttagaataagctgtgatataaagtattttcagtgtacttttaaaggaactataaggccctccagcataaacgctaaaagaatagatggtagcacaggccatgagggctgggggagagaagcagagtgaaccttagaaagatggctcagctatttggagcactggatattttactgaagtatatttactgaggcaccatcactgttttgactgtacagtatagtttttcataaatttcatcacatttactttgttcagaatctgggcttgaatctttgagttggacaaaagcctatggtttcttttaaaaagtttcatcttgagctaatgctacagtttaaataaaatgtatgaaaggtagttatcaaaaacaatttgtatatttaaaattctattttgacatccattttttacagcgaattatagcaggttatgtgaaatttaaaaataaattttaggaaatttttttatcttgtaagtaagaattataaatctatctcagttaaaagtaggatctttgtttttattcagatattttgaaagtttagaagcattttgtatgctactttggtatttcttaagtatagtcagcaggaaagggtaacctgttttatgcaaaatttttttaatttgtcaaatgtttttagtgtgtctactttctgaaatagtctcaatatcctgtctgtatcctaggcagataactacacaagaacaaaacgctatatagaaaagaaaatatttgaggaaatcttaaattccataagaaagtaattcttgcaagaatgttggctacatatttttttttctgtcctgaataaattacatcattaggtctgttgaagcttttgaagctaccactattctttctgggataaaggctaattactgatttatctgccctcaaaatcccagagttaattctaattgagtactaaattaacagtaagtagttaacacagagaactaaaatttaaccgcattatatcactgtatatatttctcatgatttttgctaattagagcatttacttaaccagtaataaactacacacacacacacacacacacacacgtatacgtgtgtgtgtgtatatacttggctctgacacaactctggtgcttaattaggatatgttctattatgtattttgaatgtttatcctgctagtgcgatgaacttttgttggaaaagcagaattagaaggaacagtttttcaatcagtttcatttggtaattacaggaaaaccttgagttgctctaatttaatttttccaattaatacatttagactttaaattgcatccgtaattctcttggctgaaaaacagtggtattttaagacagttttgttatacatgtgacttacttttgactcagcctgagaggaggaaatgtaaagagataagagatttggcccaaagcagcaagagactagtaaccttgagccaggacgaagccaagacaacgtgactcccaagtagcaggagcagaggtcggtcacctgtggcattctgtttcattcccttttaaaattatgagactttataggcagtgtaaaacatcagcaggcagcgatgtgataggatgtgcgaaaaagctggtctgataccatggctataattacagagctttagttcaattaggattttgtaaatgagcaaatgacctttttttccagtgccccttgtaatagttaatatgagtccatgcaatcttgtgatgccattctcctgaaggtgttgatttctggtacccagccagcttagctttggctgctggaagcacagtaggtactgatgattacttcctggaaatcttgacaggcttattgtactgtgtaatggggaaaagttaaagtataatgtttggtgttaataaatgactgatgtgaaaataggaacatgtgtctttaatatcaaatatggctttatttgcagtgaaatctaaattccttattctacagtagtattttcttgccctgtgttgtatattttcctaaatacatttttcctgacagtggctttaggccagttgaacacacttagactgaaagtgtttaacttaaagagatcagtccagaaaccatgataaattagaatctttatctggaattaccaaattaaaatttaaaatcatggtccagaagagaacaaacattcatggttttttttatcctactgctcatttttaggtctgtgtttacatctagtctctactatttgtgaagtatgtcattatttttttcaagttcttctttgacttaactgaaaaataatattccaaattcttaatgtaacatgaaaagagaaatacaatttttgcttaaaagacattttttaaaaagcgttcaattcagtaatcatttctgttaatacaggaagtttttttggcttgccagttatatactgtgggtattttttaaaatgtgctacccttgggttgtctcatatcaccttgcgtaatcatgtattacaaaggttgataattgtcatttctcagatgtctgtatgttacattggcagcagtaaaatgttttaatgttgttaccttttaaataattgtgttgtattaacatgcctcatattttctggggaaacttgaaatatatctaaacaaaaaaggtctgttataaataggaattggcatttcattgttaatgttttttcctcataaaaatagttacaccaaaagtgacatattgtctattacatgggcccaatcagtattaaagtactccccttactcaaaaatattaaaaaataattcatgacacttagtagcattttcattgattgtttcaaaagatcttcataatggtcaaattgtccaattcacaaaagagtgagaaagttgttttcagtactgggaatttttaaaccttagttttaagaccaaaaata

SEQ ID NO: 453898 - DNA, 3226 bp, Homo sapiens
cacgagggggactcccaagtagcaggagcagaggtcggtcacctgtggcattctgtttcattcccttttatcctttataggcaccttacagctcaaaacttttgtttcatttcatgccttacttatcaaaaaggcaggaaagtaggtatgatctctaaagtaaaaaaaaaaaaaaaaaaaaaaactttttatagaaagctcataaataatcatgtcattttgcaattttgttaccaaaatttcccccaagagttttcaaatattagttctgcaatgtggctatgaaatatgcactgaaatataccttttaatttgagaaccagtggttagaataagctgtgatataaagtattttcagtgtacttttaaaggaactataaggccctccagcataaacgctaaaagaatagatggtagcacaggccatgagggctgggggagagaagcagagtgaaccttagaaagatggctcagctatttggagcactggatattttactgaagtatatttactgaggcaccatcactgttttgactgtacagtatagtttttcataaatttcatcacatttactttgttcagaatctgggcttgaatctttgagttggacaaaagcctatggtttcttttaaaaagtttcatcttgagctaatgctacagtttaaataaaatgtatgaaaggtagttatcaaaaacaatttgtatatttaaaattctattttgacatccattttttacagcgaattatagcaggttatgtgaaatttaaaaataaattttaggaaatttttttatcttgtaagtaagaattataaatctatctcagttaaaagtaggatctttgtttttattcagatattttgaaagtttagaagcattttgtatgctactttggtatttcttaagtatagtcagcaggaaagggtaacctgttttatgcaaaatttttttaatttgtcaaatgtttttagtgtgtctactttctgaaatagtctcaatatcctgtctgtatcctaggcagataactacacaagaacaaaacgctatatagaaaagaaaatatttgaggaaatcttaaattccataagaaagtaattcttgcaagaatgttggctacatatttttttttctgtcctgaataaattacatcattaggtctgttgaagcttttgaagctaccactattctttctgggataaaggctaattactgatttatctgccctcaaaatcccagagttaattctaattgagtactaaattaacagtaagtagttaacacagagaactaaaatttaaccgcattatatcactgtatatatttctcatgatttttgctaattagagcatttacttaaccagtaataaactacacacacacacacacacacacacacgtatacgtgtgtgtgtgtatatacttggctctgacacaactctggtgcttaattaggatatgttctattatgtattttgaatgtttatcctgctagtgcgatgaacttttgttggaaaagcagaattagaaggaacagtttttcaatcagtttcatttggtaattacaggaaaaccttgagttgctctaatttaatttttccaattaatacatttagactttaaattgcatccgtaattctcttggctgaaaaacagtggtattttaagacagttttgttatacatgtgacttacttttgactcagcctgagaggaggaaatgtaaagagataagagatttggcccaaagcagcaagagactagtaaccttgagccaggacgaagccaagacaacgtgactcccaagtagcaggagcagaggtcggtcacctgtggcattctgtttcattcccttttaaaattatgagactttataggcagtgtaaaacatcagcaggcagcgatgtgataggatgtgcgaaaaagctggtctgataccatggctataattacagagctttagttcaattaggattttgtaaatgagcaaatgacctttttttccagtgccccttgtaatagttaatatgagtccatgcaatcttgtgatgccattctcctgaaggtgttgatttctggtacccagccagcttagctttggctgctggaagcacagtaggtactgatgattacttcctggaaatcttgacaggcttattgtactgtgtaatggggaaaagttaaagtataatgtttggtgttaataaatgactgatgtgaaaataggaacatgtgtctttaatatcaaatatggctttatttgcagtgaaatctaaattccttattctacagtagtattttcttgccctgtgttgtatattttcctaaatacatttttcctgacagtggctttaggccagttgaacacacttagactgaaagtgtttaacttaaagagatcagtccagaaaccatgataaattagaatctttatctggaattaccaaattaaaatttaaaatcatggtccagaagagaacaaacattcatggttttttttatcctactgctcatttttaggtctgtgtttacatctagtctctactatttgtgaagtatgtcattatttttttcaagttcttctttgacttaactgaaaaataatattccaaattcttaatgtaacatgaaaagagaaatacaatttttgcttaaaagacattttttaaaaagcgttcaattcagtaatcatttctgttaatacaggaagtttttttggcttgccagttatatactgtgggtattttttaaaatgtgctacccttgggttgtctcatatcaccttgcgtaatcatgtattacaaaggttgataattgtcatttctcagatgtctgtatgttacattggcagcagtaaaatgttttaatgttgttaccttttaaataattgtgttgtattaacatgcctcatattttctggggaaacttgaaatatatctaaacaaaaaaggtctgttataaataggaattggcatttcattgttaatgttttttcctcataaaaatagttacaccaaaagtgacatattgtctattacatgggcccaatcagtattaaagtactccccttactcaaaaatattaaaaaataattcatgacacttagtagcattttcattgattgtttcaaaagatcttcataatggtcaaattgtccaattcacaaaagagtgagaaagttgttttcagtactgggaatttttaaaccttagttttaagaccaaaaata

SEQ ID NO: 453899 - DNA, 1172 bp, Homo sapiens
  misc_feature (5)..(7): n is a, c, g, or t
  misc_feature (18)..(18): n is a, c, g, or t
  misc_feature (20)..(22): n is a, c, g, or t
tactnnncaaacatttcntnnnaggacacagctctctgcctccatgtcaccacctttgaaggactgactgattccctcggctggtgccagtgcctgctcctgccatggggcccgcggggagcctgctgggcagcggacagatgcagatcaccctgtggggaagtctggctgctgtcgccattttcttcgtcatcaccttcctcatcttcctgtgctctagttgtgacagggaaaagaagccgcgacagcatagtggggaccatgagaacctgatgaacgtgccttcagacaaggagatgttcagccgttcagttactagcctggcaacagatgctcctgccagcagtgagcagaatggggcactcaccaatggggacattctttcagaggacagtactctgacctgcatgcagcattacgaggaagtccagacatcggcctcggatctgctggattcccaggacagcacagggaaaccaaaatgtcatcagagtcgggagctgcccagaatccctcccgagagcgcagtggataccatgctcacggcgagaagtgtggacggggaccaggggctggggatggaagggccctatgaagtgctcaaggacagctcctcccaagaaaacatggtggaggactgcttgtatgaaactgtgaaagagatcaaggaggtggctgcagctgcacacctggagaaaggccacagtggcaaggcaaaatctacttctgcctcgaaagagctcccagggccccagactgaaggcaaagctgagtttgctgaatatgcctcggtggacagaaacaaaaaatgtcgtcaaagtgttaatgtagagagtatccttggaaattcatgtgatccagaagaggaggccccaccacctgtccctgttaagcttctggacgagaatgaaaaccttcaggagaaggaagggggagaggcggaagagagtgccacagacacgaccagtgaaactaacaaggtgggcactggcgtttttgttttgtctttgtgggttcctgttctggttaggaatctagctggccctggagttgttctgggaaatatctgcaaacactttccagtttgttgaatgatgagagctgttttcatgtaagctgtgtttggctttttccccctccaagtaataaaataccaaaaacttgtatttatc

SEQ ID NO: 453900 - DNA, 3213 bp, Homo sapiens
  misc_feature (5)..(7): n is a, c, g, or t
  misc_feature (18)..(18): n is a, c, g, or t
  misc_feature (20)..(22): n is a, c, g, or t
  misc_feature (1864)..(1865): n is a, c, g, or t
tactnnncaaacatttcntnnnaggacacagctctctgcctccatgtcaccacctttgaaggactgactgattccctcggctggtgccagtgcctgctcctgccatggggcccgcggggagcctgctgggcagcggacagatgcagatcaccctgtggggaagtctggctgctgtcgccattttcttcgtcatcaccttcctcatcttcctgtgctctagttgtgacagggaaaagaagccgcgacagcatagtggggaccatgagaacctgatgaacgtgccttcagacaaggagatgttcagccgttcagttactagcctggcaacagatgctcctgccagcagtgagcagaatggggcactcaccaatggggacattctttcagaggacagtactctgacctgcatgcagcattacgaggaagtccagacatcggcctcggatctgctggattcccaggacagcacagggaaaccaaaatgtcatcagagtcgggagctgcccagaatccctcccgagagcgcagtggataccatgctcacggcgagaagtgtggacggggaccaggggctggggatggaagggccctatgaagtgctcaaggacagctcctcccaagaaaacatggtggaggactgcttgtatgaaactgtgaaagagatcaaggaggtggctgcagctgcacacctggagaaaggccacagtggcaaggcaaaatctacttctgcctcgaaagagctcccagggccccagactgaaggcaaagctgagtttgctgaatatgcctcggtggacagaaacaaaaaatgtcgtcaaagtgttaatgtagagagtatccttggaaattcatgtgatccagaagaggaggccccaccacctgtccctgttaagcttctggacgagaatgaaaaccttcaggagaaggaagggggagaggcggaagagagtgccacagacacgaccagtgaaactaacaagagatttagctcattgtcatacaagtctcgggaagaagaccccactctcacagaagaagagatctcagctatgtactcatcagtaaataaacctggacagttagtgaataaatcggggcagtcgcttacagttccggagtccacctacacctccattcaaggggacccacagaggtcaccctcctcctgtaatgatctctatgctactgttaaagacttcgaaaaaactccaaacagcacacttccaccagcagggaggcccagcgaggagccagagcctgattatgaagcgatacagactctcaacagagaggaagaaaaggccaccctggggaccaatggccaccacggtctcgtcccaaaggagaacgactacgagagcataagtgacttgcagcaaggcagagatattaccaggctctagcaacccagaagacaaccctgggtagcctgtgatcagtgtctggagacgtttcttctgtggaagagaagaagtgacacaaacctatacttcatatgctgctttagtcacctgaagatggttggagaggccctgtcgactgttctcccagttgttcagtttctgagacagagaggtacggactaggctgcacctgagtgtgcccctgcctgccagatggacaggtacacccaagcacatctccctgctgcaccctcaccacccacaaaagatcccagctgtcagtggtctcatctcattagtgaggaaagccaagctgtatggaaaagctgcactcaccaaggaccacaatgcccccggcctaaagtactgccattcagaaaagcaggtttttcttcctctctttccttttctctgtctgctactgactttaaggctttttcccccttgaaatgtccagattnntgtggttcatcccaaggaaattttcacacaaagcttggcctttgccctcaatataggtgttttaggatggtgacaaaccatggctgctgctttctgcccagctcgccagtcctccccaaagagttgcgcatcagcacctggggatctggaccctgcgggtgaagggatggggagggacgtccctggagtctcttctgtctttgttccttcttattttggcattcgatatcagcagcctctccccaaagtacttgaagtcagttttagatgctttattttatttttctagtcaaaaacgtgtttcccccagtgtttgaaaactcgtccgaatcttttcagtattttccatgagtattgtggtacttctagacttgtttaagcccagaactcattccttcaaaacagagagccttaatctttatgttgggacacagaccacatatttggacggcagccatgcatccatcgctgaagggctgtggacatgaatgtgtatttcccatggtctccgctgcccacaccaacagtgtggcatctcataagttaactgctaccctaaggacatgccattatgtctttccagtacggatcacagtgctgccatatcacagaccctgccagccggcacagaaccatgcctcgtcacagctctgcccaactcacaggctgccaagatgaggccacaggtccacctagggcggcagatgctggtgctatttgtcacgacttttgccaaaacatgtacactgttgctcacatctttcgtaagaatggttgacactaaggggccatggaaaagcacttttaaaaaattatgtggtggaatcaaactcacagaggcagaaatgttagtgccgtgctctaaccaagtaagcttagtgttccccacagtgatctgtatctggcctgagtctcctcaagcagcaacccccactgtccagcatgtggaaggtagatccttatgacaacaccagacccatagttaccaggaaagaaaaaggaagctgagtgttgtgaaggggaagaaatcctttttataagaagtaatcatttttaggccgggtgcagtggctcatgcctgtaatcccagcactttgggaggctgagacaggtggatcacttgaggtcaggagtttgagacctgcctggccaacatgatgaaaccctgtctctactaaaaatgcaaaaaaaaattagccaggcatggtggcatgtgcctgtagtcccaactactcaggaggctgaggcaggagaatcacttgaacctgggaggcagaggttgcaatgagctgagatcgcaacactgcactccagcctgggcgacagagcaagactccatctcaaaaac

SEQ ID NO: 453901 - DNA, 1494 bp, Homo sapiens
  misc_feature (5)..(7): n is a, c, g, or t
  misc_feature (18)..(18): n is a, c, g, or t
  misc_feature (20)..(22): n is a, c, g, or t
tactnnncaaacatttcntnnnaggacacagctctctgcctccatgtcaccacctttgaaggactgactgattccctcggctggtgccagtgcctgctcctgccatggggcccgcggggagcctgctgggcagcggacagatgcagatcaccctgtggggaagtctggctgctgtcgccattttcttcgtcatcaccttcctcatcttcctgtgctctagttgtgacagggaaaagaagccgcgacagcatagtggggaccatgagaacctgatgaacgtgccttcagacaaggagatgttcagccgttcagttactagcctggcaacagatgctcctgccagcagtgagcagaatggggcactcaccaatggggacattctttcagaggacagtactctgacctgcatgcagcattacgaggaagtccagacatcggcctcggatctgctggattcccaggacagcacagggaaaccaaaatgtcatcagagtcgggagctgcccagaatccctcccgagagcgcagtggataccatgctcacggcgagaagtgtggacggggaccaggggctggggatggaagggccctatgaagtgctcaaggacagctcctcccaagaaaacatggtggaggactgcttgtatgaaactgtgaaagagatcaaggaggtggctgcagctgcacacctggagaaaggccacagtggcaaggcaaaatctacttctgcctcgaaagagctcccagggccccagactgaaggcaaagctgagtttgctgaatatgcctcggtggacagaaacaaaaaatgtcgtcaaagtgttaatgtagagagtatccttggaaattcatgtgatccagaagaggaggccccaccacctgtccctgttaagcttctggacgagaatgaaaaccttcaggagaaggaagggggagaggcggaagagagtgccacagacacgaccagtgaaactaacaagagatttagctcattgtcatacaagtctcgggaagaagaccccactctcacagaagaagaggtaagttttgtttctttttaaaaagggaaaactgtagtaaagaatagaccttccccccttgaataaatgcactgtaatgttaccctttgaaagagctgaaatattctcctatgcctatgtttggagatgaagacttgggatgctggttttataatggcttggagagactgacgggcaggccagacaagaaggatggcaggacaagtagtcagctcaggaaaagaaactgagcaggaaagcagggtcaggaaaaatagagagggcaggggagaagagtgagaagagaaaaattccagcgtgggagcagtcagcagtcaggaagaccacatcagaaggaaatgaatcatgggttggaaaattcaggaaattagaacaggtgagtgtagggaatttgctccagcctgggagacagaaagaggaagtctccgtggggaaatttggatgctgagagcag

SEQ ID NO: 453902 - DNA, 200 bp, Homo sapiens
gtgtgggagagtaagggttggtaatctaatggaaaacgaagacatggaactattgggaaagtgagaacagtctggctagactagggacattatgagaacaaagctggatggtaacagaccttcaaggaggattcagaaagccaggtaaaagagcagcaggaaagaagccactacttatggttcttgaataagacagttat

SEQ ID NO: 453903 - DNA, 6031 bp, Homo sapiens
cgtcctgctgtcaggaagagtgcagggcaaactctgttttctacaattggtgcgcatggaactttattacagcattcaacctggcacactgttatctggaaggtactctttcatctactggacagagttcgagagtcctctaccactgcagacaaagaaaagattgagtctggaggtggcaatattctcattcatcattcaagggacaccgccgagaagcaatgggctgagacgtgggtattaacattggctggagtagcaaggatcttcaacactagaagatatttgctgcagcctttaggagatttttcaagagcttgggatgttcttcttgaccatatacagtcagcagcactcagcaaaaacaatgaagtatctctggctgctctgaaaagcttccaggaaattttacagattgtgtcccctgtcagagactcagataagcctgagacaccacctgtagttaatgtacctgtgcctgttcttatagggcccatatcaggcatgagcaggccatttgtaagaacagattccattggagaaaaactaggaagatatagtagctctgagccacccattgttactgatgagcttgaagatttgaatctatggtgggctgcgtggaatacctggtatagaattggatctgaaagtactaagcctcctattacttttgataaactaacttttattcctagccagccttttcttacagctttaattcagatatttccagctctctaccaacacataaaaactggtttcaatatggatgacttgcaaaagttgggagtcatattgcacagtgctatttcagtcccaataagttcagatgcatccccttttattcttccatcttataccgaagcagttttgacaagtttacaggaagctgtacttacagctttagatgttctccaaaaggccatttgtgtaggaccagaaaacatgcagataatgtatccagctatatttgaccagttgttggcatttgtagaattttcctgtaaacctccacagtatggacagctggaaacaaagcacattgcaaatgcaaaatataatcaggcggaatgggtagccttgaattatgtgccgtttgctgaaaggtctttagaagtagttgtggatttataccaaaaaacagcgtgtcacaaagcagtggtgaatgagaaagtgctccagaatattattaagactcttagggttcctctcagtttgaagtattcctgcccttctgaaagcacatggaaactagcagtatcctctctcctcagagttctttctattgggctacctgttgcccggcagcatgcttcttctggaaaatttgacagtatgtggccagaactagccaatacttttgaagattttctctttactaaaagcatacctccagataatctctctattcaagagtttcaaagaaatgaaaatattgatgtcgaggtagttcaacttatcagcaatgagatactaccttatgccaattttattcctaaggaatttgttggtcaaataatgacaatgcttaacaagggctcaatacattctcagtcatcttcatttacagaagcagagattgatattcgtttgagagaggaattttctaaaatgtgttttgaaacattactccagttttccttcagtaataaagtcacaacacctcaagaaggctacatctcacgaatggcactctcagtgcttttaaagaggtcccaagatgtactacatcgctatatagaggatgaaagattaagtggtaaatgccctcttccaaggcaacaagtaacagaaattatatttgttttaaaagcagtcagtactcttattgattcacttaagaaaactcagcctgagaatgttgatggaaatacctgggcacaagtaattgccttatacccaactttagtagaatgcatcacctgttcttcttcagaagtctgttctgcacttaaagaggcactagttccttttaaggatttcatgcagccaccagcatccagagttcaaaatggagaatcttgaccggctacaatatatttgaaagcaggaagatagtctaaaaaatgtttgctcctaattgagtcttctgtgagaaggacatttcttactgcaaataattcttggcagctgttgttggcctcctttaaattctacttacctgagttcagtaattcatattacaggcttgcacatcaacaaaggctcctgaatgaacagcagtgtaaggctttaataaattaaactgatgggagggataattaacactacagtatacatgctaccatatctccagttggtgatttaaagtgagcttatgtacagtttgtggtgtatgtgttaatgatgtactttttaaaaagaaagaagagatatttcaattcagtcagatttattagtctggtgtttttgcaccctttttcaagtacaaaatcgtactagaattttatgcaagatggtactgtaacattccatattatctataaccagcctttgttaacaaagggaactgatatacttgtgtgtataataaatggtacagttctgtataaaatagtgcatttatttaaattttaaaagtattgataatgttaaatgcttaaagctctatttattattaatacaaaattgtttgcttacatttttacttataatttgccttcatatgtggcggataagctcaccatatgatcatgcagttagcttcatgcttattttaaatgtattattagtgaccattaaacatctgaccagtaaggtcatgtgaacacagcagcaaatagtttatgatttgctgattttggagctttgaaatataggttcttaatacattgatacatattgtagcactatgacttcatcatacctcatttctttaaacagctctccaagctttcactgaagtctgtctgttttttatattggctgtctggattttaaagacttttcatattttatatttctactgattttgtttcccctaacaacatttgtcactgtctttgaattatgacccaggcaagatgatttcagattttctaaaatcttgcctgtgaggttttgttcatatcagtgcttcattttgtaatgtcttctcaagaaaaatacctatgttaactcacaagtataaaatatgtgtgtattataaaacaatgaaaagtgtatttttggagatagtcaagcatttagaagtgcagtgaacttgctgtcacggagtaaaatgctaattatgtttcactttcctagcctagtgaaaaagaaaagtgctcttgagtacaataccttaattatttcttaaaatactgactttgacctagctcactgtattttttatttaatggattatggattacagtatttttcttctgagttaaattttcataatttatgtgaagacacaaagatgtttaaaacaatgattattcataagaaatcatgatggtctcagtattattttagtgtattggaaggtctttgatcttaatagaatttataaatttcagcttctccagaataatcataaaactgcaaaaagatattataattgagtcatgattgagatacagttttgaggctattataattgtataattatttaatttgcattatctgtaaaatgtagtaaggtctttgaggggatattttttatttacatgaattactgaatttctattttattatttcacctaaaattaaggtaaaatatggcatttcataagttctgctttcagcattttccttaaagttgtaaaaaatcaagctatgtacttattttctatatttgggtgtgttaaattgaggattagaaaaatccacataatcactgataaagcattgaaacagaataacccaagggtagtgtaccgattcagtaacatgttaaaaatattgctatgcatttattcaaaggaaaatggtctattcttgagaaataaaagatcagttgcaattaggataattaaatagttaaatatgagtcaagtgtatgcaatatacatttatatgaaccaaagcttgctttatcaggaccatgccctacagttcaaaacataaacatagtgaatgtgttaatatcatataataaggtaataaatgccagtcttagtgtgaagcaagtgggtggcccccttggtagtataattggacaggattttcctccagaatatttcctgtcaccctccaagagtcactacagtaattgattgctggcatggaacacattgcccttgtcttgttagtatgaattgggttctccagtgactagaagaactggggtgtgtgaaagtattcgatgccaggagattcaaaaaggaagctctcaaagataagatcattttatggcacaattgagtctataaccagccctttaagcagtagtaaaaatgtcctttgtcatacttactagaaatactatgagttttttttttttttttcatttgagacggagtctcgctctgtcacccaggctggaatgcagtggcacgatcttggctcactgcaacctctgcttcccgggttcaagcagtttcctgcttcagacttccaagtagctgggattacagacatgccaccatgccaggctaatttttttaatatttttagtagagatggggtttcaccattttggccattctagtcttgaactcctgacctcaggtgatctgcccgccttggcctcccaaagtgctgacattacaggcctgagccactgcgcccagccaataccatgagttttaagcctcacatcgtcacttgctgtcactgccagtgcctgttttattcatattgctggacaacagacatatgccaccaattgtatgattaataaagtctttttctggccattttgtccattataaaggaaataaactaattgttaacttgcatagattacttcttagtttcctatgctaccaccactgccaagggagaaaaaaatacatcattttgtaatgtctttagtatttctttataactagtgttaaggttttgttaattttattgtatacatttgtaacatttattaggagccttttaggttccaaaacaaacaaaaggcataaaaaagtctagcttagaaccacttttcacttgctttcatttttaattttattcacttaacagctaacatctttcttgtttcttgttttttccattatatggttatcgattcaactcttgctatattccttaaatttgtatgtatcatcagaagaaagagatgaacaatttagtgtagatattttattctggagaataatattcaattaaattatttctacagcaggccagtaacaactagattatttgtcctttctcagtataattttaaagagcattttgttttattgtcacaatttggtaccactagtcccaggtaaccattgggccaaaggatcagttgagaaacagttaaggatgaattagcataagttatggaacagtgttagaaaacaactcaaaagtatattctttattaatgaggtggtcattattacatttgtgtcaatgaagggcagtgtagttattttaaaatgactaatattttctccccaaatacagaataattcagatgggcaaccaagttttcaagagactgctgtaggtgaagtctgtctagccaaggcagaacacttacaggagtccctaactgtgccacccttggaatgggttagtgtacaggctcagaatattgtggattacagtttttcagagaaaactaccacagatgtagacaaaaatgatctctgaaagcattgccagcagccaggtatgttccttagatttccacttaggtttggcattttggcagataagctaatcttgtataaagcatcacattttactatgcttagtgttcctgggttgtatttatctacattattagagggaatttttattttaaaaaaattgtcattcatgagaagaatgggagttcatgccacatagtattttaccaatttatataaagtgggaaaagtctttaatacttcatgatcacttgaattaaagtttttgtatctctgga

SEQ ID NO: 453904 - DNA, 2552 bp, Homo sapiens
cgtcctgctgtcaggaagagtgcagggcaaactctgttttctacaattggtgcgcatggaactttattacagcattcaacctggcacactgttatctggaaggtactctttcatctactggacagagttcgagagtcctctaccactgcagacaaagaaaagattgagtctggaggtggcaatattctcattcatcattcaagggacaccgccgagaagcaatgggctgagacgtgggtattaacattggctggagtagcaaggatcttcaacactagaagatatttgctgcagcctttaggagatttttcaagagcttgggatgttcttcttgaccatatacagtcagcagcactcagcaaaaacaatgaagtatctctggctgctctgaaaagcttccaggaaattttacagattgtgtcccctgtcagagactcagataagcctgagacaccacctgtagttaatgtacctgtgcctgttcttatagggcccatatcaggcatgagcaggccatttgtaagaacagattccattggagaaaaactaggaagatatagtagctctgagccacccattgttactgatgagcttgaagatttgaatctatggtgggctgcgtggaatacctggtatagaattggatctgaaagtactaagcctcctattacttttgataaactaacttttattcctagccagccttttcttacagctttaattcagatatttccagctctctaccaacacataaaaactggtttcaatatggatgacttgcaaaagttgggagtcatattgcacagtgctatttcagtcccaataagttcagatgcatccccttttattcttccatcttataccgaagcagttttgacaagtttacaggaagctgtacttacagctttagatgttctccaaaaggccatttgtgtaggaccagaaaacatgcagataatgtatccagctatatttgaccagttgttggcatttgtagaattttcctgtaaacctccacagtatggacagctggaaacaaagcacattgcaaatgcaaaatataatcaggcggaatgggtagccttgaattatgtgccgtttgctgaaaggtctttagaagtagttgtggatttataccaaaaaacagcgtgtcacaaagcagtggtgaatgagaaagtgctccagaatattattaagactcttagggttcctctcagtttgaagtattcctgcccttctgaaagcacatggaaactagcagtatcctctctcctcagagttctttctattgggctacctgttgcccggcagcatgcttcttctggaaaatttgacagtatgtggccagaactagccaatacttttgaagattttctctttactaaaagcatacctccagataatctctctattcaagagtttcaaagaaatgaaaatattgatgtcgaggtagttcaacttatcagcaatgagatactaccttatgccaattttattcctaaggaatttgttggtcaaataatgacaatgcttaacaagggctcaatacattctcagtcatcttcatttacagaagcagagattgatattcgtttgagagaggaattttctaaaatgtgttttgaaacattactccagttttccttcagtaataaagtcacaacacctcaagaaggctacatctcacgaatggcactctcagtgcttttaaagaggtcccaagatgtactacatcgctatatagaggatgaaagattaagtggtaaatgccctcttccaaggcaacaagtaacagaaattatatttgttttaaaagcagtcagtactcttattgattcacttaagaaaactcagcctgagaatgttgatggaaatacctgggcacaagtaattgccttatacccaactttagtagaatgcatcacctgttcttcttcagaagtctgttctgcacttaaagaggcactagttccttttaaggatttcatgcagccaccagcatccagagttcaaaatggagaatcttgaccggctacaatatatttgaaagcaggaagatagtctaaaaaatgtttgctcctaattgagtcttctgtgagaaggacatttcttactgcaaataattcttggcagctgttgttggcctcctttaaattctacttacctgagttcagtaattcatattacaggcttgcacatcaacaaaggctcctgaatgaacagcagtgtaaggctttaataaattaaactgatgggagggataattaacactacagtatacatgctaccatatctccagttggtgatttaaagtgagcttatgtacagtttgtggtgtatgtgttaatgatgtactttttaaaaagaaagaagagatatttcaattcagtcagatttattagtctggtgtttttgcaccctttttcaagtacaaaatcgtactagaattttatgcaagatggtactgtaacattccatattatctataaccagcctttgttaacaaagggaactgatatacttgtgtgtataataaatggtacagttctgta

SEQ ID NO: 453905 - DNA, 4769 bp, Homo sapiens
taaataataatgccccaacctgggttggaagacataattttttgacatttgaatactgtttttctattttgtttgtatttgcagggaatattttatctttaaaaatcaagtgttttttttttttagcatacctccagataatctctctattcaagagtttcaaagaaatgaaaatattgatgtcgaggtagttcaacttatcagcaatgagatactaccttatgccaattttattcctaaggaatttgttggtcaaataatgacaatgcttaacaagggctcaatacattctcagtcatcttcatttacagaagcagagattgatattcgtttgagagaggaattttctaaaatgtgttttgaaacattactccagttttccttcagtaataaagtcacaacacctcaagaaggctacatctcacgaatggcactctcagtgcttttaaagaggtcccaagatgtactacatcgctatatagaggatgaaagattaagtggtaaatgccctcttccaaggcaacaagtaacagaaattatatttgttttaaaagcagtcagtactcttattgattcacttaagaaaactcagcctgagaatgttgatggaaatacctgggcacaagtaattgccttatacccaactttagtagaatgcatcacctgttcttcttcagaagtctgttctgcacttaaagaggcactagttccttttaaggatttcatgcagccaccagcatccagagttcaaaatggagaatcttgaccggctacaatatatttgaaagcaggaagatagtctaaaaaatgtttgctcctaattgagtcttctgtgagaaggacatttcttactgcaaataattcttggcagctgttgttggcctcctttaaattctacttacctgagttcagtaattcatattacaggcttgcacatcaacaaaggctcctgaatgaacagcagtgtaaggctttaataaattaaactgatgggagggataattaacactacagtatacatgctaccatatctccagttggtgatttaaagtgagcttatgtacagtttgtggtgtatgtgttaatgatgtactttttaaaaagaaagaagagatatttcaattcagtcagatttattagtctggtgtttttgcaccctttttcaagtacaaaatcgtactagaattttatgcaagatggtactgtaacattccatattatctataaccagcctttgttaacaaagggaactgatatacttgtgtgtataataaatggtacagttctgtataaaatagtgcatttatttaaattttaaaagtattgataatgttaaatgcttaaagctctatttattattaatacaaaattgtttgcttacatttttacttataatttgccttcatatgtggcggataagctcaccatatgatcatgcagttagcttcatgcttattttaaatgtattattagtgaccattaaacatctgaccagtaaggtcatgtgaacacagcagcaaatagtttatgatttgctgattttggagctttgaaatataggttcttaatacattgatacatattgtagcactatgacttcatcatacctcatttctttaaacagctctccaagctttcactgaagtctgtctgttttttatattggctgtctggattttaaagacttttcatattttatatttctactgattttgtttcccctaacaacatttgtcactgtctttgaattatgacccaggcaagatgatttcagattttctaaaatcttgcctgtgaggttttgttcatatcagtgcttcattttgtaatgtcttctcaagaaaaatacctatgttaactcacaagtataaaatatgtgtgtattataaaacaatgaaaagtgtatttttggagatagtcaagcatttagaagtgcagtgaacttgctgtcacggagtaaaatgctaattatgtttcactttcctagcctagtgaaaaagaaaagtgctcttgagtacaataccttaattatttcttaaaatactgactttgacctagctcactgtattttttatttaatggattatggattacagtatttttcttctgagttaaattttcataatttatgtgaagacacaaagatgtttaaaacaatgattattcataagaaatcatgatggtctcagtattattttagtgtattggaaggtctttgatcttaatagaatttataaatttcagcttctccagaataatcataaaactgcaaaaagatattataattgagtcatgattgagatacagttttgaggctattataattgtataattatttaatttgcattatctgtaaaatgtagtaaggtctttgaggggatattttttatttacatgaattactgaatttctattttattatttcacctaaaattaaggtaaaatatggcatttcataagttctgctttcagcattttccttaaagttgtaaaaaatcaagctatgtacttattttctatatttgggtgtgttaaattgaggattagaaaaatccacataatcactgataaagcattgaaacagaataacccaagggtagtgtaccgattcagtaacatgttaaaaatattgctatgcatttattcaaaggaaaatggtctattcttgagaaataaaagatcagttgcaattaggataattaaatagttaaatatgagtcaagtgtatgcaatatacatttatatgaaccaaagcttgctttatcaggaccatgccctacagttcaaaacataaacatagtgaatgtgttaatatcatataataaggtaataaatgccagtcttagtgtgaagcaagtgggtggcccccttggtagtataattggacaggattttcctccagaatatttcctgtcaccctccaagagtcactacagtaattgattgctggcatggaacacattgcccttgtcttgttagtatgaattgggttctccagtgactagaagaactggggtgtgtgaaagtattcgatgccaggagattcaaaaaggaagctctcaaagataagatcattttatggcacaattgagtctataaccagccctttaagcagtagtaaaaatgtcctttgtcatacttactagaaatactatgagttttttttttttttttcatttgagacggagtctcgctctgtcacccaggctggaatgcagtggcacgatcttggctcactgcaacctctgcttcccgggttcaagcagtttcctgcttcagacttccaagtagctgggattacagacatgccaccatgccaggctaatttttttaatatttttagtagagatggggtttcaccattttggccattctagtcttgaactcctgacctcaggtgatctgcccgccttggcctcccaaagtgctgacattacaggcctgagccactgcgcccagccaataccatgagttttaagcctcacatcgtcacttgctgtcactgccagtgcctgttttattcatattgctggacaacagacatatgccaccaattgtatgattaataaagtctttttctggccattttgtccattataaaggaaataaactaattgttaacttgcatagattacttcttagtttcctatgctaccaccactgccaagggagaaaaaaatacatcattttgtaatgtctttagtatttctttataactagtgttaaggttttgttaattttattgtatacatttgtaacatttattaggagccttttaggttccaaaacaaacaaaaggcataaaaaagtctagcttagaaccacttttcacttgctttcatttttaattttattcacttaacagctaacatctttcttgtttcttgttttttccattatatggttatcgattcaactcttgctatattccttaaatttgtatgtatcatcagaagaaagagatgaacaatttagtgtagatattttattctggagaataatattcaattaaattatttctacagcaggccagtaacaactagattatttgtcctttctcagtataattttaaagagcattttgttttattgtcacaatttggtaccactagtcccaggtaaccattgggccaaaggatcagttgagaaacagttaaggatgaattagcataagttatggaacagtgttagaaaacaactcaaaagtatattctttattaatgaggtggtcattattacatttgtgtcaatgaagggcagtgtagttattttaaaatgactaatattttctccccaaatacagaataattcagatgggcaaccaagttttcaagagactgctgtaggtgaagtctgtctagccaaggcagaacacttacaggagtccctaactgtgccacccttggaatgggttagtgtacaggctcagaatattgtggattacagtttttcagagaaaactaccacagatgtagacaaaaatgatctctgaaagcattgccagcagccaggtatgttccttagatttccacttaggtttggcattttggcagataagctaatcttgtataaagcatcacattttactatgcttagtgttcctgggttgtatttatctacattattagagggaatttttattttaaaaaaattgtcattcatgagaagaatgggagttcatgccacatagtattttaccaatttatataaagtgggaaaagtctttaatacttcatgatcacttgaattaaagtttttgtatctctgga

SEQ ID NO: 453906 - DNA, 1577 bp, Homo sapiens
cgaccaattgtttgaggcagtggaaatttataaaagcagaaaggaaagtatagaagaaggaaacttggagtgtcagaaacagaaaataatggaaagtagctgggattacagacatgccaccatgccaggctaatttttttaatatttttagtagagatggggtttcaccattttggccattctagtcttgaactcctgacctcaggtgatctgcccgccttggcctcccaaagtgctgacattacaggcctgagccactgcgcccagccaataccatgagttttaagcctcacatcgtcacttgctgtcactgccagtgcctgttttattcatattgctggacaacagacatatgccaccaattgtatgattaataaagtctttttctggccattttgtccattataaaggaaataaactaattgttaacttgcatagattacttcttagtttcctatgctaccaccactgccaagggagaaaaaaatacatcattttgtaatgtctttagtatttctttataactagtgttaaggttttgttaattttattgtatacatttgtaacatttattaggagccttttaggttccaaaacaaacaaaaggcataaaaaagtctagcttagaaccacttttcacttgctttcatttttaattttattcacttaacagctaacatctttcttgtttcttgttttttccattatatggttatcgattcaactcttgctatattccttaaatttgtatgtatcatcagaagaaagagatgaacaatttagtgtagatattttattctggagaataatattcaattaaattatttctacagcaggccagtaacaactagattatttgtcctttctcagtataattttaaagagcattttgttttattgtcacaatttggtaccactagtcccaggtaaccattgggccaaaggatcagttgagaaacagttaaggatgaattagcataagttatggaacagtgttagaaaacaactcaaaagtatattctttattaatgaggtggtcattattacatttgtgtcaatgaagggcagtgtagttattttaaaatgactaatattttctccccaaatacagaataattcagatgggcaaccaagttttcaagagactgctgtaggtgaagtctgtctagccaaggcagaacacttacaggagtccctaactgtgccacccttggaatgggttagtgtacaggctcagaatattgtggattacagtttttcagagaaaactaccacagatgtagacaaaaatgatctctgaaagcattgccagcagccaggtatgttccttagatttccacttaggtttggcattttggcagataagctaatcttgtataaagcatcacattttactatgcttagtgttcctgggttgtatttatctacattattagagggaatttttattttaaaaaaattgtcattcatgagaagaatgggagttcatgccacatagtattttaccaatttatataaagtgggaaaagtctttaatacttcatgatcacttgaattaaagtttttgtatctctgga

SEQ ID NO: 453907 - DNA, 187 bp, Homo sapiens
catacctccagataatctctctattcaagagtttcaaagaaatgaaaatattgatgtcgaggtaaggaggctatttaaaatgttttcctgtgaccatttttgaaaccaaatagtaaaaatgtttgaactatacagttgctgaaagaataaagtaataggttaagattaaaactgaaagcattaaaac

SEQ ID NO: 453908 - DNA, 140 bp, Homo sapiens
gcatccccttttattcttccatcttataccgaagcagttttgacaagtttacaggaagctgtacttacagctttagatgttctccaaaaggtaatataattttagtggctaagtaatactgcatatagttctctgaaatt

SEQ ID NO: 453909 - DNA, 423 bp, Homo sapiens
ttcatcattcaagggacaccgccgagaagcaatgggctgagacgtgggtattaacattggctggagtagcaaggatcttcaacactagaagatatttgctgcagcctttaggtatacgtacatttttttctgattatacaagtaattaatgttaaaagaaatttggaaaatacagacgattcttttagagtctatcttaacttagtctttatgtgtggtgtgtgtgtaagcatctgtgttttcattcgtttgtacctactgtgggctagcctctagaggatacaatgaaaggcaaaatacacgtcattcttgctatcatgggcatgaggaagtacccataattacataaataaaggcgaaatttctacaatgatgtgttacaaggagtggtactttgtgagcttcggtaagtatttgacctgg

SEQ ID NO: 453910 - DNA, 345 bp, Homo sapiens
ttttcactatatgtatgctattagctataggttgttctaggtgcctttcaccagattgaggaatttctctctattcctagtttgctaagcattgttatcattaaagctcattgatttaacttctattaaccatcaaaatttgttaattttacagaagcagagattgatattcgtttgagagaggaattttctaaaatgtgttttgaaacattactccagttttccttcagtaataaagtcacaacacctcaagaaggctacatctcacgaatggcactctcagtgcttttaaagaggtcccaagatgtactacatcgctatatagaggatgaaagattaagtggt

SEQ ID NO: 453911 - DNA, 6201 bp, Homo sapiens
cgtcctgctgtcaggaagagtgcagggcaaactctgttttctacaattggtgcgcatggaactttattacagcattcaacctggcacactgttatctggaaggtactctttcatctactggacagagttcgagagtcctctaccactgcagacaaagaaaagattgagtctggaggtggcaatattctcattcatcattcaagggacaccgccgagaagcaatgggctgagacgtgggtattaacattggctggagtagcaaggatcttcaacactagaagatatttgctgcagcctttaggagatttttcaagagcttgggatgttcttcttgaccatatacagtcagcagcactcagcaaaaacaatgaagtatctctggctgctctgaaaagcttccaggaaattttacagattgtgtcccctgtcagagactcagataagcctgagacaccacctgtagttaatgtacctgtgcctgttcttatagggcccatatcaggcatgagcaggccatttgtaagaacagattccattggagaaaaactaggaagatatagtagctctgagccacccattgttactgatgagcttgaagatttgaatctatggtgggctgcgtggaatacctggtatagaattggatctgaaagtactaagcctcctattacttttgataaactaacttttattcctagccagccttttcttacagctttaattcagatatttccagctctctaccaacacataaaaactggtttcaatatggatgacttgcaaaagttgggagtcatattgcacagtgctatttcagtcccaataagttcagatgcatccccttttattcttccatcttataccgaagcagttttgacaagtttacaggaagctgtacttacagctttagatgttctccaaaaggccatttgtgtaggaccagaaaacatgcagataatgtatccagctatatttgaccagttgttggcatttgtagaattttcctgtaaacctccacagtatggacagctggaaacaaagcacattgcaaatgcaaaatataatcaggcggaatgggtagccttgaattatgtgccgtttgctgaaaggtctttagaagtagttgtggatttataccaaaaaacagcgtgtcacaaagcagtggtgaatgagaaagtgctccagaatattattaagactcttagggttcctctcagtttgaagtattcctgcccttctgaaagcacatggaaactagcagtatcctctctcctcagagttctttctattgggctacctgttgcccggcagcatgcttcttctggaaaatttgacagtatgtggccagaactagccaatacttttgaagattttctctttactaaaagcatacctccagataatctctctattcaagagtttcaaagaaatgaaaatattgatgtcgaggtagttcaacttatcagcaatgagatactaccttatgccaattttattcctaaggaatttgttggtcaaataatgacaatgcttaacaagggctcaatacattctcagtcatcttcatttacagaagcagagattgatattcgtttgagagaggaattttctaaaatgtgttttgaaacattactccagttttccttcagtaataaagtcacaacacctcaagaaggctacatctcacgaatggcactctcagtgcttttaaagaggtcccaagatgtactacatcgctatatagaggatgaaagattaagtggtaaatgccctcttccaaggcaacaagtaacagaaattatatttgttttaaaagcagtcagtactcttattgattcacttaagaaaactcagcctgagaatgttgatggaaatacctgggcacaagtaattgccttatacccaactttagtagaatgcatcacctgttcttcttcagaagtctgttctgcacttaaagaggcactagttccttttaaggatttcatgcagccaccagcatccagagttcaaaatggagaatcttgaccggctacaatatatttgaaagcaggaagatagtctaaaaaatgtttgctcctaattgagtcttctgtgagaaggacatttcttactgcaaataattcttggcagctgttgttggcctcctttaaattctacttacctgagttcagtaattcatattacaggcttgcacatcaacaaaggctcctgaatgaacagcagtgtaaggctttaataaattaaactgatgggagggataattaacactacagtatacatgctaccatatctccagttggtgatttaaagtgagcttatgtacagtttgtggtgtatgtgttaatgatgtactttttaaaaagaaagaagagatatttcaattcagtcagatttattagtctggtgtttttgcaccctttttcaagtacaaaatcgtactagaattttatgcaagatggtactgtaacattccatattatctataaccagcctttgttaacaaagggaactgatatacttgtgtgtataataaatggtacagttctgtataaaatagtgcatttatttaaattttaaaagtattgataatgttaaatgcttaaagctctatttattattaatacaaaattgtttgcttacatttttacttataatttgccttcatatgtggcggataagctcaccatatgatcatgcagttagcttcatgcttattttaaatgtattattagtgaccattaaacatctgaccagtaaggtcatgtgaacacagcagcaaatagtttatgatttgctgattttggagctttgaaatataggttcttaatacattgatacatattgtagcactatgacttcatcatacctcatttctttaaacagctctccaagctttcactgaagtctgtctgttttttatattggctgtctggattttaaagacttttcatattttatatttctactgattttgtttcccctaacaacatttgtcactgtctttgaattatgacccaggcaagatgatttcagattttctaaaatcttgcctgtgaggttttgttcatatcagtgcttcattttgtaatgtcttctcaagaaaaatacctatgttaactcacaagtataaaatatgtgtgtattataaaacaatgaaaagtgtatttttggagatagtcaagcatttagaagtgcagtgaacttgctgtcacggagtaaaatgctaattatgtttcactttcctagcctagtgaaaaagaaaagtgctcttgagtacaataccttaattatttcttaaaatactgactttgacctagctcactgtattttttatttaatggattatggattacagtatttttcttctgagttaaattttcataatttatgtgaagacacaaagatgtttaaaacaatgattattcataagaaatcatgatggtctcagtattattttagtgtattggaaggtctttgatcttaatagaatttataaatttcagcttctccagaataatcataaaactgcaaaaagatattataattgagtcatgattgagatacagttttgaggctattataattgtataattatttaatttgcattatctgtaaaatgtagtaaggtctttgaggggatattttttatttacatgaattactgaatttctattttattatttcacctaaaattaaggtaaaatatggcatttcataagttctgctttcagcattttccttaaagttgtaaaaaatcaagctatgtacttattttctatatttgggtgtgttaaattgaggattagaaaaatccacataatcactgataaagcattgaaacagaataacccaagggtagtgtaccgattcagtaacatgttaaaaatattgctatgcatttattcaaaggaaaatggtctattcttgagaaataaaagatcagttgcaattaggataattaaatagttaaatatgagtcaagtgtatgcaatatacatttatatgaaccaaagcttgctttatcaggaccatgccctacagttcaaaacataaacatagtgaatgtgttaatatcatataataaggtaataaatgccagtcttagtgtgaagcaagtgggtggcccccttggtagtataattggacaggattttcctccagaatatttcctgtcaccctccaagagtcactacagtaattgattgctggcatggaacacattgcccttgtcttgttagtatgaattgggttctccagtgactagaagaactggggtgtgtgaaagtattcgatgccaggagattcaaaaaggaagctctcaaagataagatcattttatggcacaattgagtctataaccagccctttaagcagtagtaaaaatgtcctttgtcatacttactagaaatactatgagttttttttttttttttcatttgagacggagtctcgctctgtcacccaggctggaatgcagtggcacgatcttggctcactgcaacctctgcttcccgggttcaagcagtttcctgcttcagacttccaagtagctgggattacagacatgccaccatgccaggctaatttttttaatatttttagtagagatggggtttcaccattttggccattctagtcttgaactcctgacctcaggtgatctgcccgccttggcctcccaaagtgctgacattacaggcctgagccactgcgcccagccaataccatgagttttaagcctcacatcgtcacttgctgtcactgccagtgcctgttttattcatattgctggacaacagacatatgccaccaattgtatgattaataaagtctttttctggccattttgtccattataaaggaaataaactaattgttaacttgcatagattacttcttagtttcctatgctaccaccactgccaagggagaaaaaaatacatcattttgtaatgtctttagtatttctttataactagtgttaaggttttgttaattttattgtatacatttgtaacatttattaggagccttttaggttccaaaacaaacaaaaggcataaaaaagtctagcttagaaccacttttcacttgctttcatttttaattttattcacttaacagctaacatctttcttgtttcttgttttttccattatatggttatcgattcaactcttgctatattccttaaatttgtatgtatcatcagaagaaagagatgaacaatttagtgtagatattttattctggagaataatattcaattaaattatttctacagcaggccagtaacaactagattatttgtcctttctcagtataattttaaagagcattttgttttattgtcacaatttggtaccactagtcccaggtaaccattgggccaaaggatcagttgagaaacagttaaggatgaattagcataagttatggaacagtgttagaaaacaactcaaaagtatattctttattaatgaggtggtcattattacatttgtgtcaatgaagggcagtgtagttattttaaaatgactaatattttctccccaaatacagaataattcagatgggcaaccaagttttcaagagactgctgtaggtgaagtctgtctagccaaggcagaacacttacaggagtccctaactgtgccacccttggaatgggttagtgtacaggctcagaatattgtggattacagtttttcagagaaaactaccacagatgtagacaaaaatgatctctgaaagcattgccagcagccaggtatgttccttagatttccacttaggtttggcattttggcagataagctaatcttgtataaagcatcacattttactatgcttagtgttcctgggttgtatttatctacattattagagggaatttttattttaaaaaaattgtcattcatgagaagaatgggagttcatgccacatagtattttaccaatttatataaagtgggaaaagtctttaatacttcatgatcacttgaattaaagtttttgtatctctggaaagtagaatagtgctttcatttgaatgaaaagtgtttatagattcagaaagagagatgatatctttgtatcttgatttatatacagaccatttcagaggaagttaaatgtcttacaaatccaatactttctaatgctctaacagtgttggctatttaaaagaacatgtgg

SEQ ID NO: 453912 - DNA, 2756 bp, Homo sapiens
tacatatggtcttttggcattacccaagtgagcctccctttctctgatatgccttgtagccaaagtattaaaggctgatgaacatagacaagggaaatgcatttcttagaaatccgtgaacctcagttgtatgctttcagtactcgtgttaatatgtttctatggcaactctgaggtcagtggtttagaaatgagataccagtgttaatgaaaagtgtgtgctctttgcttttgcatggcttggcttagtatccaaggtatattagggccacttgaaagcatgaagaccagttatatagggaacaggtttctctcagtggcacattttgctttttctgagccccaaatacattgcctgggcatgaacattgttaccgtaaattgcacatggtcatggactgaattatgtgactttaaaggatgtaactgcccaacatttgcagattctgggtggtctatgtgaccatttgtctcgtatccaaaaaccccggggctattggaacccttccaacactttttcctttgtcatagacaagtttatatataacttaccaagatgttggctgtcctggtgtattgccagacagctctcttttggttcccattccaaatgtgctgctgtccttctttgcatttcacaatatcaaagaaaccaccacccttcttcctaacagcattttatgccttttattccacattaaatgggaattgtgcctacttaggagtgcccctccaattaattacatgtgtccaagaataatccaagctagagacacaaggtgggaaaacatttcaaaaaaaaaaagtcctcttaaggccagtaatttatctgaaaaggtattttatcacaccttgacaccttatatatgagcctattaggagctgcaggtggtttcatagggtaaaatccaagaaaagagaaggatgtgtggggtttctattagaagataattttgttctcattttaccttttcttttatgatccttctctgctagaacaggttaattctccaaatttgttttgtttgttttgttattttttagggaactcttttgcaaaagcaatggtcggatgtaaataacatttaaagtatagtgcacataacttccccggactgttccaatctgataatttgtaaatgctttagagtttttttaattaacacttgtgttgctaaattctatttatgtaagtctgctaaagttttttagcccacttaaaacttaagacaaccatttaaaataatggatgggttactatgagcaatttcgctttcagaacccccttgttttagtatatgaaaaagcctaatgcgcattaatgaggttgaagagactatgagaaatatgtatagtgtatattttaaaacagctttgcttgtattgtgaagatttaaaaacaaacttgagatttttaacgtaactattaacacagttttaacataagttatcccactgggtttaagagcatcttgaatgtataatcctttttgtaacccaggttggtttctacttttaccagtcacccaaacatatttatgtttttagttttatgtactcatttccctttgttttcctcaaacagcatgatttttttgcacatgtagaaattttttaaaagaaagaaattagtacatcattttctctggattttcttcacttccctcttcctttctactaactccttccttaaaggccatatcactccatttgcattatttgtgcaaatgccagggttggtttttatttttatttttgctatttacctaaaaaaagaaaatgcttcagtcaattgcttttttatttaaaaaaaaaaagaaaaaaagctgtaaccttatcatttctgagtagaccattgagcgatgaatgcacacctgtagtagcccaggaccagctgtggtggctaaagggaatatgttaattaagcaagaggttcttttctaaaagtggtatctgttatccacaatgtattttagttattcccacaagtcaggggtccagataaaatgagggttatcagctaactgatatgctatcattgaggttcatcaatgaatttgtacatttctagttccctttggtgaagggaaaaatgatgattttgcaagacctagattttggcttggtttcttgcctccttttttggcagccttcatcttctcatctcccaaaccccctgagcccgtagggttttcatagtggacaaagaacttgtggtcttttaaaactgggactgatacttttttgagagagtatcgtgtcgaaagtgtgatgttctaccactttaccaataactaattttaaatacacattgtcctctcgatttttggaccaaacagacgctcacagtggaggcttatcaagggttgcattggggaagaagcctctccctctctgtcagcaccagctggtaaaggtgactgtacagatgtgcattttccttttggtataaatggtccacagcactaactggtaaggcttattgtacagtatattgtcagtattcttctggttcagcataccttatagttcatatataacctgtattaattgtatagattgtgcattaaaagctgttaccaagttgtcagaacataagagcgaaaacaaggtcatatgtaatattttgtttgtaagtatcctttgtatcatagcaaaggaaatgtttaaaaaaatcaactgtaataaagtaattttagtacaaaaaaaaaaagaagtggggcaaattctgggggggaaaagaggtagaatgggtg

SEQ ID NO: 453913 - DNA, 2703 bp, Homo sapiens
tacatatggtcttttggcattacccaagtgagcctccctttctctgatatgccttgtagccaaagtattaaaggctgatgaacatagacaagggaaatgcatttcttagaaatccgtgaacctcagttgtatgctttcagtactcgtgttaatatgtttctatggcaactctgaggtcagtggtttagaaatgagataccagtgttaatgaaaagtgtgtgctctttgcttttgcatggcttggcttagtatccaaggtatattagggccacttgaaagcatgaagaccagttatatagggaacaggtttctctcagtggcacattttgctttttctgagccccaaatacattgcctgggcatgaacattgttaccgtaaattgcacatggtcatggactgaattatgtgactttaaaggatgtaactgcccaacatttgcagattctgggtggtctatgtgaccatttgtctcgtatccaaaaaccccggggctattggaacccttccaacactttttcctttgtcatagacaagtttatatataacttaccaagatgttggctgtcctggtgtattgccagacagctctcttttggttcccattccaaatgtgctgctgtccttctttgcatttcacaatatcaaagaaaccaccacccttcttcctaacagcattttatgccttttattccacattaaatgggaattgtgcctacttaggagtgcccctccaattaattacatgtgtccaagaataatccaagctagagacacaaggtgggaaaacatttcaaaaaaaaaaagtcctcttaaggccagtaatttatctgaaaaggtattttatcacaccttgacaccttatatatgagcctattaggagctgcaggtggtttcatagggtaaaatccaagaaaagagaaggatgtgtggggtttctattagaagataattttgttctcattttaccttttcttttatgatccttctctgctagaacaggttaattctccaaatttgttttgtttgttttgttattttttagggaactcttttgcaaaagcaatggtcggatgtaaataacatttaaagtatagtgcacataacttccccggactgttccaatctgataatttgtaaatgctttagagtttttttaattaacacttgtgttgctaaattctatttatgtaagtctgctaaagttttttagcccacttaaaacttaagacaaccatttaaaataatggatgggttactatgagcaatttcgctttcagaacccccttgttttagtatatgaaaaagcctaatgcgcattaatgaggttgaagagactatgagaaatatgtatagtgtatattttaaaacagctttgcttgtattgtgaagatttaaaaacaaacttgagatttttaacgtaactattaacacagttttaacataagttatcccactgggtttaagagcatcttgaatgtataatcctttttgtaacccaggttggtttctacttttaccagtcacccaaacatatttatgtttttagttttatgtactcatttccctttgttttcctcaaacagcatgatttttttgcacatgtagaaattttttaaaagaaagaaattagtacatcattttctctggattttcttcacttccctcttcctttctactaactccttccttaaaggccatatcactccatttgcattatttgtgcaaatgccagggttggtttttatttttatttttgctatttacctaaaaaaagaaaatgcttcagtcaattgcttttttatttaaaaaaaaaaagaaaaaaagctgtaaccttatcatttctgagtagaccattgagcgatgaatgcacacctgtagtagcccaggaccagctgtggtggctaaagggaatatgttaattaagcaagaggttcttttctaaaagtggtatctgttatccacaatgtattttagttattcccacaagtcaggggtccagataaaatgagggttatcagctaactgatatgctatcattgaggttcatcaatgaatttgtacatttctagttccctttggtgaagggaaaaatgatgattttgcaagacctagattttggcttggtttcttgcctccttttttggcagccttcatcttctcatctcccaaaccccctgagcccgtagggttttcatagtggacaaagaacttgtggtcttttaaaactgggactgatacttttttgagagagtatcgtgtcgaaagtgtgatgttctaccactttaccaataactaattttaaatacacattgtcctctcgatttttggaccaaacagacgctcacagtggaggcttatcaagggttgcattggggaagaagcctctccctctctgtcagcaccagctggtaaaggtgactgtacagatgtgcattttccttttggtataaatggtccacagcactaactggtaaggcttattgtacagtatattgtcagtattcttctggttcagcataccttatagttcatatataacctgtattaattgtatagattgtgcattaaaagctgttaccaagttgtcagaacataagagcgaaaacaaggtcatatgtaatattttgtttgtaagtatcctttgtatcatagcaaaggaaatgtttaaaaaaatcaactgtaataaagtaattttagtaca

SEQ ID NO: 453914 - DNA, 3598 bp, Homo sapiens
tacatatggtcttttggcattacccaagtgagcctccctttctctgatatgccttgtagccaaagtattaaaggctgatgaacatagacaagggaaatgcatttcttagaaatccgtgaacctcagttgtatgctttcagtactcgtgttaatatgtttctatggcaactctgaggtcagtggtttagaaatgagataccagtgttaatgaaaagtgtgtgctctttgcttttgcatggcttggcttagtatccaaggtatattagggccacttgaaagcatgaagaccagttatatagggaacaggtttctctcagtggcacattttgctttttctgagccccaaatacattgcctgggcatgaacattgttaccgtaaattgcacatggtcatggactgaattatgtgactttaaaggatgtaactgcccaacatttgcagattctgggtggtctatgtgaccatttgtctcgtatccaaaaaccccggggctattggaacccttccaacactttttcctttgtcatagacaagtttatatataacttaccaagatgttggctgtcctggtgtattgccagacagctctcttttggttcccattccaaatgtgctgctgtccttctttgcatttcacaatatcaaagaaaccaccacccttcttcctaacagcattttatgccttttattccacattaaatgggaattgtgcctacttaggagtgcccctccaattaattacatgtgtccaagaataatccaagctagagacacaaggtgggaaaacatttcaaaaaaaaaaagtcctcttaaggccagtaatttatctgaaaaggtattttatcacaccttgacaccttatatatgagcctattaggagctgcaggtggtttcatagggtaaaatccaagaaaagagaaggatgtgtggggtttctattagaagataattttgttctcattttaccttttcttttatgatccttctctgctagaacaggttaattctccaaatttgttttgtttgttttgttattttttagggaactcttttgcaaaagcaatggtcggatgtaaataacatttaaagtatagtgcacataacttccccggactgttccaatctgataatttgtaaatgctttagagtttttttaattaacacttgtgttgctaaattctatttatgtaagtctgctaaagttttttagcccacttaaaacttaagacaaccatttaaaataatggatgggttactatgagcaatttcgctttcagaacccccttgttttagtatatgaaaaagcctaatgcgcattaatgaggttgaagagactatgagaaatatgtatagtgtatattttaaaacagctttgcttgtattgtgaagatttaaaaacaaacttgagatttttaacgtaactattaacacagttttaacataagttatcccactgggtttaagagcatcttgaatgtataatcctttttgtaacccaggttggtttctacttttaccagtcacccaaacatatttatgtttttagttttatgtactcatttccctttgttttcctcaaacagcatgatttttttgcacatgtagaaattttttaaaagaaagaaattagtacatcattttctctggattttcttcacttccctcttcctttctactaactccttccttaaaggccatatcactccatttgcattatttgtgcaaatgccagggttggtttttatttttatttttgctatttacctaaaaaaagaaaatgcttcagtcaattgcttttttatttaaaaaaaaaaagaaaaaaagctgtaaccttatcatttctgagtagaccattgagcgatgaatgcacacctgtagtagcccaggaccagctgtggtggctaaagggaatatgttaattaagcaagaggttcttttctaaaagtggtatctgttatccacaatgtattttagttattcccacaagtcaggggtccagataaaatgagggttatcagctaactgatatgctatcattgaggttcatcaatgaatttgtacatttctagttccctttggtgaagggaaaaatgatgattttgcaagacctagattttggcttggtttcttgcctccttttttggcagccttcatcttctcatctcccaaaccccctgagcccgtagggttttcatagtggacaaagaacttgtggtcttttaaaactgggactgatacttttttgagagagtatcgtgtcgaaagtgtgatgttctaccactttaccaataactaattttaaatacacattgtcctctcgatttttggaccaaacagacgctcacagtggaggcttatcaagggttgcattggggaagaagcctctccctctctgtcagcaccagctggtaaaggtgactgtacagatgtgcattttccttttggtataaatggtccacagcactaactggtaaggcttattgtacagtatattgtcagtattcttctggttcagcataccttatagttcatatataacctgtattaattgtatagattgtgcattaaaagctgttaccaagttgtcagaacataagagcgaaaacaaggtcatatgtaatattttgtttgtaagtatcctttgtatcatagcaaaggaaatgtttaaaaaaatcaactgtaataaagtaattttagtacaaaaaaaaaaaaaaaaaaaaaaaaaaaaaaaaaaaaaaaaaaaaaaaaaaaaaaaaaaaaaaaaaaaaaaagaagaaaagaaagggtggtaaggggcgatccgatggaataatcatgtagaggatagtaagtcacatggaaggatcactaataaaaagcaaccatctaacttgaataaaccgtcgccaacgtcgctggagcctatagaagactaagaaacaatgtagacaacgggagtggtggcgaaaatttctggaacaccacaacaccagaaagatttaaccgcctagctaagtaaagatattaaaatatcaacacggaaatttaaaattagcaaaacaatacaccatatatagatagaagagaatgaagaaaaaaaatgaatagccaaacaaaacaactccgaacaacaagtaaacaacaaggaccatcgaccagacaaaacacgaaacaacgaagaacacaacaacaacacaacagcgtaacaaaatcacacaacagaacacgcaaaaacacaacacacgccaccagaccaaacatgcaaaaacagcaagaagaacgaacaagcaaaaaaaaaagcaagaacacaagagcacaacacagcacaccacaaacacaacacagaccacacaacacgagaacaacaaccacacaggcagaaaacaacaaaacaagaaagccacacagccccacaacaccaagaagaacaacaaacgacgaagacaacacacacaccacaccacagaccacacaagagcaccagggccaagcacgagaggaacgaaccaagcacacccactacaaccaacacaaccagagagcaaacagacacaaacacagaacaagaccagcagcagcgacacaaagagcacgaagcaaacaaaaacacccacgag

SEQ ID NO: 453915 - DNA, 3057 bp, Homo sapiens
tacatatggtcttttggcattacccaagtgagcctccctttctctgatatgccttgtagccaaagtattaaaggctgatgaacatagacaagggaaatgcatttcttagaaatccgtgaacctcagttgtatgctttcagtactcgtgttaatatgtttctatggcaactctgaggtcagtggtttagaaatgagataccagtgttaatgaaaagtgtgtgctctttgcttttgcatggcttggcttagtatccaaggtatattagggccacttgaaagcatgaagaccagttatatagggaacaggtttctctcagtggcacattttgctttttctgagccccaaatacattgcctgggcatgaacattgttaccgtaaattgcacatggtcatggactgaattatgtgactttaaaggatgtaactgcccaacatttgcagattctgggtggtctatgtgaccatttgtctcgtatccaaaaaccccggggctattggaacccttccaacactttttcctttgtcatagacaagtttatatataacttaccaagatgttggctgtcctggtgtattgccagacagctctcttttggttcccattccaaatgtgctgctgtccttctttgcatttcacaatatcaaagaaaccaccacccttcttcctaacagcattttatgccttttattccacattaaatgggaattgtgcctacttaggagtgcccctccaattaattacatgtgtccaagaataatccaagctagagacacaaggtgggaaaacatttcaaaaaaaaaaagtcctcttaaggccagtaatttatctgaaaaggtattttatcacaccttgacaccttatatatgagcctattaggagctgcaggtggtttcatagggtaaaatccaagaaaagagaaggatgtgtggggtttctattagaagataattttgttctcattttaccttttcttttatgatccttctctgctagaacaggttaattctccaaatttgttttgtttgttttgttattttttagggaactcttttgcaaaagcaatggtcggatgtaaataacatttaaagtatagtgcacataacttccccggactgttccaatctgataatttgtaaatgctttagagtttttttaattaacacttgtgttgctaaattctatttatgtaagtctgctaaagttttttagcccacttaaaacttaagacaaccatttaaaataatggatgggttactatgagcaatttcgctttcagaacccccttgttttagtatatgaaaaagcctaatgcgcattaatgaggttgaagagactatgagaaatatgtatagtgtatattttaaaacagctttgcttgtattgtgaagatttaaaaacaaacttgagatttttaacgtaactattaacacagttttaacataagttatcccactgggtttaagagcatcttgaatgtataatcctttttgtaacccaggttggtttctacttttaccagtcacccaaacatatttatgtttttagttttatgtactcatttccctttgttttcctcaaacagcatgatttttttgcacatgtagaaattttttaaaagaaagaaattagtacatcattttctctggattttcttcacttccctcttcctttctactaactccttccttaaaggccatatcactccatttgcattatttgtgcaaatgccagggttggtttttatttttatttttgctatttacctaaaaaaagaaaatgcttcagtcaattgcttttttatttaaaaaaaaaaagaaaaaaagctgtaaccttatcatttctgagtagaccattgagcgatgaatgcacacctgtagtagcccaggaccagctgtggtggctaaagggaatatgttaattaagcaagaggttcttttctaaaagtggtatctgttatccacaatgtattttagttattcccacaagtcaggggtccagataaaatgagggttatcagctaactgatatgctatcattgaggttcatcaatgaatttgtacatttctagttccctttggtgaagggaaaaatgatgattttgcaagacctagattttggcttggtttcttgcctccttttttggcagccttcatcttctcatctcccaaaccccctgagcccgtagggttttcatagtggacaaagaacttgtggtcttttaaaactgggactgatacttttttgagagagtatcgtgtcgaaagtgtgatgttctaccactttaccaataactaattttaaatacacattgtcctctcgatttttggaccaaacagacgctcacagtggaggcttatcaagggttgcattggggaagaagcctctccctctctgtcagcaccagctggtaaaggtgactgtacagatgtgcattttccttttggtataaatggtccacagcactaactggtaaggcttattgtacagtatattgtcagtattcttctggttcagcataccttatagttcatatataacctgtattaattgtatagattgtgcattaaaagctgttaccaagttgtcagaacataagagcgaaaacaaggtcatatgtaatattttgtttgtaagtatcctttgtatcatagcaaaggaaatgtttaaaaaaaaaaaaaaaaaaaaaaaaaaaaaatctttgtggggcaggcttagggccttgagaaaaggttttttagagaccatttgcgtgttgggggcgcggggggccaagtgtggtgtaaggtggacatgtggggccaatagcggtgtttcccagaaggaagaaccgcggggcacagtgaccagagaggccgggggattctctcaccccatataaaaaaacggcccgggggggaaaacaccgagaggaggttctgtgaaacaaatattccagaagtgggaagttctagggaagggacaaatagagagggaaactcatattcaacacggggggagttcaaagaggagaagctccaaaatttcaaatttagccaggatagtggggtgtgaagc

SEQ ID NO: 453916 - DNA, 1206 bp, Homo sapiens
gcggacgcgcgacagaagatactgacaatatacgtacaataagccttacagttagtgctgggaccatttataccaaaaggaaaatgcttattgtacagtatattgtcagtattcttctggttcagcataccttatagttcatatataacctgtattaattgtatagattgtgcattaaaagctgttaccaagttgtcagaacataagagcgaaaacaaggtcatatgtaatattttgtttgtaagtatcctttgtatcatagcaaaggaaatgtttaaaaaaatcaactgtaataaagtaattttagtacaaaaaaaaaaaaaaaaaaaaaaaaaaaaaaaaaaaaaaaaaaaaaaaaaaaaaaaaaaaaaaaaaaaaaaagaagaaaagaaagggtggtaaggggcgatccgatggaataatcatgtagaggatagtaagtcacatggaaggatcactaataaaaagcaaccatctaacttgaataaaccgtcgccaacgtcgctggagcctatagaagactaagaaacaatgtagacaacgggagtggtggcgaaaatttctggaacaccacaacaccagaaagatttaaccgcctagctaagtaaagatattaaaatatcaacacggaaatttaaaattagcaaaacaatacaccatatatagatagaagagaatgaagaaaaaaaatgaatagccaaacaaaacaactccgaacaacaagtaaacaacaaggaccatcgaccagacaaaacacgaaacaacgaagaacacaacaacaacacaacagcgtaacaaaatcacacaacagaacacgcaaaaacacaacacacgccaccagaccaaacatgcaaaaacagcaagaagaacgaacaagcaaaaaaaaaagcaagaacacaagagcacaacacagcacaccacaaacacaacacagaccacacaacacgagaacaacaaccacacaggcagaaaacaacaaaacaagaaagccacacagccccacaacaccaagaagaacaacaaacgacgaagacaacacacacaccacaccacagaccacacaagagcaccagggccaagcacgagaggaacgaaccaagcacacccactacaaccaacacaaccagagagcaaacagacacaaacacagaacaagaccagcagcagcgacacaaagagcacgaagcaaacaaaaacacccacgag

SEQ ID NO: 453917 - DNA, 1545 bp, Homo sapiens
tgataatcaggctcttgatctgcttccctaaattacttttttagagcccaaaccccaggtttagggtgagggtttgtaatacaaagaaacacttccatcacttctgcccttaacccttgcctctattacctaagcttagtaagtagttttcttaatattgtccaatgtttggtgttatctgcattgttttttgtttttttaattgtggttgttctgacgtgtgaaatttaaggaaagagccattttttaaaaatgccgagcagggcaatgcaagtacagccaaatattagacttgatgtgcaatcttcggtcctttttaatctggggtattataggcagtactttaaattgcaaagtcttccgggcctattttcctctacatttttgtaattaactctgggggcttacttgttttggcagtactgaaatcaaaggagctggttcttcttttctcccaattattttcatatgaaagcacctacaattagcctgttagtcctattcagatacatcaaatatcagtgaatgctttactattcgcacatttaagcatctttgttttacataaaattagagtatgaaaaccagtgttcaattttttatcttgttgagcttgtaaaatgccagcaatttaaaactaggacttttccccccataagccaaggaggtagaattactaatacaagggttaaagaaggtagattttgttttcaatatttgggtaatattagaaagattcttcccacagggaagaactagcaagtgtcccaattttttccaaacgttggggaggggaaaattcactgtatcatgaaaccctaagggtttgttgcacttcctgctttttaggcctggataacagtatcaccatccttatttacagaagggtaaaactgactcttaatgagaaaagctttataagttcaagggctgtaaaatatgaactacttagggtcgtttgccttccatgggaacttggctagacttagaaaaagctgtttgttgtgctaatgtaaaagtgtcatacaatttagaagatttttgaagatggtaaacttagaagaattctatgttctgaaatgcacacttttagaatgtttttctttgaaaacaggctaatagttttttctttttttgacaaagtttcagctcctctttaaagttattgtgtcatttttctggtttaaatttcccttatatttccacctgtaatgtcagtggcaacaacatcatacttcacttacttgttaatttactttttacccttattctaagagcaagttgagttgaactgaatcttccttgtcttagtaacaatgtataaatagtggcttttctgtacaaaaggttgtaatgcctcctgatggatataattttgtgattgtatttaaaagttgaataaatcacaccagcttcctgaaaatgttcataatgcatcttttggaaaacaaatacatgcctactttgtgcatatttgcattaacatggcaaagattgtatgaaatacctgtttttcagaaaataaaggttcagtctcaaaagata

SEQ ID NO: 453918 - DNA, 1492 bp, Homo sapiens
tgataatcaggctcttgatctgcttccctaaattacttttttagagcccaaaccccaggtttagggtgagggtttgtaatacaaagaaacacttccatcacttctgcccttaacccttgcctctattacctaagcttagtaagtagttttcttaatattgtccaatgtttggtgttatctgcattgttttttgtttttttaattgtggttgttctgacgtgtgaaatttaaggaaagagccattttttaaaaatgccgagcagggcaatgcaagtacagccaaatattagacttgatgtgcaatcttcggtcctttttaatctggggtattataggcagtactttaaattgcaaagtcttccgggcctattttcctctacatttttgtaattaactctgggggcttacttgttttggcagtactgaaatcaaaggagctggttcttcttttctcccaattattttcatatgaaagcacctacaattagcctgttagtcctattcagatacatcaaatatcagtgaatgctttactattcgcacatttaagcatctttgttttacataaaattagagtatgaaaaccagtgttcaattttttatcttgttgagcttgtaaaatgccagcaatttggttaaagaaggtagattttgttttcaatatttgggtaatattagaaagattcttcccacagggaagaactagcaagtgtcccaattttttccaaacgttggggaggggaaaattcactgtatcatgaaaccctaagggtttgttgcacttcctgctttttaggcctggataacagtatcaccatccttatttacagaagggtaaaactgactcttaatgagaaaagctttataagttcaagggctgtaaaatatgaactacttagggtcgtttgccttccatgggaacttggctagacttagaaaaagctgtttgttgtgctaatgtaaaagtgtcatacaatttagaagatttttgaagatggtaaacttagaagaattctatgttctgaaatgcacacttttagaatgtttttctttgaaaacaggctaatagttttttctttttttgacaaagtttcagctcctctttaaagttattgtgtcatttttctggtttaaatttcccttatatttccacctgtaatgtcagtggcaacaacatcatacttcacttacttgttaatttactttttacccttattctaagagcaagttgagttgaactgaatcttccttgtcttagtaacaatgtataaatagtggcttttctgtacaaaaggttgtaatgcctcctgatggatataattttgtgattgtatttaaaagttgaataaatcacaccagcttcctgaaaatgttcataatgcatcttttggaaaacaaatacatgcctactttgtgcatatttgcattaacatggcaaagattgtatgaaatacctgtttttcagaaaataaaggttcagtctcaaaagata

SEQ ID NO: 453919 - DNA, 1609 bp, Homo sapiens
tgataatcaggctcttgatctgcttccctaaattacttttttagagcccaaaccccaggtttagggtgagggtttgtaatacaaagaaacacttccatcacttctgcccttaacccttgcctctattacctaagcttagtaagtagttttcttaatattgtccaatgtttggtgttatctgcattgttttttgtttttttaattgtggttgttctgacgtgtgaaatttaaggaaagagccattttttaaaaatgccgagcagggcaatgcaagtacagccaaatattagacttgatgtgcaatcttcggtcctttttaatctggggtattataggcagtactttaaattgcaaagtcttccgggcctattttcctctacatttttgtaattaactctgggggcttacttgttttggcagtactgaaatcaaaggagctggttcttcttttctcccaattattttcatatgaaagcacctacaattagcctgttagtcctattcagatacatcaaatatcagtgaatgctttactattcgcacatttaagcatctttgttttacataaaattagagtatgaaaaccagtgttcaattttttatcttgttgagcttgtaaaatgccagcaatttaaaactaggacttttccccccataagccaaggaggtagaattactaatacaagggttaaagaaggtagattttgttttcaatatttgggtaatattagaaagattcttcccacagggaagaactagcaagtgtcccaattttttccaaacgttggggaggggaaaattcactgtatcatgaaaccctaagggtttgttgcacttcctgctttttaggcctggataacagtatcaccatccttatttacagaagggtaaaactgactcttaatgagaaaagctttataagttcaagggctgtaaaatatgaactacttagggtcgtttgccttccatgggaacttggctagacttagaaaaagctgtttgttgtgctaatgtaaaagtgtcatacaatttagaagatttttgaagatggtaaacttagaagaattctatgttctgaaatgcacacttttagaatgtttttctttgaaaacaggctaatagttttttctttttttgacaaagtttcagctcctctttaaagttattgtgtcatttttctggtttaaatttcccttatatttccacctgtaatgtcagtggcaacaacatcatacttcacttacttgttaatttactttttacccttattctaagagcaagttgagttgaactgaatcttccttgtcttagtaacaatgtataaatagtggcttttctgtacaaaaggttgtaatgcctcctgatggatataattttgtgattgtatttaaaagttgaataaatcacaccagcttcctgaaaatgttcataatgcatcttttggaaaacaaatacatgcctactttgtgcatatttgcattaacatggcaaagattgtatgaaatacctgtttttcagaaaataaaggttcagtctcaaaagatacagcatttaagttctgaatttattggtcaaaatagattttggaaaacttgaaaccttttggaac

SEQ ID NO: 453920 - DNA, 1516 bp, Homo sapiens
tgataatcaggctcttgatctgcttccctaaattacttttttagagcccaaaccccaggtttagggtgagggtttgtaatacaaagaaacacttccatcacttctgcccttaacccttgcctctattacctaagcttagtaagtagttttcttaatattgtccaatgtttggtgttatctgcattgttttttgtttttttaattgtggttgttctgacgtgtgaaatttaaggaaagagccattttttaaaaatgccgagcagggcaatgcaagtacagccaaatattagacttgatgtgcaatcttcggtcctttttaatctggggtattataggcagtactttaaattgcaaagtcttccgggcctattttcctctacatttttgtaattaactctgggggcttacttgttttggcagtactgaaatcaaaggagctggttcttcttttctcccaattattttcatatgaaagcacctacaattagcctgttagtcctattcagatacatcaaatatcagtgaatgctttactattcgcacatttaagcatctttgttttacataaaattagagtatgaaaaccagtgttcaattttttatcttgttgagcttgtaaaatgccagcaatttaaaactaggacttttccccccataagccaaggaggtagaattactaatacaagggttaaagaaggtagattttgttttcaatatttgggtaatattagaaagattcttcccacagggaagaactagcaagtgtcccaattttttccaaacgttggggaggggaaaattcactgtatcatgaaaccctaagggtttgttgcacttcctgctttttaggcctggataacagtatcaccatccttatttacagaagggtaaaactgactcttaatgagaaaagctttataagttcaagggctgtaaaatatgaactacttagggtcgtttgccttccatgggaacttggctagacttagaaaaagctgtttgttgtgctaatgtaaaagtgtcatacaatttagaagatttttgaagatggtaaacttagaagaattctatgttctgaaatgcacacttttagaatgtttttctttgaaaacaggctaatagttttttctttttttgacaaagtttcagctcctctttaaagttattgtgtcatttttctggtttaaatttcccttatatttccacctgtaatgtcagtggcaacaacatcatacttcacttacttgttaatttactttttacccttattctaagagcaagttgagttgaactgaatcttccttgtcttagtaacaatgtataaatagtggcttttctgtacaaaaggttgtaatgcctcctgatggatataattttgtgattgtatttaaaagttgaataaatcacaccagcttcctgaaaatgttcataatgcatcttttggaaaacaaatacatgcctactattgtatgaaatacctgtttttcagaaaataaaggttcagtctcaaaagata

SEQ ID NO: 453921 - DNA, 3537 bp, Homo sapiens
tcaattttcctttttccggaggggagatggattccctggaatggaactgggctctggtgtatgagctcagtggagagcaccatgacgaagagtggtcagtgaagacttaccaggaagtagctcagaagtttgtggaaactcaccctgagtttattggaatcaaaatcatttattcggatcacagatccaaagatgtggctgtcatcgcagaatccatccgaatggccatggggctccgaatcaagttccccacggtggtggcagggtttgacctggtggggcatgaggacactggccactccttgcgtgactacaaggaagctctgatgatccccgccaaggatggcgttaagctgccttacttcttccacgccggagaaacagactggcagggtacttccatagacaggaacattctggatgctctgatgctgaacactaccagaatcggccatggatttgctttgagcaaacaccccgcagtcaggacttactcctggaaaaaggacatccccatagaagtctgtcccatctctaaccaggtgctgaaactggtgtctgacttgaggaaccaccctgtagccactctgatggccactgggcaccccatggtgatcagctctgatgacccagctatgtttggtgccaaaggcttgtcctatgatttctatgaggtcttcatgggcattggggggatgaaggctgacctgaggaccctcaaacagctggccatgaactctatcaagtacagtaccctgttggagagtgagaaaaatactttcatggaaatctggaagaagagatgggataagttcatagcagatgtggctacaaagtgaggagaagctagccagccctctacaagctgtcttcttgcacacgctgtcacttcctctcactcgttcttgaatcagctccatgtgcccatgaaatcaatggcctctgtatggagcgaccctgtgagaagcacttggctggctgagcaaattcatcctctggaaatattctctctcagccacagtgacattgaccctcttggttttctcctctctctggccatttcttccagtttccctatttcagagtcttctcctctctctgatctctgtgctgtttcctcaggactcagtcctgggctctcttctattctggtctctttatttttttatttttgtattttttcgagatggagttttgctcttgttgcccaggctggagtacaatggtgcgatctcagctcagtgcaacctccgccacccgggttcaggcaattctcttgcatcagcctcccgagtagttggaattataggcatgtgccaccacacccagctgatttttgcatttttagtagagacaggttttcaccatgttggcgaggctggtatccaactcttgacctcaggtgatccactcgccccttggctcccaaagtgctggaattacaggcattagccaccatgcctggcctattctggtctctttaactctctcctctttatttctcttctctctctgtacacttttcctgggtggtctcatccattcctttgctttttcataccatttatttgttaatgattcccacatttatttatgcacttggagagctcacaggaatctcagaaactgatgaggtacaattctgaaccctcagtctcttccctttaaacctttctttttctctactttaatttttctaaagagtgtcttgctatgttgcccaggctggtctccaactcaagtgatcctcctgccgcagtctcccgaagtgctgggattactgacatgagccaccacactcagccctttaaacctttccctggcctttcccatagctggtgaaggacacctccatccattccacgcagttgctcaaagcagaaattttcagtgcaagtcttgatgctgcgccgtcccccactccctacatcagaacgcatccctcatctggactccagcggtggcttcttgatgctgcgcggtcccccactccctacatcagaatgcatcccgcatccagactccagcggtggtgctctacctgcacgctgttgccaagtccaagctaccatactcctgcctgagctatgacaacagcctcctcactgatctcccctttcttccctttgcctcctccagctcatttttcacagtgtagaatgacattttgtttgtttgttttgttttgtttgagatggagtctcgctctgttgcccagggtggagtgcagcggtgcgatctcggctcactgcaacctccacctcccgggttcaagcggattctcgtgcctcagcctcctgagtagctgggattacaggcatgcaccaccatgcccggataatttttgtatttttagtagagatggggtttcactatgttggccaggctggtctcgaacacctgacctcgtggtccacccgcctcggcctcccaaagcactgggattacaggcgtgagccacccggcctggcctagaatgacttttaaaagatcaaattaaatcaggtcactcctttgcttacaacgcagtgcgtttagaggtacaccccatgtctccacagggcatacagcatccgatttaatctggatccattccggcgccttcctctcccagtcacccagagggccccaaccccggcggccctttcttcctcaaatgtcctcggctctataccgtgcctgggtcttttctctttctctctgcctggaacattccttctttccccttttgtcttgcccactcctgtttacccttcaagtttcaagttcatgtcactgtctcagagaggttttcctgtgctcgccctgtttctctcaggaagccttgctcttttccatcatgcctctaatcacagcttataatcggatatttatttctgtgtctacagtcttgccctgccagactgtatgccccatgtgggcaggcgctcatgattgtttctgattgtttcacgcatgctgctaacccagagcctgggcccaaagctagttagtactcaataaacaatgcattgaaaaaaaagctgtcactgtgtctgttcagccagctgccaaggcagaggggagtagagcagagccgccccaaataaaagacctcatgtgatcagagtccagctcctcacctggccttggaagaaggatgcaagaagccacctctgtcctcacccaactcaaggatggcagggaatcaaagaattcctcaaaagccccaggcgaatgtcctctcatccatcttccatgacctgtacctgagctctcagacagcagcaagccctctctccattcctagtttatcaccatttggttcctggaactgggaaaaaacagcaaccataagctgtgcctggatggaagaagacaacctctagggtcctgtctaactctgcaggtgattcagtgccttacccaatccctgaagatcttttaggtcccaactgcgcaggggacctccaacacaggcagacgcaaacagcctctggcctggacttgctgtgatctctgatttggcaaaatgaaccagcaatagtcttgcctttg

SEQ ID NO: 453922 - DNA, 938 bp, Homo sapiens
cgccttcctgggggaggggggggggggggggggggggcgggggggtgggggcctcaaatgtcctcggctctataccgtgcctgggtcttttctctttctctctgcctggaacattccttctttccccttttgtcttgcccactcctgtttacccttcaagtttcaagttcatgtcactgtctcagagaggttttcctgtgctcgccctgtttctctcaggaagccttgctcttttccatcatgcctctaatcacagcttataatcggatatttatttctgtgtctacagtcttgccctgccagactgtatgccccatgtgggcaggcgctcatgattgtttctgattgtttcacgcatgctgctaacccagagcctgggcccaaagctagttagtactcaataaacaatgcattgaaaaaaaagctgtcactgtgtctgttcagccagctgccaaggcagaggggagtagagcagagccgccccaaataaaagacctcatgtgatcagagtccagctcctcacctggccttggaagaaggatgcaagaagccacctctgtcctcacccaactcaaggatggcagggaatcaaagaattcctcaaaagccccaggcgaatgtcctctcatccatcttccatgacctgtacctgagctctcagacagcagcaagccctctctccattcctagtttatcaccatttggttcctggaactgggaaaaaacagcaaccataagctgtgcctggatggaagaagacaacctctagggtcctgtctaactctgcaggtgattcagtgccttacccaatccctgaagatcttttaggtcccaactgcgcaggggacctccaacacaggcagacgcaaacagcctctggcctggacttgctgtgatctctgatttggcaaaatgaaccagcaatagtcttgcctttg

SEQ ID NO: 453923 - DNA, 3519 bp, Homo sapiens
cagagacaatgcccaaggccgtagaggacctgaacaaggtgtatgagctcagtggagagcaccatgacgaagagtggtcagtgaagacttaccaggaagtagctcagaagtttgtggaaactcaccctgagtttattggaatcaaaatcatttattcggatcacagatccaaagatgtggctgtcatcgcagaatccatccgaatggccatggggctccgaatcaagttccccacggtggtggcagggtttgacctggtggggcatgaggacactggccactccttgcgtgactacaaggaagctctgatgatccccgccaaggatggcgttaagctgccttacttcttccacgccggagaaacagactggcagggtacttccatagacaggaacattctggatgctctgatgctgaacactaccagaatcggccatggatttgctttgagcaaacaccccgcagtcaggacttactcctggaaaaaggacatccccatagaagtctgtcccatctctaaccaggtgctgaaactggtgtctgacttgaggaaccaccctgtagccactctgatggccactgggcaccccatggtgatcagctctgatgacccagctatgtttggtgccaaaggcttgtcctatgatttctatgaggtcttcatgggcattggggggatgaaggctgacctgaggaccctcaaacagctggccatgaactctatcaagtacagtaccctgttggagagtgagaaaaatactttcatggaaatctggaagaagagatgggataagttcatagcagatgtggctacaaagtgaggagaagctagccagccctctacaagctgtcttcttgcacacgctgtcacttcctctcactcgttcttgaatcagctccatgtgcccatgaaatcaatggcctctgtatggagcgaccctgtgagaagcacttggctggctgagcaaattcatcctctggaaatattctctctcagccacagtgacattgaccctcttggttttctcctctctctggccatttcttccagtttccctatttcagagtcttctcctctctctgatctctgtgctgtttcctcaggactcagtcctgggctctcttctattctggtctctttatttttttatttttgtattttttcgagatggagttttgctcttgttgcccaggctggagtacaatggtgcgatctcagctcagtgcaacctccgccacccgggttcaggcaattctcttgcatcagcctcccgagtagttggaattataggcatgtgccaccacacccagctgatttttgcatttttagtagagacaggttttcaccatgttggcgaggctggtatccaactcttgacctcaggtgatccactcgccccttggctcccaaagtgctggaattacaggcattagccaccatgcctggcctattctggtctctttaactctctcctctttatttctcttctctctctgtacacttttcctgggtggtctcatccattcctttgctttttcataccatttatttgttaatgattcccacatttatttatgcacttggagagctcacaggaatctcagaaactgatgaggtacaattctgaaccctcagtctcttccctttaaacctttctttttctctactttaatttttctaaagagtgtcttgctatgttgcccaggctggtctccaactcaagtgatcctcctgccgcagtctcccgaagtgctgggattactgacatgagccaccacactcagccctttaaacctttccctggcctttcccatagctggtgaaggacacctccatccattccacgcagttgctcaaagcagaaattttcagtgcaagtcttgatgctgcgccgtcccccactccctacatcagaacgcatccctcatctggactccagcggtggcttcttgatgctgcgcggtcccccactccctacatcagaatgcatcccgcatccagactccagcggtggtgctctacctgcacgctgttgccaagtccaagctaccatactcctgcctgagctatgacaacagcctcctcactgatctcccctttcttccctttgcctcctccagctcatttttcacagtgtagaatgacattttgtttgtttgttttgttttgtttgagatggagtctcgctctgttgcccagggtggagtgcagcggtgcgatctcggctcactgcaacctccacctcccgggttcaagcggattctcgtgcctcagcctcctgagtagctgggattacaggcatgcaccaccatgcccggataatttttgtatttttagtagagatggggtttcactatgttggccaggctggtctcgaacacctgacctcgtggtccacccgcctcggcctcccaaagcactgggattacaggcgtgagccacccggcctggcctagaatgacttttaaaagatcaaattaaatcaggtcactcctttgcttacaacgcagtgcgtttagaggtacaccccatgtctccacagggcatacagcatccgatttaatctggatccattccggcgccttcctctcccagtcacccagagggccccaaccccggcggccctttcttcctcaaatgtcctcggctctataccgtgcctgggtcttttctctttctctctgcctggaacattccttctttccccttttgtcttgcccactcctgtttacccttcaagtttcaagttcatgtcactgtctcagagaggttttcctgtgctcgccctgtttctctcaggaagccttgctcttttccatcatgcctctaatcacagcttataatcggatatttatttctgtgtctacagtcttgccctgccagactgtatgccccatgtgggcaggcgctcatgattgtttctgattgtttcacgcatgctgctaacccagagcctgggcccaaagctagttagtactcaataaacaatgcattgaaaaaaaagctgtcactgtgtctgttcagccagctgccaaggcagaggggagtagagcagagccgccccaaataaaagacctcatgtgatcagagtccagctcctcacctggccttggaagaaggatgcaagaagccacctctgtcctcacccaactcaaggatggcagggaatcaaagaattcctcaaaagccccaggcgaatgtcctctcatccatcttccatgacctgtacctgagctctcagacagcagcaagccctctctccattcctagtttatcaccatttggttcctggaactgggaaaaaacagcaaccataagctgtgcctggatggaagaagacaacctctagggtcctgtctaactctgcaggtgattcagtgccttacccaatccctgaagatcttttaggtcccaactgcgcaggggacctccaacacaggcagacgcaaacagcctctggcctggacttgctgtgatctctgatttggcaaaatgaaccagcaatagtcttgcctttg

SEQ ID NO: 453924 - DNA, 2008 bp, Homo sapiens
aaaaataaggatattggccgggtgtggtggctcactttaatttatatatttaatagtactgtcaagatgttatcactcgctaggtgaccgcagacagtcttgtggcctcccttctcccctgccatccccatcacacctttcttttttttttttttttttttttttttgagatgggtgtcttgctatgttgcccaggctggtctccaactcaagtgatcctcctgccgcagtctcccgaagtgctgggattactgacatgagccaccacactcagccctttaaacctttccctggcctttcccatagctggtgaaggacacctccatccattccacgcagttgctcaaagcagaaattttcagtgcaagtcttgatgctgcgccgtcccccactccctacatcagaacgcatccctcatctggactccagcggtggcttcttgatgctgcgcggtcccccactccctacatcagaatgcatcccgcatccagactccagcggtggtgctctacctgcacgctgttgccaagtccaagctaccatactcctgcctgagctatgacaacagcctcctcactgatctcccctttcttccctttgcctcctccagctcatttttcacagtgtagaatgacattttgtttgtttgttttgttttgtttgagatggagtctcgctctgttgcccagggtggagtgcagcggtgcgatctcggctcactgcaacctccacctcccgggttcaagcggattctcgtgcctcagcctcctgagtagctgggattacaggcatgcaccaccatgcccggataatttttgtatttttagtagagatggggtttcactatgttggccaggctggtctcgaacacctgacctcgtggtccacccgcctcggcctcccaaagcactgggattacaggcgtgagccacccggcctggcctagaatgacttttaaaagatcaaattaaatcaggtcactcctttgcttacaacgcagtgcgtttagaggtacaccccatgtctccacagggcatacagcatccgatttaatctggatccattccggcgccttcctctcccagtcacccagagggccccaaccccggcggccctttcttcctcaaatgtcctcggctctataccgtgcctgggtcttttctctttctctctgcctggaacattccttctttccccttttgtcttgcccactcctgtttacccttcaagtttcaagttcatgtcactgtctcagagaggttttcctgtgctcgccctgtttctctcaggaagccttgctcttttccatcatgcctctaatcacagcttataatcggatatttatttctgtgtctacagtcttgccctgccagactgtatgccccatgtgggcaggcgctcatgattgtttctgattgtttcacgcatgctgctaacccagagcctgggcccaaagctagttagtactcaataaacaatgcattgaaaaaaaagctgtcactgtgtctgttcagccagctgccaaggcagaggggagtagagcagagccgccccaaataaaagacctcatgtgatcagagtccagctcctcacctggccttggaagaaggatgcaagaagccacctctgtcctcacccaactcaaggatggcagggaatcaaagaattcctcaaaagccccaggcgaatgtcctctcatccatcttccatgacctgtacctgagctctcagacagcagcaagccctctctccattcctagtttatcaccatttggttcctggaactgggaaaaaacagcaaccataagctgtgcctggatggaagaagacaacctctagggtcctgtctaactctgcaggtgattcagtgccttacccaatccctgaagatcttttaggtcccaactgcgcaggggacctccaacacaggcagacgcaaacagcctctggcctggacttgctgtgatctctgatttggcaaaatgaaccagcaatagtcttgcctttg

SEQ ID NO: 453925 - DNA, 1382 bp, Homo sapiens
gagtttctggagctgttccgagtcccgtggagtctccatctgagccctttcctagtccaggcatcccgatgttggtggatggcccatctgagcggccagccctgtgcttcttgctgttggctgtggcaatgtctttcttcggctcagctctatccatagatgaaacacgggcgcatctgttgttgaaagaaaagatgatgcggctcggggggcggctggtgctgaacaccaaggaggagctggccaatgagaggctcatgacgctcaaaatcgctgagatgaaggaggccatgaggaccctgatattcccacccagcatgcactttttccaggccaagcatctcattgagagaagtcaagtgtttaatattctaaggatgatgccaaaaggggctgccttgcacctccatgacattggcatcgtgactatggactggctggtgaggaatgtcacctacaggcctcactgccacatctgtttcaccccaagggggatcatgcagttcagatttgctcacccaactccccgtccatcagaaaaatgttccaagtggattctgctggaggattatcggaagcgggtgcagaacgtcactgagtttgatgacagcttgctgaggaatttcactctggtgacccagcacccggaggtgatttacacaaaccaaaatgttgtctggtcgaaatttgaaaccatcttcttcaccatctctggtctcatccattacgcaccagtgttcagagactatgtcttccggagcatgcaggagttctacgaggacaacgtgctctacatggagatcagagccaggctgctgccggtgtatgagctcagtggagagcaccatgacgaagagtggtcagtgaagacttaccaggaagtagctcagaagtttgtggaaactcaccctgagtttattggaatcaaaatcatttattcggatcacagatccaaagatgtggctgtcatcgcagaatccatccgaatggccatggggctccgaatcaagttccccacggtggtggcagggtttgacctggtggggcatgaggacactggccactccttgcgtgactacaaggaagctctgatgatccccgccaaggatggcgttaagctgccttacttcttccacgccggagaaacagactggcagggtacttccatagacaggaacattctggatgctctgatgctgaacactaccagaatcggccatggatttgctttgagcaaacaccccgcagtcaggacttactcctggaaaaaggacatccccatagaagtctgtcccatctctaaccaggtgctgaaactggtgtctgacttgattcggccccatgccattcggatggattctgcgatgacagtcaccgggcac

SEQ ID NO: 453926 - DNA, 3923 bp, Homo sapiens
ttgggaaacccctacctgtctgtacctgtaggtcttttctctggggtctggaagaagaatccttcaatatcttgccttctggtaatctgagagcagggcgagaaaaggaagatcagagttccacccttaaatctgtaggttttcactcccccactctcctttgcagtcccgtggagtctccatctgagccctttcctagtccaggcatcccgatgttggtggatggcccatctgagcggccagccctgtgcttcttgctgttggctgtggcaatgtctttcttcggctcagctctatccatagatgaaacacgggcgcatctgttgttgaaagaaaagatgatgcggctcggggggcggctggtgctgaacaccaaggaggagctggccaatgagaggctcatgacgctcaaaatcgctgagatgaaggaggccatgaggaccctgatattcccacccagcatgcactttttccaggccaagcatctcattgagagaagtcaagtgtttaatattctaaggatgatgccaaaaggggctgccttgcacctccatgacattggcatcgtgactatggactggctggtgaggaatgtcacctacaggcctcactgccacatctgtttcaccccaagggggatcatgcagttcagatttgctcacccaactccccgtccatcagaaaaatgttccaagtggattctgctggaggattatcggaagcgggtgcagaacgtcactgagtttgatgacagcttgctgaggaatttcactctggtgacccagcacccggaggtgatttacacaaaccaaaatgttgtctggtcgaaatttgaaaccatcttcttcaccatctctggtctcatccattacgcaccagtgttcagagactatgtcttccggagcatgcaggagttctacgaggacaacgtgctctacatggagatcagagccaggctgctgccggtgtatgagctcagtggagagcaccatgacgaagagtggtcagtgaagacttaccaggaagtagctcagaagtttgtggaaactcaccctgagtttattggaatcaaaatcatttattcggatcacagatccaaagatgtggctgtcatcgcagaatccatccgaatggccatggggctccgaatcaagttccccacggtggtggcagggtttgacctggtggggcatgaggacactggccactccttgcgtgactacaaggaagctctgatgatccccgccaaggatggcgttaagctgccttacttcttccacgccggagaaacagactggcagggtacttccatagacaggaacattctggatgctctgatgctgaacactaccagaatcggccatggatttgctttgagcaaacaccccgcagtcaggacttactcctggaaaaaggacatccccatagaagtctgtcccatctctaaccaggtgctgaaactggtgtctgacttgaggaaccaccctgtagccactctgatggccactgggcaccccatggtgatcagctctgatgacccagctatgtttggtgccaaaggcttgtcctatgatttctatgaggtcttcatgggcattggggggatgaaggctgacctgaggaccctcaaacagctggccatgaactctatcaagtacagtaccctgttggagagtgagaaaaatactttcatggaaatctggaagaagagatgggataagttcatagcagatgtggctacaaagtgaggagaagctagccagccctctacaagctgtcttcttgcacacgctgtcacttcctctcactcgttcttgaatcagctccatgtgcccatgaaatcaatggcctctgtatggagcgaccctgtgagaagcacttggctggctgagcaaattcatcctctggaaatattctctctcagccacagtgacattgaccctcttggttttctcctctctctggccatttcttccagtttccctatttcagagtcttctcctctctctgatctctgtgctgtttcctcaggactcagtcctgggctctcttctattctggtctctttatttttttatttttgtattttttcgagatggagttttgctcttgttgcccaggctggagtacaatggtgcgatctcagctcagtgcaacctccgccacccgggttcaggcaattctcttgcatcagcctcccgagtagttggaattataggcatgtgccaccacacccagctgatttttgcatttttagtagagacaggttttcaccatgttggcgaggctggtatccaactcttgacctcaggtgatccactcgccccttggctcccaaagtgctggaattacaggcattagccaccatgcctggcctattctggtctctttaactctctcctctttatttctcttctctctctgtacacttttcctgggtggtctcatccattcctttgctttttcataccatttatttgttaatgattcccacatttatttatgcacttggagagctcacaggaatctcagaaactgatgaggtacaattctgaaccctcagtctcttccctttaaacctttctttttctctactttaatttttctaaagagtgtcttgctatgttgcccaggctggtctccaactcaagtgatcctcctgccgcagtctcccgaagtgctgggattactgacatgagccaccacactcagccctttaaacctttccctggcctttcccatagctggtgaaggacacctccatccattccacgcagttgctcaaagcagaaattttcagtgcaagtcttgatgctgcgccgtcccccactccctacatcagaacgcatccctcatctggactccagcggtggcttcttgatgctgcgcggtcccccactccctacatcagaatgcatcccgcatccagactccagcggtggtgctctacctgcacgctgttgccaagtccaagctaccatactcctgcctgagctatgacaacagcctcctcactgatctcccctttcttccctttgcctcctccagctcatttttcacagtgtagaatgacattttgtttgtttgttttgttttgtttgagatggagtctcgctctgttgcccagggtggagtgcagcggtgcgatctcggctcactgcaacctccacctcccgggttcaagcggattctcgtgcctcagcctcctgagtagctgggattacaggcatgcaccaccatgcccggataatttttgtatttttagtagagatggggtttcactatgttggccaggctggtctcgaacacctgacctcgtggtccacccgcctcggcctcccaaagcactgggattacaggcgtgagccacccggcctggcctagaatgacttttaaaagatcaaattaaatcaggtcactcctttgcttacaacgcagtgcgtttagaggtacaccccatgtctccacagggcatacagcatccgatttaatctggatccattccggcgccttcctctcccagtcacccagagggccccaaccccggcggccctttcttcctcaaatgtcctcggctctataccgtgcctgggtcttttctctttctctctgcctggaacattccttctttccccttttgtcttgcccactcctgtttacccttcaagtttcaagttcatgtcactgtctcagagaggttttcctgtgctcgccctgtttctctcaggaagccttgctcttttccatcatgcctctaatcacagcttataatcggatatttatttctgtgtctacagtcttgccctgccagactgtatgccccatgtgggcaggcgctcatgattgtttctgattgtttcacgcatgctgctaacccagagcctgggcccaaagctagttagtactcaataaacaatgcattg

SEQ ID NO: 453927 - DNA, 4302 bp, Homo sapiens
gagtttctggagctgttccgagtcccgtggagtctccatctgagccctttcctagtccaggcatcccgatgttggtggatggcccatctgagcggccagccctgtgcttcttgctgttggctgtggcaatgtctttcttcggctcagctctatccatagatgaaacacgggcgcatctgttgttgaaagaaaagatgatgcggctcggggggcggctggtgctgaacaccaaggaggagctggccaatgagaggctcatgacgctcaaaatcgctgagatgaaggaggccatgaggaccctgatattcccacccagcatgcactttttccaggccaagcatctcattgagagaagtcaagtgtttaatattctaaggatgatgccaaaaggggctgccttgcacctccatgacattggcatcgtgactatggactggctggtgaggaatgtcacctacaggcctcactgccacatctgtttcaccccaagggggatcatgcagttcagatttgctcacccaactccccgtccatcagaaaaatgttccaagtggattctgctggaggattatcggaagcgggtgcagaacgtcactgagtttgatgacagcttgctgaggaatttcactctggtgacccagcacccggaggtgatttacacaaaccaaaatgttgtctggtcgaaatttgaaaccatcttcttcaccatctctggtctcatccattacgcaccagtgttcagagactatgtcttccggagcatgcaggagttctacgaggacaacgtgctctacatggagatcagagccaggctgctgccggtgtatgagctcagtggagagcaccatgacgaagagtggtcagtgaagacttaccaggaagtagctcagaagtttgtggaaactcaccctgagtttattggaatcaaaatcatttattcggatcacagatccaaagatgtggctgtcatcgcagaatccatccgaatggccatggggctccgaatcaagttccccacggtggtggcagggtttgacctggtggggcatgaggacactggccactccttgcgtgactacaaggaagctctgatgatccccgccaaggatggcgttaagctgccttacttcttccacgccggagaaacagactggcagggtacttccatagacaggaacattctggatgctctgatgctgaacactaccagaatcggccatggatttgctttgagcaaacaccccgcagtcaggacttactcctggaaaaaggacatccccatagaagtctgtcccatctctaaccaggtgctgaaactggtgtctgacttgaggaaccaccctgtagccactctgatggccactgggcaccccatggtgatcagctctgatgacccagctatgtttggtgccaaaggcttgtcctatgatttctatgaggtcttcatgggcattggggggatgaaggctgacctgaggaccctcaaacagctggccatgaactctatcaagtacagtaccctgttggagagtgagaaaaatactttcatggaaatctggaagaagagatgggataagttcatagcagatgtggctacaaagtgaggagaagctagccagccctctacaagctgtcttcttgcacacgctgtcacttcctctcactcgttcttgaatcagctccatgtgcccatgaaatcaatggcctctgtatggagcgaccctgtgagaagcacttggctggctgagcaaattcatcctctggaaatattctctctcagccacagtgacattgaccctcttggttttctcctctctctggccatttcttccagtttccctatttcagagtcttctcctctctctgatctctgtgctgtttcctcaggactcagtcctgggctctcttctattctggtctctttatttttttatttttgtattttttcgagatggagttttgctcttgttgcccaggctggagtacaatggtgcgatctcagctcagtgcaacctccgccacccgggttcaggcaattctcttgcatcagcctcccgagtagttggaattataggcatgtgccaccacacccagctgatttttgcatttttagtagagacaggttttcaccatgttggcgaggctggtatccaactcttgacctcaggtgatccactcgccccttggctcccaaagtgctggaattacaggcattagccaccatgcctggcctattctggtctctttaactctctcctctttatttctcttctctctctgtacacttttcctgggtggtctcatccattcctttgctttttcataccatttatttgttaatgattcccacatttatttatgcacttggagagctcacaggaatctcagaaactgatgaggtacaattctgaaccctcagtctcttccctttaaacctttctttttctctactttaatttttctaaagagtgtcttgctatgttgcccaggctggtctccaactcaagtgatcctcctgccgcagtctcccgaagtgctgggattactgacatgagccaccacactcagccctttaaacctttccctggcctttcccatagctggtgaaggacacctccatccattccacgcagttgctcaaagcagaaattttcagtgcaagtcttgatgctgcgccgtcccccactccctacatcagaacgcatccctcatctggactccagcggtggcttcttgatgctgcgcggtcccccactccctacatcagaatgcatcccgcatccagactccagcggtggtgctctacctgcacgctgttgccaagtccaagctaccatactcctgcctgagctatgacaacagcctcctcactgatctcccctttcttccctttgcctcctccagctcatttttcacagtgtagaatgacattttgtttgtttgttttgttttgtttgagatggagtctcgctctgttgcccagggtggagtgcagcggtgcgatctcggctcactgcaacctccacctcccgggttcaagcggattctcgtgcctcagcctcctgagtagctgggattacaggcatgcaccaccatgcccggataatttttgtatttttagtagagatggggtttcactatgttggccaggctggtctcgaacacctgacctcgtggtccacccgcctcggcctcccaaagcactgggattacaggcgtgagccacccggcctggcctagaatgacttttaaaagatcaaattaaatcaggtcactcctttgcttacaacgcagtgcgtttagaggtacaccccatgtctccacagggcatacagcatccgatttaatctggatccattccggcgccttcctctcccagtcacccagagggccccaaccccggcggccctttcttcctcaaatgtcctcggctctataccgtgcctgggtcttttctctttctctctgcctggaacattccttctttccccttttgtcttgcccactcctgtttacccttcaagtttcaagttcatgtcactgtctcagagaggttttcctgtgctcgccctgtttctctcaggaagccttgctcttttccatcatgcctctaatcacagcttataatcggatatttatttctgtgtctacagtcttgccctgccagactgtatgccccatgtgggcaggcgctcatgattgtttctgattgtttcacgcatgctgctaacccagagcctgggcccaaagctagttagtactcaataaacaatgcattgaaaaaaaagctgtcactgtgtctgttcagccagctgccaaggcagaggggagtagagcagagccgccccaaataaaagacctcatgtgatcagagtccagctcctcacctggccttggaagaaggatgcaagaagccacctctgtcctcacccaactcaaggatggcagggaatcaaagaattcctcaaaagccccaggcgaatgtcctctcatccatcttccatgacctgtacctgagctctcagacagcagcaagccctctctccattcctagtttatcaccatttggttcctggaactgggaaaaaacagcaaccataagctgtgcctggatggaagaagacaacctctagggtcctgtctaactctgcaggtgattcagtgccttacccaatccctgaagatcttttaggtcccaactgcgcaggggacctccaacacaggcagacgcaaacagcctctggcctggacttgctgtgatctctgatttggcaaaatgaaccagcaatagtcttgcctttg

SEQ ID NO: 453928 - DNA, 1030 bp, Homo sapiens
acggaagaaaaaaatagtgagttcggggagggtacgacccctcgtctccccccccccacaccccatccgatttaatctggatccattccggcgccttcctctcccagtcacccagagggccccaaccccggcggccctttcttcctcaaatgtcctcggctctataccgtgcctgggtcttttctctttctctctgcctggaacattccttctttccccttttgtcttgcccactcctgtttacccttcaagtttcaagttcatgtcactgtctcagagaggttttcctgtgctcgccctgtttctctcaggaagccttgctcttttccatcatgcctctaatcacagcttataatcggatatttatttctgtgtctacagtcttgccctgccagactgtatgccccatgtgggcaggcgctcatgattgtttctgattgtttcacgcatgctgctaacccagagcctgggcccaaagctagttagtactcaataaacaatgcattgaaaaaaaagctgtcactgtgtctgttcagccagctgccaaggcagaggggagtagagcagagccgccccaaataaaagacctcatgtgatcagagtccagctcctcacctggccttggaagaaggatgcaagaagccacctctgtcctcacccaactcaaggatggcagggaatcaaagaattcctcaaaagccccaggcgaatgtcctctcatccatcttccatgacctgtacctgagctctcagacagcagcaagccctctctccattcctagtttatcaccatttggttcctggaactgggaaaaaacagcaaccataagctgtgcctggatggaagaagacaacctctagggtcctgtctaactctgcaggtgattcagtgccttacccaatccctgaagatcttttaggtcccaactgcgcaggggacctccaacacaggcagacgcaaacagcctctggcctggacttgctgtgatctctgatttggcaaaatgaaccagcaatagtcttgcctttg

SEQ ID NO: 453929 - DNA, 539 bp, Homo sapiens
aagaaagaaaaatgttaaataaaaatttaaaaagtaatatgttaattccaagaagtaaaccatagaaaagactggatgcatagcactggttagaaataaaaatccagtgagagtttcagaactcagccatgcccctgtgattgtgtgccagcctttggaatggaaagcccacccagtctcccagttatcatctattcgagagtggactcgaatcctggaggaggaaataaagggaaagggaagtcgtggagaggcagggaaaatggttaagcagcccggccctctggagtccccatgggggcggtagctgaagttggcgagcgcagcggtggatgcagagctggctgcacccagggctgggccagtgtgtcctgtaagacttcttgcattccttctgctgcttttttgggatgggggtatttttgttcatttgtttttgccctgttttgattttggtcccacagagcaggggatgtagtttgtacccaccatggcgcagacttccaaataaatagtactggtcatttctctctgcacta

SEQ ID NO: 453930 - DNA, 1165 bp, Homo sapiens
aggacttatactgtgttaattttctattgatgccataacaaattaccacagagttggtggcgtaaacaacacacatttattattgtatagtgctgtaggttggaggtctgacacaggactcagtgggcagaaatcaggctttcagtaggctgtgtttcctgttgtgggctctaggggagaatctattttcttgccttttccttgcttctagaagttgctcacattccttggcttcaggcccttcctccatctttaaagccagcagtggtagatggagttctcacatcttctctctctggctctcctgcctccctttttaggatccttgtgattatgttgggtccacctggaaaatctgggctcatctctctaccttgaagccagcagattagcagctttaattccatctgcagccttaattcccatttgctatatgaggtaatatattcacaggttatggggaaatgttctaagtattgagtcatcttgtttgaattttgtggggtactgaagttcaggaaaactgttctctccagaagtcaccagaggcttgctttcagtatagggaagtcttagtttttgctgcctcacagatgtaataaatattgcaaacctcactcacagagggtctacccttgggattctggagcagcacaaaacctacaaggagttgagagaaattgtgtctataggtgaagcaggttcttagcatcaggaagggaaaggaggcgaaggcgtgatgacctgacaggtgtgtggaaggagctcagcagaagcaagagggagagaagacacactgaggtgagaagtaaaaaagggtgagaatagagtggtgggcattgtggcttgagagccccaggcaccagtggaagacaccgaaaggaggactgctcatacctggggtgggctgggtgcagtaaagtcattccctgtaccgtgccttggaagctctgaggggtcgtggctcaggtattctgtctctaagcctgagctcctgtagcacatgatgacctcatacggaaggagacttttatctcagcatccctcaacctggcacagcagttattaaactttttggtcacaggacaccatgtatagtgttaaaaattattgaaactctcatacactgctggtataaaatggtgcagccactgaggaaaacagt

SEQ ID NO: 453931 - DNA, 807 bp, Homo sapiens
tgggagcggaggagagatgtgagcctcgtaccaggaagatcatactgaggccaccaggttgagagccgcctggctggggggcttgtccggggacagcaggggcagaggcatggaggttcacagccaggaaatcgtgcagtgaacctgtcccctccggtcacaacatcaagagctgaactgggactagaagtcatcgccccagagctttttgctaccagaactgccgggtgaaaatctttggaagagaagtttgagaacctgttaaacaagctctctaggtaattctgtgcacgttcagtctgagaactgctgcatctgaagaggccctccagaaaaaggaagaaaagtgggaagggtattaaaaaccagtgacatgtagcatgaaggcggatgaggcccatattgctaatgtgatgcagatgtggacgttcattgtggctttggtttttacccacaaaggctatttgaacatggaattcaatccttcagatcatcctcgggccagcacaatattcctcagtaaatctcagacagacgtgagagaaaaacgcaagagtctcttcattaaccatcatcctccaggacaaatagcaaggaaatacagttcctgctccaccattttcctagatgatagcacagtcagtcaaccaaacctcaagtatacaattaaatgctgtgtcgcctctggcaatatattatcaacatccaaaaaacagggaacccagatggacggatgctcctagatatctttggcttgaaaatcttcacccctcttttcgaaattccgaagtggccaccagattatgc

SEQ ID NO: 453932 - DNA, 333 bp, Homo sapiens
  misc_feature (31)..(31): n is a, c, g, or t
ctctcgaggatccccggcaaggatctgtggncaggagtagatgtatttttacttcctgagaagtgctttccttctgctactgtatttgcaatattacaatgttcacttttagggtatggaagatagtaacctaaatcctgttcctctcttctgttgagcactgtatacacagaagcttcccaaggaaaagctatgaactctacactttggaggaggttgaggcagtgggggtgagaggtacgagtctttcctaagctgactttactgttttttgcctgatctcctgcatacctgatgtccccatgttttcctctaagtgccccagagccctcc

SEQ ID NO: 453933 - DNA, 4078 bp, Homo sapiens
aggccccgccgccgccgccgctgctgacccggcggccggccgccgttccgccccctcccgtggcggcgagcgggcgggcctccccacacgcccccgccgcccgcgccccgcgtccacccgcgccccgctcccggggactgggagaacaggatagcagcaggagtcggggggccgccgaagatggggaacactacctcgtgctgcgtgtcgtccagtcccaagctccggaggaatgcccactcccggctggagtcctaccggccagacacggacctgagccgcgaggacacgggctgcaacctgcagcacatcagcgaccgggagaacatagacgatttgaacatggaattcaatccttcagatcatcctcgggccagcacaatattcctcagtaaatctcagacagacgtgagagaaaaacgcaagagtctcttcattaaccatcatcctccaggacaaatagcaaggaaatacagttcctgctccaccattttcctagatgatagcacagtcagtcaaccaaacctcaagtatacaattaaatgtgtcgctcttgcaatatattatcacatcaaaaacagggacccagatggaaggatgctcttagatatttttgatgaaaatcttcaccctctttcgaaatccgaagtgccaccagattatgacaaacacaacccagagcagaagcagatttaccggttcgttcggacactgttcagtgctgctcagctgacggctgaatgtgccatcgtcaccctggtgtaccttgaaagacttttaacatacgcagagatagatatctgtccggccaactggaagcggattgttttaggggcgatcctgctggcctccaaggtgtgggatgaccaggctgtatggaatgtggattactgccagatcctgaaagacatcacggtggaggacatgaacgagctagagcgacagtttcttgaattgctgcagttcaacatcaatgttccttccagtgtctatgccaagtattattttgatcttcgttctctggcagaagcgaacaacctgagctttcccttggagcccctgagcagggagagggctcacaagcttgaggccatctctcgcctctgcgaggacaagtacaaggacctaagaagatccgcgaggaagcgctcagccagtgcagacaacctgactctgccccggtggtccccagccatcatctcttaactacggaggcccgccggaggccacaccatcccttagtttctcctttagtttgagaaaagacagacttggggtgggtttgtttttgttttttctttccttttctttttttacgcatagctccgtcaagctgcctggatgagcgcccatgcagcaaggcttggaggaagcgtcagtgccctggagatcccagctcgctctccccactgtcagcaacagcacttccttcgtggaggaagtggactcgaatcctggaggaggaaataaagggaaagggaagtcgtggagaggcagggaaaatggttaagcagcccggccctctggagtccccatgggggcggtagctgaagttggcgagcgcagcggtggatgcagagctggctgcacccagggctgggccagtgtgtcctgtaagacttcttgcattccttctgctgcttttttgggatgggggtatttttgttcatttgtttttgccctgttttgattttggtcccacagagcaggggatgtagtttgtacccaccatggcgcagacttccaaataaatagtactggtcatttctctctgcactatttctgcgcgctgtcttctgagctttcttcctcaccagtgggctgtgcttgttccatttctgtacacccttattttataccgtttttcttcaacaatggcgaaattgactgtagtgctgaaccaaaagtatccctttccctccttattcctcaccccaagaacattctagatcacatgggtgcttgtgccttccgattttcttgcatttgtttttttcctgacctgaagttgttgttacaaaatcagtcagactttgtgggctgaaggacacggtgcagcagagggtgtccctgtgagagttctgcagagtgctgggcatgtgcctggaactaccgagtaggagccatttctttgtacccctgcctaatccattcctctccttccaagtccattgttgcaagcaatattcttctcaatttttatatgtttactttaaatcaaagttagtctatttgtataaaatttttaaaaaatctaaaagaaaaagaaaaaaaacaagggtgggttgggtattccagtgggaagatcattgaagggaaaaatgttactatttactgaggtatttttcacagaatgattgaattaaaaaaaactcaacttgcattttcattgtgggtgcttagagaagttctacaaaattcaaactgtgaaggtttatgcttcattaattatgaccatactttttcattttctgacgatccctgatttccttatggactcaataagaatcttttatatcaagtaaaatgaaagttgatgatagaatatcaaatagtgaatttgatatgaaatctaagagtgtgagtcacttgcatatgtaatgctttgggtttttgcatattttcttaggtcacagtgacaggtttctgagttgtttcccttttcaagtctctgggaggccagtggcagcagcaggtctgtgtttcaccttcttcccatgtgagcttggaaaactttggcatcttaattagtcttgaatcatacacctgatccccaaacattgcctgctctcaatgaaacatgctttggaaatggaagggactcagaaagtcgaaatcccaagaactccaagccaaaagtgttaggttttagtgaaatttgtgtcaggtataagcatacctgtttgggccagaattattatcacagcctttctgacccaaactttcaaaagcaaataaacagcatataaaacgttaattatctttccattgtaattgtgatgatctactctgtatgggtaccaaaatcaccttctctcttcaagtcaaagttgaatttagaactttgaatacaggtcaaaaaatgtagaaaatatcattttatattccctaatctatatagctgaaaaagggttgtattttcttagctgaatatgaatacctcttaaacataaattagttcctctccagtgaagtatcttattttaccaatccatttcaggaaagaggttctgctgccgtaaaggcagaaattttatttttatcccttttatttgaatgagagatttgaaaatcgaattatgtaaatatttcaatgcatctgctattattttgtggagtttattaaactactttaaaaaaattgtatagtctatttattgtatgtatgtacatacagtctgatacctaaaatttaaagtggattccataaaaccagactcaagtcttgtttagactactgaatactgttttagcctgtgccctggattctacctctgtataggaaaattttccatattcattaattagtgttgatctgtattaattggttatgtttcttgcactaaggatgtttaaaactccgctgtaagtgtagattttagttttactggcaggatgaatcacttgacacataggtagatacttgaggttcattttcttttctttttctacatgatgatgaatagttatgttttcttctctgatttgttcaaagtttgccaaaagaaaacacaaaaccagtacagtacttactgataaatcgtagtgactgtaatttgtttgtaaggcgaattaatgctctacaattaaagctggattactattgaggaaaaaaaaaaaaaaaaaaaaaaaaagaaaaagaaacaaaaacaacacaaaaccaaacacgacaccacgaagaagaaaaaaaaaaaaagaaaaaagaaacgaggacaacagggaagaacagaagaagaagcgatgcactcacaccacgataagaagatgaacagggcggcagcgacatgacgccggtgccgaacggcaagcaccccagcagcggccccagacgatgcaggagcacagagggcgaacatga

SEQ ID NO: 453934 - DNA, 4098 bp, Homo sapiens
tgggagcggaggagagatgtgagcctcgtaccaggaagatcatactgaggccaccaggttgagagccgcctggctggggggcttgtccggggacagcaggggcagaggcatggaggttcacagccaggaaatcgtgcagtgaacctgtcccctccggtcacaacatcaagagctgaactgggactagaagtcatcgccccagagctttttgctaccagaactgccgggtgaaaatctttggaagagaagtttgagaacctgttaaacaagctctctaggtaattctgtgcacgttcagtctgagaactgctgcatctgaagaggccctccagaaaaaggaagaaaagtgggaagatttgaacatggaattcaatccttcagatcatcctcgggccagcacaatattcctcagtaaatctcagacagacgtgagagaaaaacgcaagagtctcttcattaaccatcatcctccaggacaaatagcaaggaaatacagttcctgctccaccattttcctagatgatagcacagtcagtcaaccaaacctcaagtatacaattaaatgtgtcgctcttgcaatatattatcacatcaaaaacagggacccagatggaaggatgctcttagatatttttgatgaaaatcttcaccctctttcgaaatccgaagtgccaccagattatgacaaacacaacccagagcagaagcagatttaccggttcgttcggacactgttcagtgctgctcagctgacggctgaatgtgccatcgtcaccctggtgtaccttgaaagacttttaacatacgcagagatagatatctgtccggccaactggaagcggattgttttaggggcgatcctgctggcctccaaggtgtgggatgaccaggctgtatggaatgtggattactgccagatcctgaaagacatcacggtggaggacatgaacgagctagagcgacagtttcttgaattgctgcagttcaacatcaatgttccttccagtgtctatgccaagtattattttgatcttcgttctctggcagaagcgaacaacctgagctttcccttggagcccctgagcagggagagggctcacaagcttgaggccatctctcgcctctgcgaggacaagtacaaggacctaagaagatccgcgaggaagcgctcagccagtgcagacaacctgactctgccccggtggtccccagccatcatctcttaactacggaggcccgccggaggccacaccatcccttagtttctcctttagtttgagaaaagacagacttggggtgggtttgtttttgttttttctttccttttctttttttacgcatagctccgtcaagctgcctggatgagcgcccatgcagcaaggcttggaggaagcgtcagtgccctggagatcccagctcgctctccccactgtcagcaacagcacttccttcgtggaggaagtggactcgaatcctggaggaggaaataaagggaaagggaagtcgtggagaggcagggaaaatggttaagcagcccggccctctggagtccccatgggggcggtagctgaagttggcgagcgcagcggtggatgcagagctggctgcacccagggctgggccagtgtgtcctgtaagacttcttgcattccttctgctgcttttttgggatgggggtatttttgttcatttgtttttgccctgttttgattttggtcccacagagcaggggatgtagtttgtacccaccatggcgcagacttccaaataaatagtactggtcatttctctctgcactatttctgcgcgctgtcttctgagctttcttcctcaccagtgggctgtgcttgttccatttctgtacacccttattttataccgtttttcttcaacaatggcgaaattgactgtagtgctgaaccaaaagtatccctttccctccttattcctcaccccaagaacattctagatcacatgggtgcttgtgccttccgattttcttgcatttgtttttttcctgacctgaagttgttgttacaaaatcagtcagactttgtgggctgaaggacacggtgcagcagagggtgtccctgtgagagttctgcagagtgctgggcatgtgcctggaactaccgagtaggagccatttctttgtacccctgcctaatccattcctctccttccaagtccattgttgcaagcaatattcttctcaatttttatatgtttactttaaatcaaagttagtctatttgtataaaatttttaaaaaatctaaaagaaaaagaaaaaaaacaagggtgggttgggtattccagtgggaagatcattgaagggaaaaatgttactatttactgaggtatttttcacagaatgattgaattaaaaaaaactcaacttgcattttcattgtgggtgcttagagaagttctacaaaattcaaactgtgaaggtttatgcttcattaattatgaccatactttttcattttctgacgatccctgatttccttatggactcaataagaatcttttatatcaagtaaaatgaaagttgatgatagaatatcaaatagtgaatttgatatgaaatctaagagtgtgagtcacttgcatatgtaatgctttgggtttttgcatattttcttaggtcacagtgacaggtttctgagttgtttcccttttcaagtctctgggaggccagtggcagcagcaggtctgtgtttcaccttcttcccatgtgagcttggaaaactttggcatcttaattagtcttgaatcatacacctgatccccaaacattgcctgctctcaatgaaacatgctttggaaatggaagggactcagaaagtcgaaatcccaagaactccaagccaaaagtgttaggttttagtgaaatttgtgtcaggtataagcatacctgtttgggccagaattattatcacagcctttctgacccaaactttcaaaagcaaataaacagcatataaaacgttaattatctttccattgtaattgtgatgatctactctgtatgggtaccaaaatcaccttctctcttcaagtcaaagttgaatttagaactttgaatacaggtcaaaaaatgtagaaaatatcattttatattccctaatctatatagctgaaaaagggttgtattttcttagctgaatatgaatacctcttaaacataaattagttcctctccagtgaagtatcttattttaccaatccatttcaggaaagaggttctgctgccgtaaaggcagaaattttatttttatcccttttatttgaatgagagatttgaaaatcgaattatgtaaatatttcaatgcatctgctattattttgtggagtttattaaactactttaaaaaaattgtatagtctatttattgtatgtatgtacatacagtctgatacctaaaatttaaagtggattccataaaaccagactcaagtcttgtttagactactgaatactgttttagcctgtgccctggattctacctctgtataggaaaattttccatattcattaattagtgttgatctgtattaattggttatgtttcttgcactaaggatgtttaaaactccgctgtaagtgtagattttagttttactggcaggatgaatcacttgacacataggtagatacttgaggttcattttcttttctttttctacatgatgatgaatagttatgttttcttctctgatttgttcaaagtttgccaaaagaaaacacaaaaccagtacagtacttactgataaatcgtagtgactgtaatttgtttgtaaggcgaattaatgctctacaattaaagctggattactattgaggaaaaaaaaaaaaaaaaaaaaaaaaagaaaaagaaacaaaaacaacacaaaaccaaacacgacaccacgaagaagaaaaaaaaaaaaagaaaaaagaaacgaggacaacagggaagaacagaagaagaagcgatgcactcacaccacgataagaagatgaacagggcggcagcgacatgacgccggtgccgaacggcaagcaccccagcagcggccccagacgatgcaggagcacagagggcgaacatga

SEQ ID NO: 453935 - DNA, 4161 bp, Homo sapiens
tgggagcggaggagagatgtgagcctcgtaccaggaagatcatactgaggccaccaggttgagagccgcctggctggggggcttgtccggggacagcaggggcagaggcatggaggttcacagccaggaaatcgtgcagtgaacctgtcccctccggtcacaacatcaagagctgaactgggactagaagtcatcgccccagagctttttgctaccagaactgccgggtgaaaatctttggaagagaagtttgagaacctgttaaacaagctctctaggtaattctgtgcacgttcagtctgagaactgctgcatctgaagaggccctccagaaaaaggaagaaaagtgggaaggtgaccccagtggctgaaagcaggagaaagtgtttcatcacgggccctctccttctgaatactatttgaacatggaattcaatccttcagatcatcctcgggccagcacaatattcctcagtaaatctcagacagacgtgagagaaaaacgcaagagtctcttcattaaccatcatcctccaggacaaatagcaaggaaatacagttcctgctccaccattttcctagatgatagcacagtcagtcaaccaaacctcaagtatacaattaaatgtgtcgctcttgcaatatattatcacatcaaaaacagggacccagatggaaggatgctcttagatatttttgatgaaaatcttcaccctctttcgaaatccgaagtgccaccagattatgacaaacacaacccagagcagaagcagatttaccggttcgttcggacactgttcagtgctgctcagctgacggctgaatgtgccatcgtcaccctggtgtaccttgaaagacttttaacatacgcagagatagatatctgtccggccaactggaagcggattgttttaggggcgatcctgctggcctccaaggtgtgggatgaccaggctgtatggaatgtggattactgccagatcctgaaagacatcacggtggaggacatgaacgagctagagcgacagtttcttgaattgctgcagttcaacatcaatgttccttccagtgtctatgccaagtattattttgatcttcgttctctggcagaagcgaacaacctgagctttcccttggagcccctgagcagggagagggctcacaagcttgaggccatctctcgcctctgcgaggacaagtacaaggacctaagaagatccgcgaggaagcgctcagccagtgcagacaacctgactctgccccggtggtccccagccatcatctcttaactacggaggcccgccggaggccacaccatcccttagtttctcctttagtttgagaaaagacagacttggggtgggtttgtttttgttttttctttccttttctttttttacgcatagctccgtcaagctgcctggatgagcgcccatgcagcaaggcttggaggaagcgtcagtgccctggagatcccagctcgctctccccactgtcagcaacagcacttccttcgtggaggaagtggactcgaatcctggaggaggaaataaagggaaagggaagtcgtggagaggcagggaaaatggttaagcagcccggccctctggagtccccatgggggcggtagctgaagttggcgagcgcagcggtggatgcagagctggctgcacccagggctgggccagtgtgtcctgtaagacttcttgcattccttctgctgcttttttgggatgggggtatttttgttcatttgtttttgccctgttttgattttggtcccacagagcaggggatgtagtttgtacccaccatggcgcagacttccaaataaatagtactggtcatttctctctgcactatttctgcgcgctgtcttctgagctttcttcctcaccagtgggctgtgcttgttccatttctgtacacccttattttataccgtttttcttcaacaatggcgaaattgactgtagtgctgaaccaaaagtatccctttccctccttattcctcaccccaagaacattctagatcacatgggtgcttgtgccttccgattttcttgcatttgtttttttcctgacctgaagttgttgttacaaaatcagtcagactttgtgggctgaaggacacggtgcagcagagggtgtccctgtgagagttctgcagagtgctgggcatgtgcctggaactaccgagtaggagccatttctttgtacccctgcctaatccattcctctccttccaagtccattgttgcaagcaatattcttctcaatttttatatgtttactttaaatcaaagttagtctatttgtataaaatttttaaaaaatctaaaagaaaaagaaaaaaaacaagggtgggttgggtattccagtgggaagatcattgaagggaaaaatgttactatttactgaggtatttttcacagaatgattgaattaaaaaaaactcaacttgcattttcattgtgggtgcttagagaagttctacaaaattcaaactgtgaaggtttatgcttcattaattatgaccatactttttcattttctgacgatccctgatttccttatggactcaataagaatcttttatatcaagtaaaatgaaagttgatgatagaatatcaaatagtgaatttgatatgaaatctaagagtgtgagtcacttgcatatgtaatgctttgggtttttgcatattttcttaggtcacagtgacaggtttctgagttgtttcccttttcaagtctctgggaggccagtggcagcagcaggtctgtgtttcaccttcttcccatgtgagcttggaaaactttggcatcttaattagtcttgaatcatacacctgatccccaaacattgcctgctctcaatgaaacatgctttggaaatggaagggactcagaaagtcgaaatcccaagaactccaagccaaaagtgttaggttttagtgaaatttgtgtcaggtataagcatacctgtttgggccagaattattatcacagcctttctgacccaaactttcaaaagcaaataaacagcatataaaacgttaattatctttccattgtaattgtgatgatctactctgtatgggtaccaaaatcaccttctctcttcaagtcaaagttgaatttagaactttgaatacaggtcaaaaaatgtagaaaatatcattttatattccctaatctatatagctgaaaaagggttgtattttcttagctgaatatgaatacctcttaaacataaattagttcctctccagtgaagtatcttattttaccaatccatttcaggaaagaggttctgctgccgtaaaggcagaaattttatttttatcccttttatttgaatgagagatttgaaaatcgaattatgtaaatatttcaatgcatctgctattattttgtggagtttattaaactactttaaaaaaattgtatagtctatttattgtatgtatgtacatacagtctgatacctaaaatttaaagtggattccataaaaccagactcaagtcttgtttagactactgaatactgttttagcctgtgccctggattctacctctgtataggaaaattttccatattcattaattagtgttgatctgtattaattggttatgtttcttgcactaaggatgtttaaaactccgctgtaagtgtagattttagttttactggcaggatgaatcacttgacacataggtagatacttgaggttcattttcttttctttttctacatgatgatgaatagttatgttttcttctctgatttgttcaaagtttgccaaaagaaaacacaaaaccagtacagtacttactgataaatcgtagtgactgtaatttgtttgtaaggcgaattaatgctctacaattaaagctggattactattgaggaaaaaaaaaaaaaaaaaaaaaaaaagaaaaagaaacaaaaacaacacaaaaccaaacacgacaccacgaagaagaaaaaaaaaaaaagaaaaaagaaacgaggacaacagggaagaacagaagaagaagcgatgcactcacaccacgataagaagatgaacagggcggcagcgacatgacgccggtgccgaacggcaagcaccccagcagcggccccagacgatgcaggagcacagagggcgaacatga

SEQ ID NO: 453936 - DNA, 4282 bp, Homo sapiens
tgggagcggaggagagatgtgagcctcgtaccaggaagatcatactgaggccaccaggttgagagccgcctggctggggggcttgtccggggacagcaggggcagaggcatggaggttcacagccaggaaatcgtgcagtgaacctgtcccctccggtcacaacatcaagagctgaactgggactagaagtcatcgccccagagctttttgctaccagaactgccgggtgaaaatctttggaagagaagtttgagaacctgttaaacaagctctctaggtaattctgtgcacgttcagtctgagaactgctgcatctgaagagggtattaaaaaccagtgacatgtagcatgaaggcggatgaggcccatattgctaatgtgatgcagatgtggacgttcattgtggctttggtttttacccacaaaggctcacagggaatctactagagggccctgcctccacttccatcaaacaagggaagaaaatgctcttcatgaggtcactgttaactgagccagcatagggaggctcagcagatttgaacatggaattcaatccttcagatcatcctcgggccagcacaatattcctcagtaaatctcagacagacgtgagagaaaaacgcaagagtctcttcattaaccatcatcctccaggacaaatagcaaggaaatacagttcctgctccaccattttcctagatgatagcacagtcagtcaaccaaacctcaagtatacaattaaatgtgtcgctcttgcaatatattatcacatcaaaaacagggacccagatggaaggatgctcttagatatttttgatgaaaatcttcaccctctttcgaaatccgaagtgccaccagattatgacaaacacaacccagagcagaagcagatttaccggttcgttcggacactgttcagtgctgctcagctgacggctgaatgtgccatcgtcaccctggtgtaccttgaaagacttttaacatacgcagagatagatatctgtccggccaactggaagcggattgttttaggggcgatcctgctggcctccaaggtgtgggatgaccaggctgtatggaatgtggattactgccagatcctgaaagacatcacggtggaggacatgaacgagctagagcgacagtttcttgaattgctgcagttcaacatcaatgttccttccagtgtctatgccaagtattattttgatcttcgttctctggcagaagcgaacaacctgagctttcccttggagcccctgagcagggagagggctcacaagcttgaggccatctctcgcctctgcgaggacaagtacaaggacctaagaagatccgcgaggaagcgctcagccagtgcagacaacctgactctgccccggtggtccccagccatcatctcttaactacggaggcccgccggaggccacaccatcccttagtttctcctttagtttgagaaaagacagacttggggtgggtttgtttttgttttttctttccttttctttttttacgcatagctccgtcaagctgcctggatgagcgcccatgcagcaaggcttggaggaagcgtcagtgccctggagatcccagctcgctctccccactgtcagcaacagcacttccttcgtggaggaagtggactcgaatcctggaggaggaaataaagggaaagggaagtcgtggagaggcagggaaaatggttaagcagcccggccctctggagtccccatgggggcggtagctgaagttggcgagcgcagcggtggatgcagagctggctgcacccagggctgggccagtgtgtcctgtaagacttcttgcattccttctgctgcttttttgggatgggggtatttttgttcatttgtttttgccctgttttgattttggtcccacagagcaggggatgtagtttgtacccaccatggcgcagacttccaaataaatagtactggtcatttctctctgcactatttctgcgcgctgtcttctgagctttcttcctcaccagtgggctgtgcttgttccatttctgtacacccttattttataccgtttttcttcaacaatggcgaaattgactgtagtgctgaaccaaaagtatccctttccctccttattcctcaccccaagaacattctagatcacatgggtgcttgtgccttccgattttcttgcatttgtttttttcctgacctgaagttgttgttacaaaatcagtcagactttgtgggctgaaggacacggtgcagcagagggtgtccctgtgagagttctgcagagtgctgggcatgtgcctggaactaccgagtaggagccatttctttgtacccctgcctaatccattcctctccttccaagtccattgttgcaagcaatattcttctcaatttttatatgtttactttaaatcaaagttagtctatttgtataaaatttttaaaaaatctaaaagaaaaagaaaaaaaacaagggtgggttgggtattccagtgggaagatcattgaagggaaaaatgttactatttactgaggtatttttcacagaatgattgaattaaaaaaaactcaacttgcattttcattgtgggtgcttagagaagttctacaaaattcaaactgtgaaggtttatgcttcattaattatgaccatactttttcattttctgacgatccctgatttccttatggactcaataagaatcttttatatcaagtaaaatgaaagttgatgatagaatatcaaatagtgaatttgatatgaaatctaagagtgtgagtcacttgcatatgtaatgctttgggtttttgcatattttcttaggtcacagtgacaggtttctgagttgtttcccttttcaagtctctgggaggccagtggcagcagcaggtctgtgtttcaccttcttcccatgtgagcttggaaaactttggcatcttaattagtcttgaatcatacacctgatccccaaacattgcctgctctcaatgaaacatgctttggaaatggaagggactcagaaagtcgaaatcccaagaactccaagccaaaagtgttaggttttagtgaaatttgtgtcaggtataagcatacctgtttgggccagaattattatcacagcctttctgacccaaactttcaaaagcaaataaacagcatataaaacgttaattatctttccattgtaattgtgatgatctactctgtatgggtaccaaaatcaccttctctcttcaagtcaaagttgaatttagaactttgaatacaggtcaaaaaatgtagaaaatatcattttatattccctaatctatatagctgaaaaagggttgtattttcttagctgaatatgaatacctcttaaacataaattagttcctctccagtgaagtatcttattttaccaatccatttcaggaaagaggttctgctgccgtaaaggcagaaattttatttttatcccttttatttgaatgagagatttgaaaatcgaattatgtaaatatttcaatgcatctgctattattttgtggagtttattaaactactttaaaaaaattgtatagtctatttattgtatgtatgtacatacagtctgatacctaaaatttaaagtggattccataaaaccagactcaagtcttgtttagactactgaatactgttttagcctgtgccctggattctacctctgtataggaaaattttccatattcattaattagtgttgatctgtattaattggttatgtttcttgcactaaggatgtttaaaactccgctgtaagtgtagattttagttttactggcaggatgaatcacttgacacataggtagatacttgaggttcattttcttttctttttctacatgatgatgaatagttatgttttcttctctgatttgttcaaagtttgccaaaagaaaacacaaaaccagtacagtacttactgataaatcgtagtgactgtaatttgtttgtaaggcgaattaatgctctacaattaaagctggattactattgaggaaaaaaaaaaaaaaaaaaaaaaaaagaaaaagaaacaaaaacaacacaaaaccaaacacgacaccacgaagaagaaaaaaaaaaaaagaaaaaagaaacgaggacaacagggaagaacagaagaagaagcgatgcactcacaccacgataagaagatgaacagggcggcagcgacatgacgccggtgccgaacggcaagcaccccagcagcggccccagacgatgcaggagcacagagggcgaacatga

SEQ ID NO: 453937 - DNA, 3860 bp, Homo sapiens
atgcaagtcacttctattttggatgcctctgattatagaccttctgactgttgaaggctgactaggaaatactctgcatgggagttctatgtaatatagctatatgtttcaaaactatttgaacatggaattcaatccttcagatcatcctcgggccagcacaatattcctcagtaaatctcagacagacgtgagagaaaaacgcaagagtctcttcattaaccatcatcctccaggacaaatagcaaggaaatacagttcctgctccaccattttcctagatgatagcacagtcagtcaaccaaacctcaagtatacaattaaatgtgtcgctcttgcaatatattatcacatcaaaaacagggacccagatggaaggatgctcttagatatttttgatgaaaatcttcaccctctttcgaaatccgaagtgccaccagattatgacaaacacaacccagagcagaagcagatttaccggttcgttcggacactgttcagtgctgctcagctgacggctgaatgtgccatcgtcaccctggtgtaccttgaaagacttttaacatacgcagagatagatatctgtccggccaactggaagcggattgttttaggggcgatcctgctggcctccaaggtgtgggatgaccaggctgtatggaatgtggattactgccagatcctgaaagacatcacggtggaggacatgaacgagctagagcgacagtttcttgaattgctgcagttcaacatcaatgttccttccagtgtctatgccaagtattattttgatcttcgttctctggcagaagcgaacaacctgagctttcccttggagcccctgagcagggagagggctcacaagcttgaggccatctctcgcctctgcgaggacaagtacaaggacctaagaagatccgcgaggaagcgctcagccagtgcagacaacctgactctgccccggtggtccccagccatcatctcttaactacggaggcccgccggaggccacaccatcccttagtttctcctttagtttgagaaaagacagacttggggtgggtttgtttttgttttttctttccttttctttttttacgcatagctccgtcaagctgcctggatgagcgcccatgcagcaaggcttggaggaagcgtcagtgccctggagatcccagctcgctctccccactgtcagcaacagcacttccttcgtggaggaagtggactcgaatcctggaggaggaaataaagggaaagggaagtcgtggagaggcagggaaaatggttaagcagcccggccctctggagtccccatgggggcggtagctgaagttggcgagcgcagcggtggatgcagagctggctgcacccagggctgggccagtgtgtcctgtaagacttcttgcattccttctgctgcttttttgggatgggggtatttttgttcatttgtttttgccctgttttgattttggtcccacagagcaggggatgtagtttgtacccaccatggcgcagacttccaaataaatagtactggtcatttctctctgcactatttctgcgcgctgtcttctgagctttcttcctcaccagtgggctgtgcttgttccatttctgtacacccttattttataccgtttttcttcaacaatggcgaaattgactgtagtgctgaaccaaaagtatccctttccctccttattcctcaccccaagaacattctagatcacatgggtgcttgtgccttccgattttcttgcatttgtttttttcctgacctgaagttgttgttacaaaatcagtcagactttgtgggctgaaggacacggtgcagcagagggtgtccctgtgagagttctgcagagtgctgggcatgtgcctggaactaccgagtaggagccatttctttgtacccctgcctaatccattcctctccttccaagtccattgttgcaagcaatattcttctcaatttttatatgtttactttaaatcaaagttagtctatttgtataaaatttttaaaaaatctaaaagaaaaagaaaaaaaacaagggtgggttgggtattccagtgggaagatcattgaagggaaaaatgttactatttactgaggtatttttcacagaatgattgaattaaaaaaaactcaacttgcattttcattgtgggtgcttagagaagttctacaaaattcaaactgtgaaggtttatgcttcattaattatgaccatactttttcattttctgacgatccctgatttccttatggactcaataagaatcttttatatcaagtaaaatgaaagttgatgatagaatatcaaatagtgaatttgatatgaaatctaagagtgtgagtcacttgcatatgtaatgctttgggtttttgcatattttcttaggtcacagtgacaggtttctgagttgtttcccttttcaagtctctgggaggccagtggcagcagcaggtctgtgtttcaccttcttcccatgtgagcttggaaaactttggcatcttaattagtcttgaatcatacacctgatccccaaacattgcctgctctcaatgaaacatgctttggaaatggaagggactcagaaagtcgaaatcccaagaactccaagccaaaagtgttaggttttagtgaaatttgtgtcaggtataagcatacctgtttgggccagaattattatcacagcctttctgacccaaactttcaaaagcaaataaacagcatataaaacgttaattatctttccattgtaattgtgatgatctactctgtatgggtaccaaaatcaccttctctcttcaagtcaaagttgaatttagaactttgaatacaggtcaaaaaatgtagaaaatatcattttatattccctaatctatatagctgaaaaagggttgtattttcttagctgaatatgaatacctcttaaacataaattagttcctctccagtgaagtatcttattttaccaatccatttcaggaaagaggttctgctgccgtaaaggcagaaattttatttttatcccttttatttgaatgagagatttgaaaatcgaattatgtaaatatttcaatgcatctgctattattttgtggagtttattaaactactttaaaaaaattgtatagtctatttattgtatgtatgtacatacagtctgatacctaaaatttaaagtggattccataaaaccagactcaagtcttgtttagactactgaatactgttttagcctgtgccctggattctacctctgtataggaaaattttccatattcattaattagtgttgatctgtattaattggttatgtttcttgcactaaggatgtttaaaactccgctgtaagtgtagattttagttttactggcaggatgaatcacttgacacataggtagatacttgaggttcattttcttttctttttctacatgatgatgaatagttatgttttcttctctgatttgttcaaagtttgccaaaagaaaacacaaaaccagtacagtacttactgataaatcgtagtgactgtaatttgtttgtaaggcgaattaatgctctacaattaaagctggattactattgaggaaaaaaaaaaaaaaaaaaaaaaaaagaaaaagaaacaaaaacaacacaaaaccaaacacgacaccacgaagaagaaaaaaaaaaaaagaaaaaagaaacgaggacaacagggaagaacagaagaagaagcgatgcactcacaccacgataagaagatgaacagggcggcagcgacatgacgccggtgccgaacggcaagcaccccagcagcggccccagacgatgcaggagcacagagggcgaacatga

SEQ ID NO: 453938 - DNA, 4383 bp, Homo sapiens
tgggagcggaggagagatgtgagcctcgtaccaggaagatcatactgaggccaccaggttgagagccgcctggctggggggcttgtccggggacagcaggggcagaggcatggaggttcacagccaggaaatcgtgcagtgaacctgtcccctccggtcacaacatcaagagctgaactgggactagaagtcatcgccccagagctttttgctaccagaactgccgggtgaaaatctttggaagagaagtttgagaacctgttaaacaagctctctaggtaattctgtgcacgttcagtctgagaactgctgcatctgaagaggccctccagaaaaaggaagaaaagtgggaagcactgtatacacagaagcttcccaaggaaaagctatgaactctacactttggaggaggttgaggcagtgggggtgagagaaggtgactcagggagttgtgcaaatgactgactcatatttcatggatacgagtatggctgatgtaagactgcagttatctcctcctgattcaattaagcacagggaatctactagagggccctgcctccacttccatcaaacaagggaagaaaatgctcttcatgaggtcactgttaactgagccagcatagggaggctcagcagatttgaacatggaattcaatccttcagatcatcctcgggccagcacaatattcctcagtaaatctcagacagacgtgagagaaaaacgcaagagtctcttcattaaccatcatcctccaggacaaatagcaaggaaatacagttcctgctccaccattttcctagatgatagcacagtcagtcaaccaaacctcaagtatacaattaaatgtgtcgctcttgcaatatattatcacatcaaaaacagggacccagatggaaggatgctcttagatatttttgatgaaaatcttcaccctctttcgaaatccgaagtgccaccagattatgacaaacacaacccagagcagaagcagatttaccggttcgttcggacactgttcagtgctgctcagctgacggctgaatgtgccatcgtcaccctggtgtaccttgaaagacttttaacatacgcagagatagatatctgtccggccaactggaagcggattgttttaggggcgatcctgctggcctccaaggtgtgggatgaccaggctgtatggaatgtggattactgccagatcctgaaagacatcacggtggaggacatgaacgagctagagcgacagtttcttgaattgctgcagttcaacatcaatgttccttccagtgtctatgccaagtattattttgatcttcgttctctggcagaagcgaacaacctgagctttcccttggagcccctgagcagggagagggctcacaagcttgaggccatctctcgcctctgcgaggacaagtacaaggacctaagaagatccgcgaggaagcgctcagccagtgcagacaacctgactctgccccggtggtccccagccatcatctcttaactacggaggcccgccggaggccacaccatcccttagtttctcctttagtttgagaaaagacagacttggggtgggtttgtttttgttttttctttccttttctttttttacgcatagctccgtcaagctgcctggatgagcgcccatgcagcaaggcttggaggaagcgtcagtgccctggagatcccagctcgctctccccactgtcagcaacagcacttccttcgtggaggaagtggactcgaatcctggaggaggaaataaagggaaagggaagtcgtggagaggcagggaaaatggttaagcagcccggccctctggagtccccatgggggcggtagctgaagttggcgagcgcagcggtggatgcagagctggctgcacccagggctgggccagtgtgtcctgtaagacttcttgcattccttctgctgcttttttgggatgggggtatttttgttcatttgtttttgccctgttttgattttggtcccacagagcaggggatgtagtttgtacccaccatggcgcagacttccaaataaatagtactggtcatttctctctgcactatttctgcgcgctgtcttctgagctttcttcctcaccagtgggctgtgcttgttccatttctgtacacccttattttataccgtttttcttcaacaatggcgaaattgactgtagtgctgaaccaaaagtatccctttccctccttattcctcaccccaagaacattctagatcacatgggtgcttgtgccttccgattttcttgcatttgtttttttcctgacctgaagttgttgttacaaaatcagtcagactttgtgggctgaaggacacggtgcagcagagggtgtccctgtgagagttctgcagagtgctgggcatgtgcctggaactaccgagtaggagccatttctttgtacccctgcctaatccattcctctccttccaagtccattgttgcaagcaatattcttctcaatttttatatgtttactttaaatcaaagttagtctatttgtataaaatttttaaaaaatctaaaagaaaaagaaaaaaaacaagggtgggttgggtattccagtgggaagatcattgaagggaaaaatgttactatttactgaggtatttttcacagaatgattgaattaaaaaaaactcaacttgcattttcattgtgggtgcttagagaagttctacaaaattcaaactgtgaaggtttatgcttcattaattatgaccatactttttcattttctgacgatccctgatttccttatggactcaataagaatcttttatatcaagtaaaatgaaagttgatgatagaatatcaaatagtgaatttgatatgaaatctaagagtgtgagtcacttgcatatgtaatgctttgggtttttgcatattttcttaggtcacagtgacaggtttctgagttgtttcccttttcaagtctctgggaggccagtggcagcagcaggtctgtgtttcaccttcttcccatgtgagcttggaaaactttggcatcttaattagtcttgaatcatacacctgatccccaaacattgcctgctctcaatgaaacatgctttggaaatggaagggactcagaaagtcgaaatcccaagaactccaagccaaaagtgttaggttttagtgaaatttgtgtcaggtataagcatacctgtttgggccagaattattatcacagcctttctgacccaaactttcaaaagcaaataaacagcatataaaacgttaattatctttccattgtaattgtgatgatctactctgtatgggtaccaaaatcaccttctctcttcaagtcaaagttgaatttagaactttgaatacaggtcaaaaaatgtagaaaatatcattttatattccctaatctatatagctgaaaaagggttgtattttcttagctgaatatgaatacctcttaaacataaattagttcctctccagtgaagtatcttattttaccaatccatttcaggaaagaggttctgctgccgtaaaggcagaaattttatttttatcccttttatttgaatgagagatttgaaaatcgaattatgtaaatatttcaatgcatctgctattattttgtggagtttattaaactactttaaaaaaattgtatagtctatttattgtatgtatgtacatacagtctgatacctaaaatttaaagtggattccataaaaccagactcaagtcttgtttagactactgaatactgttttagcctgtgccctggattctacctctgtataggaaaattttccatattcattaattagtgttgatctgtattaattggttatgtttcttgcactaaggatgtttaaaactccgctgtaagtgtagattttagttttactggcaggatgaatcacttgacacataggtagatacttgaggttcattttcttttctttttctacatgatgatgaatagttatgttttcttctctgatttgttcaaagtttgccaaaagaaaacacaaaaccagtacagtacttactgataaatcgtagtgactgtaatttgtttgtaaggcgaattaatgctctacaattaaagctggattactattgaggaaaaaaaaaaaaaaaaaaaaaaaaagaaaaagaaacaaaaacaacacaaaaccaaacacgacaccacgaagaagaaaaaaaaaaaaagaaaaaagaaacgaggacaacagggaagaacagaagaagaagcgatgcactcacaccacgataagaagatgaacagggcggcagcgacatgacgccggtgccgaacggcaagcaccccagcagcggccccagacgatgcaggagcacagagggcgaacatga

SEQ ID NO: 453939 - DNA, 4347 bp, Homo sapiens
tgggagcggaggagagatgtgagcctcgtaccaggaagatcatactgaggccaccaggttgagagccgcctggctggggggcttgtccggggacagcaggggcagaggcatggaggttcacagccaggaaatcgtgcagtgaacctgtcccctccggtcacaacatcaagagctgaactgggactagaagtcatcgccccagagctttttgctaccagaactgccgggtgaaaatctttggaagagaagtttgagaacctgttaaacaagctctctaggtaattctgtgcacgttcagtctgagaactgctgcatctgaagaggccctccagaaaaaggaagaaaagtgggaagcactgtatacacagaagcttcccaaggaaaagctatgaactctacactttggaggaggttgaggcagtgggggtgagagaaggtgactcagggagttgtgcaaatgactgactcatatttcatggatacgagtatggctgatgtaagactgcagttatctcctcctgattcaattaagcacagggaatctactagagggccctgcctccacttccatcaaacaagggaagaaaatgctcttcatgaggtcactgttaactgagccagcatagggaggctcagcagatttgaacatggaattcaatccttcagatcatcctcgggccagcacaatattcctcagtaaatctcagacagacgtgagagaaaaacgcaagagtctcttcattaaccatcatcctccaggacaaatagcaaggaaatacagttcctgctccaccattttcctagatgatagcacagtcagtcaaccaaacctcaagtatacaattaaatgggacccagatggaaggatgctcttagatatttttgatgaaaatcttcaccctctttcgaaatccgaagtgccaccagattatgacaaacacaacccagagcagaagcagatttaccggttcgttcggacactgttcagtgctgctcagctgacggctgaatgtgccatcgtcaccctggtgtaccttgaaagacttttaacatacgcagagatagatatctgtccggccaactggaagcggattgttttaggggcgatcctgctggcctccaaggtgtgggatgaccaggctgtatggaatgtggattactgccagatcctgaaagacatcacggtggaggacatgaacgagctagagcgacagtttcttgaattgctgcagttcaacatcaatgttccttccagtgtctatgccaagtattattttgatcttcgttctctggcagaagcgaacaacctgagctttcccttggagcccctgagcagggagagggctcacaagcttgaggccatctctcgcctctgcgaggacaagtacaaggacctaagaagatccgcgaggaagcgctcagccagtgcagacaacctgactctgccccggtggtccccagccatcatctcttaactacggaggcccgccggaggccacaccatcccttagtttctcctttagtttgagaaaagacagacttggggtgggtttgtttttgttttttctttccttttctttttttacgcatagctccgtcaagctgcctggatgagcgcccatgcagcaaggcttggaggaagcgtcagtgccctggagatcccagctcgctctccccactgtcagcaacagcacttccttcgtggaggaagtggactcgaatcctggaggaggaaataaagggaaagggaagtcgtggagaggcagggaaaatggttaagcagcccggccctctggagtccccatgggggcggtagctgaagttggcgagcgcagcggtggatgcagagctggctgcacccagggctgggccagtgtgtcctgtaagacttcttgcattccttctgctgcttttttgggatgggggtatttttgttcatttgtttttgccctgttttgattttggtcccacagagcaggggatgtagtttgtacccaccatggcgcagacttccaaataaatagtactggtcatttctctctgcactatttctgcgcgctgtcttctgagctttcttcctcaccagtgggctgtgcttgttccatttctgtacacccttattttataccgtttttcttcaacaatggcgaaattgactgtagtgctgaaccaaaagtatccctttccctccttattcctcaccccaagaacattctagatcacatgggtgcttgtgccttccgattttcttgcatttgtttttttcctgacctgaagttgttgttacaaaatcagtcagactttgtgggctgaaggacacggtgcagcagagggtgtccctgtgagagttctgcagagtgctgggcatgtgcctggaactaccgagtaggagccatttctttgtacccctgcctaatccattcctctccttccaagtccattgttgcaagcaatattcttctcaatttttatatgtttactttaaatcaaagttagtctatttgtataaaatttttaaaaaatctaaaagaaaaagaaaaaaaacaagggtgggttgggtattccagtgggaagatcattgaagggaaaaatgttactatttactgaggtatttttcacagaatgattgaattaaaaaaaactcaacttgcattttcattgtgggtgcttagagaagttctacaaaattcaaactgtgaaggtttatgcttcattaattatgaccatactttttcattttctgacgatccctgatttccttatggactcaataagaatcttttatatcaagtaaaatgaaagttgatgatagaatatcaaatagtgaatttgatatgaaatctaagagtgtgagtcacttgcatatgtaatgctttgggtttttgcatattttcttaggtcacagtgacaggtttctgagttgtttcccttttcaagtctctgggaggccagtggcagcagcaggtctgtgtttcaccttcttcccatgtgagcttggaaaactttggcatcttaattagtcttgaatcatacacctgatccccaaacattgcctgctctcaatgaaacatgctttggaaatggaagggactcagaaagtcgaaatcccaagaactccaagccaaaagtgttaggttttagtgaaatttgtgtcaggtataagcatacctgtttgggccagaattattatcacagcctttctgacccaaactttcaaaagcaaataaacagcatataaaacgttaattatctttccattgtaattgtgatgatctactctgtatgggtaccaaaatcaccttctctcttcaagtcaaagttgaatttagaactttgaatacaggtcaaaaaatgtagaaaatatcattttatattccctaatctatatagctgaaaaagggttgtattttcttagctgaatatgaatacctcttaaacataaattagttcctctccagtgaagtatcttattttaccaatccatttcaggaaagaggttctgctgccgtaaaggcagaaattttatttttatcccttttatttgaatgagagatttgaaaatcgaattatgtaaatatttcaatgcatctgctattattttgtggagtttattaaactactttaaaaaaattgtatagtctatttattgtatgtatgtacatacagtctgatacctaaaatttaaagtggattccataaaaccagactcaagtcttgtttagactactgaatactgttttagcctgtgccctggattctacctctgtataggaaaattttccatattcattaattagtgttgatctgtattaattggttatgtttcttgcactaaggatgtttaaaactccgctgtaagtgtagattttagttttactggcaggatgaatcacttgacacataggtagatacttgaggttcattttcttttctttttctacatgatgatgaatagttatgttttcttctctgatttgttcaaagtttgccaaaagaaaacacaaaaccagtacagtacttactgataaatcgtagtgactgtaatttgtttgtaaggcgaattaatgctctacaattaaagctggattactattgaggaaaaaaaaaaaaaaaaaaaaaaaaagaaaaagaaacaaaaacaacacaaaaccaaacacgacaccacgaagaagaaaaaaaaaaaaagaaaaaagaaacgaggacaacagggaagaacagaagaagaagcgatgcactcacaccacgataagaagatgaacagggcggcagcgacatgacgccggtgccgaacggcaagcaccccagcagcggccccagacgatgcaggagcacagagggcgaacatga

SEQ ID NO: 453940 - DNA, 3979 bp, Homo sapiens
aggccccgccgccgccgccgctgctgacccggcggccggccgccgttccgccccctcccgtggcggcgagcgggcgggcctccccacacgcccccgccgcccgcgccccgcgtccacccgcgccccgctcccggggactgggagaacaggatagcagcaggagtcggggggccgccgaagatggggaacactacctcgtgctgcgtgtcgtccagtcccaagctccggaggaatgcccactcccggctggagtcctaccggccagacacggacctgagccgcgaggacacgggctgcaacctgcagcacatcagcgaccgggagaacatagacgatttgaacatggaattcaatccttcagatcatcctcgggccagcacaatattcctcagtaaatctcagacagacgtgagagaaaaacgcaagagtctcttcattaaccatcatcctccaggacaaatagcaaggaaatacagttcctgctccaccattttcctagatgatagcacagtcagtcaaccaaacctcaagtatacaattaaatgtgtcgctcttgcaatatattatcacatcaaaaacagggacccagatggaaggatgctcttagatatttttgatgaaaatcttcaccctctttcgaaatccgaagtgccaccagattatgacaaacacaacccagagcagaagcagatttaccggttcgttcggacactgttcagtgctgctcagctgacggctgaatgtgccatcgtcaccctggtgtaccttgaaagacttttaacatacgcagagatagatatctgtccggccaactggaagcggattgttttaggggcgatcctgctggcctccaaggtgtgggatgaccaggctgtatggaatgtggattactgccagatcctgaaagacatcacggtggaggacatgaacgagctagagcgacagtttcttgaattgctgcagttcaacatcaatgttccttccagtgtctatgccaagtattattttgatcttcgttctctggcagaagcgaacaacctgagctttcccttggagcccctgagcagggagagggctcacaagcttgaggccatctctcgcctctgcgaggacaagtacaaggacctaagaagatccgcgaggaagcgctcagccagtgcagacaacctgactctgccccggtggtccccagccatcatctcttaactacggaggcccgccggaggccacaccatcccttagtttctcctttagtttgagaaaagacagacttggggtgggtttgtttttgttttttctttccttttctttttttacgcatagctccgtcaagctgcctggatgagcgcccatgcagcaaggcttggaggaagcgtcagtgccctggagatcccagctcgctctccccactgtcagcaacagcacttccttcgtggaggaagtggactcgaatcctggaggaggaaataaagggaaagggaagtcgtggagaggcagggaaaatggttaagcagcccggccctctggagtccccatgggggcggtagctgaagttggcgagcgcagcggtggatgcagagccctgttttgattttggtcccacagagcaggggatgtagtttgtacccaccatggcgcagacttccaaataaatagtactggtcatttctctctgcactatttctgcgcgctgtcttctgagctttcttcctcaccagtgggctgtgcttgttccatttctgtacacccttattttataccgtttttcttcaacaatggcgaaattgactgtagtgctgaaccaaaagtatccctttccctccttattcctcaccccaagaacattctagatcacatgggtgcttgtgccttccgattttcttgcatttgtttttttcctgacctgaagttgttgttacaaaatcagtcagactttgtgggctgaaggacacggtgcagcagagggtgtccctgtgagagttctgcagagtgctgggcatgtgcctggaactaccgagtaggagccatttctttgtacccctgcctaatccattcctctccttccaagtccattgttgcaagcaatattcttctcaatttttatatgtttactttaaatcaaagttagtctatttgtataaaatttttaaaaaatctaaaagaaaaagaaaaaaaacaagggtgggttgggtattccagtgggaagatcattgaagggaaaaatgttactatttactgaggtatttttcacagaatgattgaattaaaaaaaactcaacttgcattttcattgtgggtgcttagagaagttctacaaaattcaaactgtgaaggtttatgcttcattaattatgaccatactttttcattttctgacgatccctgatttccttatggactcaataagaatcttttatatcaagtaaaatgaaagttgatgatagaatatcaaatagtgaatttgatatgaaatctaagagtgtgagtcacttgcatatgtaatgctttgggtttttgcatattttcttaggtcacagtgacaggtttctgagttgtttcccttttcaagtctctgggaggccagtggcagcagcaggtctgtgtttcaccttcttcccatgtgagcttggaaaactttggcatcttaattagtcttgaatcatacacctgatccccaaacattgcctgctctcaatgaaacatgctttggaaatggaagggactcagaaagtcgaaatcccaagaactccaagccaaaagtgttaggttttagtgaaatttgtgtcaggtataagcatacctgtttgggccagaattattatcacagcctttctgacccaaactttcaaaagcaaataaacagcatataaaacgttaattatctttccattgtaattgtgatgatctactctgtatgggtaccaaaatcaccttctctcttcaagtcaaagttgaatttagaactttgaatacaggtcaaaaaatgtagaaaatatcattttatattccctaatctatatagctgaaaaagggttgtattttcttagctgaatatgaatacctcttaaacataaattagttcctctccagtgaagtatcttattttaccaatccatttcaggaaagaggttctgctgccgtaaaggcagaaattttatttttatcccttttatttgaatgagagatttgaaaatcgaattatgtaaatatttcaatgcatctgctattattttgtggagtttattaaactactttaaaaaaattgtatagtctatttattgtatgtatgtacatacagtctgatacctaaaatttaaagtggattccataaaaccagactcaagtcttgtttagactactgaatactgttttagcctgtgccctggattctacctctgtataggaaaattttccatattcattaattagtgttgatctgtattaattggttatgtttcttgcactaaggatgtttaaaactccgctgtaagtgtagattttagttttactggcaggatgaatcacttgacacataggtagatacttgaggttcattttcttttctttttctacatgatgatgaatagttatgttttcttctctgatttgttcaaagtttgccaaaagaaaacacaaaaccagtacagtacttactgataaatcgtagtgactgtaatttgtttgtaaggcgaattaatgctctacaattaaagctggattactattgaggaaaaaaaaaaaaaaaaaaaaaaaaagaaaaagaaacaaaaacaacacaaaaccaaacacgacaccacgaagaagaaaaaaaaaaaaagaaaaaagaaacgaggacaacagggaagaacagaagaagaagcgatgcactcacaccacgataagaagatgaacagggcggcagcgacatgacgccggtgccgaacggcaagcaccccagcagcggccccagacgatgcaggagcacagagggcgaacatga

SEQ ID NO: 453941 - DNA, 3875 bp, Homo sapiens
aggccccgccgccgccgccgctgctgacccggcggccggccgccgttccgccccctcccgtggcggcgagcgggcgggcctccccacacgcccccgccgcccgcgccccgcgtccacccgcgccccgctcccggggactgggagaacaggatagcagcaggagtcggggggccgccgaagatggggaacactacctcgtgctgcgtgtcgtccagtcccaagctccggaggaatgcccactcccggctggagtcctaccggccagacacggacctgagccgcgaggacacgggctgcaacctgcagcacatcagcgaccgggagaacatagacgatttgaacatggaattcaatccttcagatcatcctcgggccagcacaatattcctcagtaaatctcagacagacgtgagagaaaaacgcaagagtctcttcattaaccatcatcctccaggacaaatagcaaggaaatacagttcctgctccaccattttcctagatgatagcacagtcagtcaaccaaacctcaagtatacaattaaatgtgtcgctcttgcaatatattatcacatcaaaaacagggacccagatggaaggatgctcttagatatttttgatgaaaatcttcaccctctttcgaaatccgaagtgccaccagattatgacaaacacaacccagagcagaagcagatttaccggttcgttcggacactgttcagtgctgctcagctgacggctgaatgtgccatcgtcaccctggtgtaccttgaaagacttttaacatacgcagagatagatatctgtccggccaactggaagcggattgttttaggggcgatcctgctggcctccaaggtgtgggatgaccaggctgtatggaatgtggattactgccagatcctgaaagacatcacggtggaggacatgaacgagctagagcgacagtttcttgaattgctgcagttcaacatcaatgttccttccagtgtctatgccaagtattattttgatcttcgttctctggcagaagcgaacaacctgagctttcccttggagcccctgagcagggagagggctcacaagcttgaggccatctctcgcctctgcgaggacaagtacaaggacctaagaagatccgcgaggaagcgctcagccagtgcagacaacctgactctgccccggtggtccccagccatcatctcttaactacggaggcccgccggaggccacaccatcccttagtttctcctttagtttgagaaaagacagacttggggtgggtttgtttttgttttttctttccttttctttttttacgcatagctccgtcaagctgcctggatgagcgcccatgcagcaaggcttggaggaagcgtcatggctgcacccagggctgggccagtgtgtcctgtaagacttcttgcattccttctgctgcttttttgggatgggggtatttttgttcatttgtttttgccctgttttgattttggtcccacagagcaggggatgtagtttgtacccaccatggcgcagacttccaaataaatagtactggtcatttctctctgcactatttctgcgcgctgtcttctgagctttcttcctcaccagtgggctgtgcttgttccatttctgtacacccttattttataccgtttttcttcaacaatggcgaaattgactgtagtgctgaaccaaaagtatccctttccctccttattcctcaccccaagaacattctagatcacatgggtgcttgtgccttccgattttcttgcatttgtttttttcctgacctgaagttgttgttacaaaatcagtcagactttgtgggctgaaggacacggtgcagcagagggtgtccctgtgagagttctgcagagtgctgggcatgtgcctggaactaccgagtaggagccatttctttgtacccctgcctaatccattcctctccttccaagtccattgttgcaagcaatattcttctcaatttttatatgtttactttaaatcaaagttagtctatttgtataaaatttttaaaaaatctaaaagaaaaagaaaaaaaacaagggtgggttgggtattccagtgggaagatcattgaagggaaaaatgttactatttactgaggtatttttcacagaatgattgaattaaaaaaaactcaacttgcattttcattgtgggtgcttagagaagttctacaaaattcaaactgtgaaggtttatgcttcattaattatgaccatactttttcattttctgacgatccctgatttccttatggactcaataagaatcttttatatcaagtaaaatgaaagttgatgatagaatatcaaatagtgaatttgatatgaaatctaagagtgtgagtcacttgcatatgtaatgctttgggtttttgcatattttcttaggtcacagtgacaggtttctgagttgtttcccttttcaagtctctgggaggccagtggcagcagcaggtctgtgtttcaccttcttcccatgtgagcttggaaaactttggcatcttaattagtcttgaatcatacacctgatccccaaacattgcctgctctcaatgaaacatgctttggaaatggaagggactcagaaagtcgaaatcccaagaactccaagccaaaagtgttaggttttagtgaaatttgtgtcaggtataagcatacctgtttgggccagaattattatcacagcctttctgacccaaactttcaaaagcaaataaacagcatataaaacgttaattatctttccattgtaattgtgatgatctactctgtatgggtaccaaaatcaccttctctcttcaagtcaaagttgaatttagaactttgaatacaggtcaaaaaatgtagaaaatatcattttatattccctaatctatatagctgaaaaagggttgtattttcttagctgaatatgaatacctcttaaacataaattagttcctctccagtgaagtatcttattttaccaatccatttcaggaaagaggttctgctgccgtaaaggcagaaattttatttttatcccttttatttgaatgagagatttgaaaatcgaattatgtaaatatttcaatgcatctgctattattttgtggagtttattaaactactttaaaaaaattgtatagtctatttattgtatgtatgtacatacagtctgatacctaaaatttaaagtggattccataaaaccagactcaagtcttgtttagactactgaatactgttttagcctgtgccctggattctacctctgtataggaaaattttccatattcattaattagtgttgatctgtattaattggttatgtttcttgcactaaggatgtttaaaactccgctgtaagtgtagattttagttttactggcaggatgaatcacttgacacataggtagatacttgaggttcattttcttttctttttctacatgatgatgaatagttatgttttcttctctgatttgttcaaagtttgccaaaagaaaacacaaaaccagtacagtacttactgataaatcgtagtgactgtaatttgtttgtaaggcgaattaatgctctacaattaaagctggattactattgaggaaaaaaaaaaaaaaaaaaaaaaaaagaaaaagaaacaaaaacaacacaaaaccaaacacgacaccacgaagaagaaaaaaaaaaaaagaaaaaagaaacgaggacaacagggaagaacagaagaagaagcgatgcactcacaccacgataagaagatgaacagggcggcagcgacatgacgccggtgccgaacggcaagcaccccagcagcggccccagacgatgcaggagcacagagggcgaacatga

SEQ ID NO: 453942 - DNA, 3176 bp, Homo sapiens
caaatgttgtgaaaccttcgcaagcacagatgtgaggtagaatctggctttccctgagagcatgagccccctctcagcctgtgctgtggtccctggtccccctcgtcaccagctatggctctagtggctgcttcagtgctaatgagacaagccggagctcctggcagctacacagctctgcaggaaagccatctctcgcctctgcgaggacaagtacaaggacctaagaagatccgcgaggaagcgctcagccagtgcagacaacctgactctgccccggtggtccccagccatcatctcttaactacggaggcccgccggaggccacaccatcccttagtttctcctttagtttgagaaaagacagacttggggtgggtttgtttttgttttttctttccttttctttttttacgcatagctccgtcaagctgcctggatgagcgcccatgcagcaaggcttggaggaagcgtcagtgccctggagatcccagctcgctctccccactgtcagcaacagcacttccttcgtggaggaagtggactcgaatcctggaggaggaaataaagggaaagggaagtcgtggagaggcagggaaaatggttaagcagcccggccctctggagtccccatgggggcggtagctgaagttggcgagcgcagcggtggatgcagagctggctgcacccagggctgggccagtgtgtcctgtaagacttcttgcattccttctgctgcttttttgggatgggggtatttttgttcatttgtttttgccctgttttgattttggtcccacagagcaggggatgtagtttgtacccaccatggcgcagacttccaaataaatagtactggtcatttctctctgcactatttctgcgcgctgtcttctgagctttcttcctcaccagtgggctgtgcttgttccatttctgtacacccttattttataccgtttttcttcaacaatggcgaaattgactgtagtgctgaaccaaaagtatccctttccctccttattcctcaccccaagaacattctagatcacatgggtgcttgtgccttccgattttcttgcatttgtttttttcctgacctgaagttgttgttacaaaatcagtcagactttgtgggctgaaggacacggtgcagcagagggtgtccctgtgagagttctgcagagtgctgggcatgtgcctggaactaccgagtaggagccatttctttgtacccctgcctaatccattcctctccttccaagtccattgttgcaagcaatattcttctcaatttttatatgtttactttaaatcaaagttagtctatttgtataaaatttttaaaaaatctaaaagaaaaagaaaaaaaacaagggtgggttgggtattccagtgggaagatcattgaagggaaaaatgttactatttactgaggtatttttcacagaatgattgaattaaaaaaaactcaacttgcattttcattgtgggtgcttagagaagttctacaaaattcaaactgtgaaggtttatgcttcattaattatgaccatactttttcattttctgacgatccctgatttccttatggactcaataagaatcttttatatcaagtaaaatgaaagttgatgatagaatatcaaatagtgaatttgatatgaaatctaagagtgtgagtcacttgcatatgtaatgctttgggtttttgcatattttcttaggtcacagtgacaggtttctgagttgtttcccttttcaagtctctgggaggccagtggcagcagcaggtctgtgtttcaccttcttcccatgtgagcttggaaaactttggcatcttaattagtcttgaatcatacacctgatccccaaacattgcctgctctcaatgaaacatgctttggaaatggaagggactcagaaagtcgaaatcccaagaactccaagccaaaagtgttaggttttagtgaaatttgtgtcaggtataagcatacctgtttgggccagaattattatcacagcctttctgacccaaactttcaaaagcaaataaacagcatataaaacgttaattatctttccattgtaattgtgatgatctactctgtatgggtaccaaaatcaccttctctcttcaagtcaaagttgaatttagaactttgaatacaggtcaaaaaatgtagaaaatatcattttatattccctaatctatatagctgaaaaagggttgtattttcttagctgaatatgaatacctcttaaacataaattagttcctctccagtgaagtatcttattttaccaatccatttcaggaaagaggttctgctgccgtaaaggcagaaattttatttttatcccttttatttgaatgagagatttgaaaatcgaattatgtaaatatttcaatgcatctgctattattttgtggagtttattaaactactttaaaaaaattgtatagtctatttattgtatgtatgtacatacagtctgatacctaaaatttaaagtggattccataaaaccagactcaagtcttgtttagactactgaatactgttttagcctgtgccctggattctacctctgtataggaaaattttccatattcattaattagtgttgatctgtattaattggttatgtttcttgcactaaggatgtttaaaactccgctgtaagtgtagattttagttttactggcaggatgaatcacttgacacataggtagatacttgaggttcattttcttttctttttctacatgatgatgaatagttatgttttcttctctgatttgttcaaagtttgccaaaagaaaacacaaaaccagtacagtacttactgataaatcgtagtgactgtaatttgtttgtaaggcgaattaatgctctacaattaaagctggattactattgaggaaaaaaaaaaaaaaaaaaaaaaaaagaaaaagaaacaaaaacaacacaaaaccaaacacgacaccacgaagaagaaaaaaaaaaaaagaaaaaagaaacgaggacaacagggaagaacagaagaagaagcgatgcactcacaccacgataagaagatgaacagggcggcagcgacatgacgccggtgccgaacggcaagcaccccagcagcggccccagacgatgcaggagcacagagggcgaacatga

SEQ ID NO: 453943 - DNA, 2867 bp, Homo sapiens
cagcaactcccatgggcccaagggattataggcaggcttggagctcagaacttgacaggggacatatgggtttgtttttgttttttctttccttttctttttttacgcatagctccgtcaagctgcctggatgagcgcccatgcagcaaggcttggaggaagcgtcagtgccctggagatcccagctcgctctccccactgtcagcaacagcacttccttcgtggaggaagtggactcgaatcctggaggaggaaataaagggaaagggaagtcgtggagaggcagggaaaatggttaagcagcccggccctctggagtccccatgggggcggtagctgaagttggcgagcgcagcggtggatgcagagctggctgcacccagggctgggccagtgtgtcctgtaagacttcttgcattccttctgctgcttttttgggatgggggtatttttgttcatttgtttttgccctgttttgattttggtcccacagagcaggggatgtagtttgtacccaccatggcgcagacttccaaataaatagtactggtcatttctctctgcactatttctgcgcgctgtcttctgagctttcttcctcaccagtgggctgtgcttgttccatttctgtacacccttattttataccgtttttcttcaacaatggcgaaattgactgtagtgctgaaccaaaagtatccctttccctccttattcctcaccccaagaacattctagatcacatgggtgcttgtgccttccgattttcttgcatttgtttttttcctgacctgaagttgttgttacaaaatcagtcagactttgtgggctgaaggacacggtgcagcagagggtgtccctgtgagagttctgcagagtgctgggcatgtgcctggaactaccgagtaggagccatttctttgtacccctgcctaatccattcctctccttccaagtccattgttgcaagcaatattcttctcaatttttatatgtttactttaaatcaaagttagtctatttgtataaaatttttaaaaaatctaaaagaaaaagaaaaaaaacaagggtgggttgggtattccagtgggaagatcattgaagggaaaaatgttactatttactgaggtatttttcacagaatgattgaattaaaaaaaactcaacttgcattttcattgtgggtgcttagagaagttctacaaaattcaaactgtgaaggtttatgcttcattaattatgaccatactttttcattttctgacgatccctgatttccttatggactcaataagaatcttttatatcaagtaaaatgaaagttgatgatagaatatcaaatagtgaatttgatatgaaatctaagagtgtgagtcacttgcatatgtaatgctttgggtttttgcatattttcttaggtcacagtgacaggtttctgagttgtttcccttttcaagtctctgggaggccagtggcagcagcaggtctgtgtttcaccttcttcccatgtgagcttggaaaactttggcatcttaattagtcttgaatcatacacctgatccccaaacattgcctgctctcaatgaaacatgctttggaaatggaagggactcagaaagtcgaaatcccaagaactccaagccaaaagtgttaggttttagtgaaatttgtgtcaggtataagcatacctgtttgggccagaattattatcacagcctttctgacccaaactttcaaaagcaaataaacagcatataaaacgttaattatctttccattgtaattgtgatgatctactctgtatgggtaccaaaatcaccttctctcttcaagtcaaagttgaatttagaactttgaatacaggtcaaaaaatgtagaaaatatcattttatattccctaatctatatagctgaaaaagggttgtattttcttagctgaatatgaatacctcttaaacataaattagttcctctccagtgaagtatcttattttaccaatccatttcaggaaagaggttctgctgccgtaaaggcagaaattttatttttatcccttttatttgaatgagagatttgaaaatcgaattatgtaaatatttcaatgcatctgctattattttgtggagtttattaaactactttaaaaaaattgtatagtctatttattgtatgtatgtacatacagtctgatacctaaaatttaaagtggattccataaaaccagactcaagtcttgtttagactactgaatactgttttagcctgtgccctggattctacctctgtataggaaaattttccatattcattaattagtgttgatctgtattaattggttatgtttcttgcactaaggatgtttaaaactccgctgtaagtgtagattttagttttactggcaggatgaatcacttgacacataggtagatacttgaggttcattttcttttctttttctacatgatgatgaatagttatgttttcttctctgatttgttcaaagtttgccaaaagaaaacacaaaaccagtacagtacttactgataaatcgtagtgactgtaatttgtttgtaaggcgaattaatgctctacaattaaagctggattactattgaggaaaaaaaaaaaaaaaaaaaaaaaaagaaaaagaaacaaaaacaacacaaaaccaaacacgacaccacgaagaagaaaaaaaaaaaaagaaaaaagaaacgaggacaacagggaagaacagaagaagaagcgatgcactcacaccacgataagaagatgaacagggcggcagcgacatgacgccggtgccgaacggcaagcaccccagcagcggccccagacgatgcaggagcacagagggcgaacatga

SEQ ID NO: 453944 - DNA, 2694 bp, Homo sapiens
ttggatgtatcatgccggacactatctctcggttaacctgcaggacccgaagcgccactccatgcgccacccaaagagccacgcaacgagcccgggaagtcgtggagaggcagggaaaatggttaagcagcccggccctctggagtccccatgggggcggtagctgaagttggcgagcgcagcggtggatgcagagctggctgcacccagggctgggccagtgtgtcctgtaagacttcttgcattccttctgctgcttttttgggatgggggtatttttgttcatttgtttttgccctgttttgattttggtcccacagagcaggggatgtagtttgtacccaccatggcgcagacttccaaataaatagtactggtcatttctctctgcactatttctgcgcgctgtcttctgagctttcttcctcaccagtgggctgtgcttgttccatttctgtacacccttattttataccgtttttcttcaacaatggcgaaattgactgtagtgctgaaccaaaagtatccctttccctccttattcctcaccccaagaacattctagatcacatgggtgcttgtgccttccgattttcttgcatttgtttttttcctgacctgaagttgttgttacaaaatcagtcagactttgtgggctgaaggacacggtgcagcagagggtgtccctgtgagagttctgcagagtgctgggcatgtgcctggaactaccgagtaggagccatttctttgtacccctgcctaatccattcctctccttccaagtccattgttgcaagcaatattcttctcaatttttatatgtttactttaaatcaaagttagtctatttgtataaaatttttaaaaaatctaaaagaaaaagaaaaaaaacaagggtgggttgggtattccagtgggaagatcattgaagggaaaaatgttactatttactgaggtatttttcacagaatgattgaattaaaaaaaactcaacttgcattttcattgtgggtgcttagagaagttctacaaaattcaaactgtgaaggtttatgcttcattaattatgaccatactttttcattttctgacgatccctgatttccttatggactcaataagaatcttttatatcaagtaaaatgaaagttgatgatagaatatcaaatagtgaatttgatatgaaatctaagagtgtgagtcacttgcatatgtaatgctttgggtttttgcatattttcttaggtcacagtgacaggtttctgagttgtttcccttttcaagtctctgggaggccagtggcagcagcaggtctgtgtttcaccttcttcccatgtgagcttggaaaactttggcatcttaattagtcttgaatcatacacctgatccccaaacattgcctgctctcaatgaaacatgctttggaaatggaagggactcagaaagtcgaaatcccaagaactccaagccaaaagtgttaggttttagtgaaatttgtgtcaggtataagcatacctgtttgggccagaattattatcacagcctttctgacccaaactttcaaaagcaaataaacagcatataaaacgttaattatctttccattgtaattgtgatgatctactctgtatgggtaccaaaatcaccttctctcttcaagtcaaagttgaatttagaactttgaatacaggtcaaaaaatgtagaaaatatcattttatattccctaatctatatagctgaaaaagggttgtattttcttagctgaatatgaatacctcttaaacataaattagttcctctccagtgaagtatcttattttaccaatccatttcaggaaagaggttctgctgccgtaaaggcagaaattttatttttatcccttttatttgaatgagagatttgaaaatcgaattatgtaaatatttcaatgcatctgctattattttgtggagtttattaaactactttaaaaaaattgtatagtctatttattgtatgtatgtacatacagtctgatacctaaaatttaaagtggattccataaaaccagactcaagtcttgtttagactactgaatactgttttagcctgtgccctggattctacctctgtataggaaaattttccatattcattaattagtgttgatctgtattaattggttatgtttcttgcactaaggatgtttaaaactccgctgtaagtgtagattttagttttactggcaggatgaatcacttgacacataggtagatacttgaggttcattttcttttctttttctacatgatgatgaatagttatgttttcttctctgatttgttcaaagtttgccaaaagaaaacacaaaaccagtacagtacttactgataaatcgtagtgactgtaatttgtttgtaaggcgaattaatgctctacaattaaagctggattactattgaggaaaaaaaaaaaaaaaaaaaaaaaaagaaaaagaaacaaaaacaacacaaaaccaaacacgacaccacgaagaagaaaaaaaaaaaaagaaaaaagaaacgaggacaacagggaagaacagaagaagaagcgatgcactcacaccacgataagaagatgaacagggcggcagcgacatgacgccggtgccgaacggcaagcaccccagcagcggccccagacgatgcaggagcacagagggcgaacatga

SEQ ID NO: 453945 - DNA, 1779 bp, Homo sapiens
aggccccgccgccgccgccgctgctgacccggcggccggccgccgttccgccccctcccgtggcggcgagcgggcgggcctccccacacgcccccgccgcccgcgccccgcgtccacccgcgccccgctcccggggactgggagaacaggatagcagcaggagtcggggggccgccgaagatggggaacactacctcgtgctgcgtgtcgtccagtcccaagctccggaggaatgcccactcccggctggagtcctaccggccagacacggacctgagccgcgaggacacgggctgcaacctgcagcacatcagcgaccgggagaacatagacgatttgaacatggaattcaatccttcagatcatcctcgggccagcacaatattcctcagtaaatctcagacagacgtgagagaaaaacgcaagagtctcttcattaaccatcatcctccaggacaaatagcaaggaaatacagttcctgctccaccattttcctagatgatagcacagtcagtcaaccaaacctcaagtatacaattaaatgtgtcgctcttgcaatatattatcacatcaaaaacagggacccagatggaaggatgctcttagatatttttgatgaaaatcttcaccctctttcgaaatccgaagtgccaccagattatgacaaacacaacccagagcagaagcagatttaccggttcgttcggacactgttcagtgctgctcagctgacggctgaatgtgccatcgtcaccctggtgtaccttgaaagacttttaacatacgcagagatagatatctgtccggccaactggaagcggattgttttaggggcgatcctgctggcctccaaggtgtgggatgaccaggctgtatggaatgtggattactgccagatcctgaaagacatcacggtggaggacatgaacgagctagagcgacagtttcttgaattgctgcagttcaacatcaatgttccttccagtgtctatgccaagtattattttgatcttcgttctctggcagaagcgaacaacctgagctttcccttggagcccctgagcagggagagggctcacaagcttgaggccatctctcgcctctgcgaggacaagtacaaggacctaagaagatccgcgaggaagcgctcagccagtgcagacaacctgactctgccccggtggtccccagccatcatctcttaactacggaggcccgccggaggccacaccatcccttagtttctcctttagtttgagaaaagacagacttggggtgggtttgtttttgttttttctttccttttctttttttacgcatagctccgtcaagctgcctggatgagcgcccatgcagcaaggcttggaggaagcgtcagtgccctggagatcccagctcgctctccccactgtcagcaacagcacttccttcgtggaggaagtggactcgaatcctggaggaggaaataaagggaaagggaagtcgtggagaggcagggaaaatggttaagcagcccggccctctggagtccccatgggggcggtagctgaagttggcgagcgcagcggtggatgcagagctggctgcacccagggctgggccagtgtgtcctgtaagacttcttgcattccttctgctgcttttttgggatgggggtatttttgttcatttgtttttgccctgttttgattttggtcccacagagcaggggatgtagtttgtacccaccatggcgcagacttccaaataaatagtactggtcatttctctctgcacta

SEQ ID NO: 453946 - DNA, 1842 bp, Homo sapiens
aggccccgccgccgccgccgctgctgacccggcggccggccgccgttccgccccctcccgtggcggcgagcgggcgggcctccccacacgcccccgccgcccgcgccccgcgtccacccgcgccccgctcccggggactgggagaacaggatagcagcaggagtcggggggccgccgaagatggggaacactacctcgtgctgcgtgtcgtccagtcccaagctccggaggaatgcccactcccggctggagtcctaccggccagacacggacctgagccgcgaggacacgggctgcaacctgcagcacatcagcgaccgggagaacatagacgatttgaacatggaattcaatccttcagatcatcctcgggccagcacaatattcctcagtaaatctcagacagacgtgagagaaaaacgcaagagtctcttcattaaccatcatcctccaggacaaatagcaaggaaatacagttcctgctccaccattttcctagatgatagcacagtcagtcaaccaaacctcaagtatacaattaaatgtgtcgctcttgcaatatattatcacatcaaaaacagggacccagatggaaggatgctcttagatatttttgatgaaaatcttcaccctctttcgaaatccgaagtgccaccagattatgacaaacacaacccagagcagaagcagatttaccggttcgttcggacactgttcagtgctgctcagctgacggctgaatgtgccatcgtcaccctggtgtaccttgaaagacttttaacatacgcagagatagatatctgtccggccaactggaagcggattgttttaggggcgatcctgctggcctccaaggtgtgggatgaccaggctgtatggaatgtggattactgccagatcctgaaagacatcacggtggaggacatgaacgagctagagcgacagtttcttgaattgctgcagttcaacatcaatgttccttccagtgtctatgccaagtattattttgatcttcgttctctggcagaagcgaacaacctgagctttcccttggagcccctgagcagggagagggctcacaagcttgaggccatctctcgcctctgcgaggacaagtacaaggacctaagaagatccgcgaggaagcgctcagccagtgcagacaacctgactctgccccggtggtccccagccatcatctcttaactacggaggcccgccggaggccacaccatcccttagtttctcctttagtttgagaaaagacagacttggggtgggtttgtttttgttttttctttccttttctttttttacgcatagctccgtcaagctgcctggatgagcgcccatgcagcaaggcttggaggaagcgtcagtgccctggagatcccagctcgctctccccactgtcagcaacagcacttccttcgtggaggaagtggactcgaatcctggaggaggaaataaagggaaagggaagtcgtggagaggcagggaaaatggttaagcagcccggccctctggagtccccatgggggcggtagctgaagttggcgagcgcagcggtggatgcagagctggctgcacccagggctgggccagtgtgtcctgtaagacttcttgcattccttctgctgcttttttgggatgggggtatttttgttcatttgtttttgccctgttttgattttggtcccacagagcaggggatgtagtttgtacccaccatggcgcagacttccaaataaatagtactggtcatttctctctgcactaaaaaaaataacttaatgttacatacttgtgttctccttttatcttattgtcaatttattatga

SEQ ID NO: 453947 - DNA, 1777 bp, Homo sapiens
aggccccgccgccgccgccgctgctgacccggcggccggccgccgttccgccccctcccgtggcggcgagcgggcgggcctccccacacgcccccgccgcccgcgccccgcgtccacccgcgccccgctcccggggactgggagaacaggatagcagcaggagtcggggggccgccgaagatggggaacactacctcgtgctgcgtgtcgtccagtcccaagctccggaggaatgcccactcccggctggagtcctaccggccagacacggacctgagccgcgaggacacgggctgcaacctgcagcacatcagcgaccgggagaacatagacgatttgaacatggaattcaatccttcagatcatcctcgggccagcacaatattcctcagtaaatctcagacagacgtgagagaaaaacgcaagagtctcttcattaaccatcatcctccaggacaaatagcaaggaaatacagttcctgctccaccattttcctagatgatagcacagtcagtcaaccaaacctcaagtatacaattaaatgtgtcgctcttgcaatatattatcacatcaaaaacagggacccagatggaaggatgctcttagatatttttgatgaaaatcttcaccctctttcgaaatccgaagtgccaccagattatgacaaacacaacccagagcagaagcagatttaccggttcgttcggacactgttcagtgctgctcagctgacggctgaatgtgccatcgtcaccctggtgtaccttgaaagacttttaacatacgcagagatagatatctgtccggccaactggaagcggattgttttaggggcgatcctgctggcctccaaggtgtgggatgaccaggctgtatggaatgtggattactgccagatcctgaaagacatcacggtggaggacatgaacgagctagagcgacagtttcttgaattgctgcagttcaacatcaatgttccttccagtgtctatgccaagtattattttgatcttcgttctctggcagaagcgaacaacctgagctttcccttggagcccctgagcagggagagggctcacaagcttgaggccatctctcgcctctgcgaggacaagtacaaggacctaagaagatccgcgaggaagcgctcagccagtgcagacaacctgactctgccccggtggtccccagccatcatctcttaactacggaggcccgccggaggccacaccatcccttagtttctcctttagtttgagaaaagacagacttggggtgggtttgtttttgttttttctttccttttctttttttacgcatagctccgtcaagctgcctggatgagcgcccatgcagcaaggcttggaggaagcgtcagtgccctggagatcccagctcgctctccccactgtcagcaacagcacttccttcgtggaggaagtggactcgaatcctggaggaggaaataaagggaaagggaagtcgtggagaggcagggaaaatggttaagcagcccggccctctggagtccccatgggggcggtagctgaagttggcgagcgcagcggtggatgcagagctggctgcacccagggctgggccagtgtgtcctgtaagacttcttgcattccttctgctgcttttttgggatgggggtcagaacataagggtgggtcagaacataagagtgggtcagaacataagggtgggtcagaacataagagtgggtcagaacataagagtgagtcagaacataagggtgggtcagaacatgag

SEQ ID NO: 453948 - DNA, 1576 bp, Homo sapiens
aggccccgccgccgccgccgctgctgacccggcggccggccgccgttccgccccctcccgtggcggcgagcgggcgggcctccccacacgcccccgccgcccgcgccccgcgtccacccgcgccccgctcccggggactgggagaacaggatagcagcaggagtcggggggccgccgaagatggggaacactacctcgtgctgcgtgtcgtccagtcccaagctccggaggaatgcccactcccggctggagtcctaccggccagacacggacctgagccgcgaggacacgggctgcaacctgcagcacatcagcgaccgggagaacatagacgatttgaacatggaattcaatccttcagatcatcctcgggccagcacaatattcctcagtaaatctcagacagacgtgagagaaaaacgcaagagtctcttcattaaccatcatcctccaggacaaatagcaaggaaatacagttcctgctccaccattttcctagatgatagcacagtcagtcaaccaaacctcaagtatacaattaaatgtgtcgctcttgcaatatattatcacatcaaaaacagggacccagatggaaggatgctcttagatatttttgatgaaaatcttcaccctctttcgaaatccgaagtgccaccagattatgacaaacacaacccagagcagaagcagatttaccggttcgttcggacactgttcagtgctgctcagctgacggctgaatgtgccatcgtcaccctggtgtaccttgaaagacttttaacatacgcagagatagatatctgtccggccaactggaagcggattgttttaggggcgatcctgctggcctccaaggtgtgggatgaccaggctgtatggaatgtggattactgccagatcctgaaagacatcacggtggaggacatgaacgagctagagcgacagtttcttgaattgctgcagttcaacatcaatgttccttccagtgtctatgccaagtattattttgatcttcgttctctggcagaagcgaacaacctgagctttcccttggagcccctgagcagggagagggctcacaagcttgaggccatctctcgcctctgcgaggacaagtacaaggacctaagaagatccgcgaggaagcgctcagccagtgcagacaacctgactctgccccggtggtccccagccatcatctcttaactacggaggcccgccggaggccacaccatcccttagtttctcctttagtttgagaaaagacagacttggggtgggtttgtttttgttttttctttccttttctttttttacgcatagctccgtcaagctgcctggatgagcgcccatgcagcaaggcttggaggaagcgtcatggctgcacccagggctgggccagtgtgtcctgtaagacttcttgcattccttctgctgcttttttgggatgggggtatttttgttcatttgtttttgccctgttttgattttggtcccacagagcaggggatgtagtttgtacccaccatggcgcagacttccaaataaatagtactggtcatttctctctgcacta

SEQ ID NO: 453949 - DNA, 1200 bp, Homo sapiens
aggccccgccgccgccgccgctgctgacccggcggccggccgccgttccgccccctcccgtggcggcgagcgggcgggcctccccacacgcccccgccgcccgcgccccgcgtccacccgcgccccgctcccggggactgggagaacaggatagcagcaggagtcggggggccgccgaagatggggaacactacctcgtgctgcgtgtcgtccagtcccaagctccggaggaatgcccactcccggctggagtcctaccggccagacacggacctgagccgcgaggacacgggctgcaacctgcagcacatcagcgaccgggagaacatagacgatttgaacatggaattcaatccttcagatcatcctcgggccagcacaatattcctcagtaaatctcagacagacgtgagagaaaaacgcaagagtctcttcattaaccatcatcctccaggacaaatagcaaggaaatacagttcctgctccaccattttcctagatgatagcacagtcagtcaaccaaacctcaagtatacaattaaatgtgtcgctcttgcaatatattatcacatcaaaaacagggacccagatggaaggatgctcttagatatttttgatgaaaatcttcaccctctttcgaaatccgaagtgccaccagattatgacaaacacaacccagagcagaagcagatttaccggttcgttcggacactgttcagtgctgctcagctgacggctgaatgtgccatcgtcaccctggtgtaccttgaaagacttttaacatacgcagagatagatatctgtccggccaactggaagcggattgttttaggggcgatcctgctggcctccaaggtgtgggatgaccaggctgtatggaatgtggattactgccagatcctgaaagacatcacggtggaggacatgaacgagctagagcgacagtttcttgaattgctgcagttcaacatcaatgttccttccagtgtctatgccaagtattattttgatcttcgttctctggcagaagcgaacaacctgagctttcccttggagcccctgagcagggagagggctcacaagcttgagggtaagatggtttaaaacagcgttttgtggtgcagtgttgccaatacatcatctgagtaccagagatgcatgtggtcacattgatcatttcccccactacatgatgtaaaa

SEQ ID NO: 453950 - DNA, 700 bp, Homo sapiens
tgggagcggaggagagatgtgagcctcgtaccaggaagatcatactgaggccaccaggttgagagccgcctggctggggggcttgtccggggacagcaggggcagaggcatggaggttcacagccaggaaatcgtgcagtgaacctgtcccctccggtcacaacatcaagagctgaactgggactagaagtcatcgccccagagctttttgctaccagaactgccgggtgaaaatctttggaagagaagtttgagaacctgttaaacaagctctctaggtaattctgtgcacgttcagtctgagaactgctgcatctgaagaggccctccagaaaaaggaagaaaagtgggaagggtattaaaaaccagtgacatgtagcatgaaggcggatgaggcccatattgctaatgtgatgcagatgtggacgttcattgtggctttggtttttacccacaaaggctatttgaacatggaattcaatccttcagatcatcctcgggccagcacaatattcctcagtaaatctcagacagacgtgagagaaaaacgcaagagtctcttcattaaccatgtaagtgaagctgtctccctgtgttcttcataatgactgtacagtgtaaagagctaaaataactgtctgtgatggatgaaaatggctcatgtgctttgtagatacttggaagaatgttgcagtgtact

SEQ ID NO: 453951 - DNA, 324 bp, Homo sapiens
cccaagaacattctagatcacatgggtgcttgtgccttccgattttcttgcatttgtttttttcctgacctgaagttgttgttacaaaatcagtcagactttgtgggctgaaggacacggtgcagcagagggtgtccctgtgagagttctgcagagtgctgggcatgtgcctggaactaccgagtaggagccatttctttgtacccctgcctaatccattcctctccttccaagtccattgttgcaagcaatattcttctcaatttttatatgtttactttaaatcaaagttagtctatttgtataaaatttttaaaaaatcta

SEQ ID NO: 453952 - DNA, 1727 bp, Homo sapiens
aggccccgccgccgccgccgctgctgacccggcggccggccgccgttccgccccctcccgtggcggcgagcgggcgggcctccccacacgcccccgccgcccgcgccccgcgtccacccgcgccccgctcccggggactgggagaacaggatagcagcaggagtcggggggccgccgaagatggggaacactacctcgtgctgcgtgtcgtccagtcccaagctccggaggaatgcccactcccggctggagtcctaccggccagacacggacctgagccgcgaggacacgggctgcaacctgcagcacatcagcgaccgggagaacatagacgatttgaacatggaattcaatccttcagatcatcctcgggccagcacaatattcctcagtaaatctcagacagacgtgagagaaaaacgcaagagtctcttcattaaccatcatcctccaggacaaatagcaaggaaatacagttcctgctccaccattttcctagatgatagcacagtcagtcaaccaaacctcaagtatacaattaaatgtgtcgctcttgcaatatattatcacatcaaaaacagggacccagatggaaggatgctcttagatatttttgatgaaaatcttcaccctctttcgaaatccgaagtgccaccagattatgacaaacacaacccagagcagaagcagatttaccggttcgttcggacactgttcagtgctgctcagctgacggctgaatgtgccatcgtcaccctggtgtaccttgaaagacttttaacatacgcagagatagatatctgtccggccaactggaagcggattgttttaggggcgatcctgctggcctccaaggtgtgggatgaccaggctgtatggaatgtggattactgccagatcctgaaagacatcacggtggaggacatgaacgagctagagcgacagtttcttgaattgctgcagttcaacatcaatgttccttccagtgtctatgccaagtattattttgatcttcgttctctggcagaagcgaacaacctgagctttcccttggagcccctgagcagggagagggctcacaagcttgaggccatctctcgcctctgcgaggacaagtacaaggacctaagaagatccgcgaggaagcgctcagccagtgcagacaacctgactctgccccggtggtccccagccatcatctcttaactacggaggcccgccggaggccacaccatcccttagtttctcctttagtttgagaaaagacagacttggggtgggtttgtttttgttttttctttccttttctttttttacgcatagctccgtcaagctgcctggatgagcgcccatgcagcaaggcttggaggaagcgtcagtgccctggagatcccagctcgctctccccactgtcagcaacagcacttccttcgtggaggaagtggactcgaatcctggaggaggaaataaagggaaagggaagtcgtggagaggcagggaaaatggttaagcagcccggccctctggagtccccatgggggcggtagctgaagttggaaccacgtgattgaatgtgccccggtggcagtgttggagacttgctccggcgcggggagggaaggcagtgcggatatggcccaggagatgtttcccagggcacctaagtgttttctaaaaaaaaagggtgttcggacacatgtataaaaggattggctcgtcaatattcc

SEQ ID NO: 453953 - DNA, 4067 bp, Homo sapiens
tgggagcggaggagagatgtgagcctcgtaccaggaagatcatactgaggccaccaggttgagagccgcctggctggggggcttgtccggggacagcaggggcagaggcatggaggttcacagccaggaaatcgtgcagtgaacctgtcccctccggtcacaacatcaagagctgaactgggactagaagtcatcgccccagagctttttgctaccagaactgccgggtgaaaatctttggaagagaagtttgagaacctgttaaacaagctctctaggtaattctgtgcacgttcagtctgagaactgctgcatctgaagagatttgaacatggaattcaatccttcagatcatcctcgggccagcacaatattcctcagtaaatctcagacagacgtgagagaaaaacgcaagagtctcttcattaaccatcatcctccaggacaaatagcaaggaaatacagttcctgctccaccattttcctagatgatagcacagtcagtcaaccaaacctcaagtatacaattaaatgtgtcgctcttgcaatatattatcacatcaaaaacagggacccagatggaaggatgctcttagatatttttgatgaaaatcttcaccctctttcgaaatccgaagtgccaccagattatgacaaacacaacccagagcagaagcagatttaccggttcgttcggacactgttcagtgctgctcagctgacggctgaatgtgccatcgtcaccctggtgtaccttgaaagacttttaacatacgcagagatagatatctgtccggccaactggaagcggattgttttaggggcgatcctgctggcctccaaggtgtgggatgaccaggctgtatggaatgtggattactgccagatcctgaaagacatcacggtggaggacatgaacgagctagagcgacagtttcttgaattgctgcagttcaacatcaatgttccttccagtgtctatgccaagtattattttgatcttcgttctctggcagaagcgaacaacctgagctttcccttggagcccctgagcagggagagggctcacaagcttgaggccatctctcgcctctgcgaggacaagtacaaggacctaagaagatccgcgaggaagcgctcagccagtgcagacaacctgactctgccccggtggtccccagccatcatctcttaactacggaggcccgccggaggccacaccatcccttagtttctcctttagtttgagaaaagacagacttggggtgggtttgtttttgttttttctttccttttctttttttacgcatagctccgtcaagctgcctggatgagcgcccatgcagcaaggcttggaggaagcgtcagtgccctggagatcccagctcgctctccccactgtcagcaacagcacttccttcgtggaggaagtggactcgaatcctggaggaggaaataaagggaaagggaagtcgtggagaggcagggaaaatggttaagcagcccggccctctggagtccccatgggggcggtagctgaagttggcgagcgcagcggtggatgcagagctggctgcacccagggctgggccagtgtgtcctgtaagacttcttgcattccttctgctgcttttttgggatgggggtatttttgttcatttgtttttgccctgttttgattttggtcccacagagcaggggatgtagtttgtacccaccatggcgcagacttccaaataaatagtactggtcatttctctctgcactatttctgcgcgctgtcttctgagctttcttcctcaccagtgggctgtgcttgttccatttctgtacacccttattttataccgtttttcttcaacaatggcgaaattgactgtagtgctgaaccaaaagtatccctttccctccttattcctcaccccaagaacattctagatcacatgggtgcttgtgccttccgattttcttgcatttgtttttttcctgacctgaagttgttgttacaaaatcagtcagactttgtgggctgaaggacacggtgcagcagagggtgtccctgtgagagttctgcagagtgctgggcatgtgcctggaactaccgagtaggagccatttctttgtacccctgcctaatccattcctctccttccaagtccattgttgcaagcaatattcttctcaatttttatatgtttactttaaatcaaagttagtctatttgtataaaatttttaaaaaatctaaaagaaaaagaaaaaaaacaagggtgggttgggtattccagtgggaagatcattgaagggaaaaatgttactatttactgaggtatttttcacagaatgattgaattaaaaaaaactcaacttgcattttcattgtgggtgcttagagaagttctacaaaattcaaactgtgaaggtttatgcttcattaattatgaccatactttttcattttctgacgatccctgatttccttatggactcaataagaatcttttatatcaagtaaaatgaaagttgatgatagaatatcaaatagtgaatttgatatgaaatctaagagtgtgagtcacttgcatatgtaatgctttgggtttttgcatattttcttaggtcacagtgacaggtttctgagttgtttcccttttcaagtctctgggaggccagtggcagcagcaggtctgtgtttcaccttcttcccatgtgagcttggaaaactttggcatcttaattagtcttgaatcatacacctgatccccaaacattgcctgctctcaatgaaacatgctttggaaatggaagggactcagaaagtcgaaatcccaagaactccaagccaaaagtgttaggttttagtgaaatttgtgtcaggtataagcatacctgtttgggccagaattattatcacagcctttctgacccaaactttcaaaagcaaataaacagcatataaaacgttaattatctttccattgtaattgtgatgatctactctgtatgggtaccaaaatcaccttctctcttcaagtcaaagttgaatttagaactttgaatacaggtcaaaaaatgtagaaaatatcattttatattccctaatctatatagctgaaaaagggttgtattttcttagctgaatatgaatacctcttaaacataaattagttcctctccagtgaagtatcttattttaccaatccatttcaggaaagaggttctgctgccgtaaaggcagaaattttatttttatcccttttatttgaatgagagatttgaaaatcgaattatgtaaatatttcaatgcatctgctattattttgtggagtttattaaactactttaaaaaaattgtatagtctatttattgtatgtatgtacatacagtctgatacctaaaatttaaagtggattccataaaaccagactcaagtcttgtttagactactgaatactgttttagcctgtgccctggattctacctctgtataggaaaattttccatattcattaattagtgttgatctgtattaattggttatgtttcttgcactaaggatgtttaaaactccgctgtaagtgtagattttagttttactggcaggatgaatcacttgacacataggtagatacttgaggttcattttcttttctttttctacatgatgatgaatagttatgttttcttctctgatttgttcaaagtttgccaaaagaaaacacaaaaccagtacagtacttactgataaatcgtagtgactgtaatttgtttgtaaggcgaattaatgctctacaattaaagctggattactattgaggaaaaaaaaaaaaaaaaaaaaaaaaagaaaaagaaacaaaaacaacacaaaaccaaacacgacaccacgaagaagaaaaaaaaaaaaagaaaaaagaaacgaggacaacagggaagaacagaagaagaagcgatgcactcacaccacgataagaagatgaacagggcggcagcgacatgacgccggtgccgaacggcaagcaccccagcagcggccccagacgatgcaggagcacagagggcgaacatga

SEQ ID NO: 453954 - DNA, 3966 bp, Homo sapiens
aggccccgccgccgccgccgctgctgacccggcggccggccgccgttccgccccctcccgtggcggcgagcgggcgggcctccccacacgcccccgccgcccgcgccccgcgtccacccgcgccccgctcccggggactgggagaacaggatagcagcaggagtcggggggccgccgaagatggggaacactacctcgtgctgcgtgtcgtccagtcccaagctccggaggaatgcccactcccggctggagtcctaccggccagacacggacctgagccgcgaggacacgggctgcaacctgcagcacatcagcgaccgggagaacatagacgatttgaacatggaattcaatccttcagatcatcctcgggccagcacaatattcctcagtaaatctcagacagacgtgagagaaaaacgcaagagtctcttcattaaccatcatcctccaggacaaatagcaaggaaatacagttcctgctccaccattttcctagatgatagcacagtcagtcaaccaaacctcaagtatacaattaaatgtgtcgctcttgcaatatattatcacatcaaaaacagggacccagatggaaggatgctcttagatatttttgatgaaaatcttcaccctctttcgaaatccgaagtgccaccagattatgacaaacacaacccagagcagaagcagatttaccggttcgttcggacactgttcagtgctgctcagctgacggctgaatgtgccatcgtcaccctggtgtaccttgaaagacttttaacatacgcagagatagatatctgtccggccaactggaagcggattgttttaggggcgatcctgctggcctccaaggtgtgggatgaccaggctgtatggaatgtggattactgccagatcctgaaagacatcacggtggaggacatgaacgagctagagcgacagtttcttgaattgctgcagttcaacatcaatgttccttccagtgtctatgccaagtattattttgatcttcgttctctggcagaagcgaacaacctgagctttcccttggagcccctgagcagggagagggctcacaagcttgaggccatctctcgcctctgcgaggacaagtacaaggacctaagaagatccgcgaggaagcgctcagccagtgcagacaacctgactctgccccggtggtccccagccatcatctcttaactacggaggcccgccggaggccacaccatcccttagtttctcctttagtttgagaaaagacagacttggggtgggtttgtttttgttttttctttccttttctttttttacgcatagctccgtcaagctgcctggatgagcgcccatgcagcaaggcttggaggaagcgtcagtgccctggagatcccagctcgctctccccactgtcagcaacagcacttccttcgtggaggaagtggactcgaatcctggaggaggaaataaagggaaagggaagtcgtggagaggcagggaaaatggttaagcagcccggccctctggagtccccatgggggcggtagctgaagttggcgagcgcagcggtggatgcagagctggctgcacccagggctgggccagtgtgtcctgtaagacttcttgcattccttctgctgcttttttgggatgggggtatttttgttcatttgtttttgccctgttttgattttggtcccacagagcaggggatgtagtttgtacccaccatggcgcagacttccaaataaatagtactggtcatttctctctgcactatttctgcgcgctgtcttctgagctttcttcctcaccagtgggctgtgcttgttccatttctgtacacccttattttataccgtttttcttcaacaatggcgaaattgactgtagtgctgaaccaaaagtatccctttccctccttattcctcaccccaagaacattctagatcacatgggtgcttgtgccttccgattttcttgcatttgtttttttcctgacctgaagttgttgttacaaaatcagtcagactttgtgggctgaaggacacggtgcagcagagggtgtccctgtgagagttctgcagagtgctgggcatgtgcctggaactaccgagtaggagccatttctttgtacccctgcctaatccattcctctccttccaagtccattgttgcaagcaatattcttctcaatttttatatgtttactttaaatcaaagttagtctatttgtataaaatttttaaaaaatctaaaagaaaaagaaaaaaaacaagggtgggttgggtattccagtgggaagatcattgaagggaaaaatgttactatttactgaggtatttttcacagaatgattgaattaaaaaaaactcaacttgcattttcattgtgggtgcttagagaagttctacaaaattcaaactgtgaaggtttatgcttcattaattatgaccatactttttcattttctgacgatccctgatttccttatggactcaataagaatcttttatatcaagtaaaatgaaagttgatgatagaatatcaaatagtgaatttgatatgaaatctaagagtgtgagtcacttgcatatgtaatgctttgggtttttgcatattttcttaggtcacagtgacaggtttctgagttgtttcccttttcaagtctctgggaggccagtggcagcagcaggtctgtgtttcaccttcttcccatgtgagcttggaaaactttggcatcttaattagtcttgaatcatacacctgatccccaaacattgcctgctctcaatgaaacatgctttggaaatggaagggactcagaaagtcgaaatcccaagaactccaagccaaaagtgttaggttttagtgaaatttgtgtcaggtataagcatacctgtttgggccagaattattatcacagcctttctgacccaaactttcaaaagcaaataaacagcatataaaacgttaattatctttccattgtaattgtgatgatctactctgtatgggtaccaaaatcaccttctctcttcaagtcaaagttgaatttagaactttgaatacaggtcaaaaaatgtagaaaatatcattttatattccctaatctatatagctgaaaaagggttgtattttcttagctgaatatgaatacctcttaaacataaattagttcctctccagtgaagtatcttattttaccaatccatttcaggaaagaggttctgctgccgtaaaggcagaaattttatttttatcccttttatttgaatgagagatttgaaaatcgaattatgtaaatatttcaatgcatctgctattattttgtggagtttattaaactactttaaaaaaattgtatagtctatttattgtatgtatgtacatacagtctgatacctaaaatttaaagtggattccataaaaccagactcaagtcttgtttagactactgaatactgttttagcctgtgccctggattctacctctgtataggaaaattttccatattcattaattagtgttgatctgtattaattggttatgtttcttgcactaaggatgtttaaaactccgctgtaagtgtagattttagttttactggcaggatgaatcacttgacacataggtagatacttgaggttcattttcttttctttttctacatgatgatgaatagttatgttttcttctctgatttgttcaaagtttgccaaaagaaaacacaaaaccagtacagtacttactgataaatcgtagtgactgtaatttgtttgtaaggcgaattaatgctctacaattaaagctggattactattgaggaacacattgtcttagtgtagtttttgaatggaaagtttttgtcattaaggatgaaggaaacgacacaatttgttactttaattttatatttgatttaaacaacaaataaagtcattgggacaataaatatatatccc

SEQ ID NO: 453955 - DNA, 4141 bp, Homo sapiens
aggccccgccgccgccgccgctgctgacccggcggccggccgccgttccgccccctcccgtggcggcgagcgggcgggcctccccacacgcccccgccgcccgcgccccgcgtccacccgcgccccgctcccggggactgggagaacaggatagcagcaggagtcggggggccgccgaagatggggaacactacctcgtgctgcgtgtcgtccagtcccaagctccggaggaatgcccactcccggctggagtcctaccggccagacacggacctgagccgcgaggacacgggctgcaacctgcagcacatcagcgaccgggagaacatagacggtgaccccagtggctgaaagcaggagaaagtgtttcatcacgggccctctccttctgaatactatttgaacatggaattcaatccttcagatcatcctcgggccagcacaatattcctcagtaaatctcagacagacgtgagagaaaaacgcaagagtctcttcattaaccatcatcctccaggacaaatagcaaggaaatacagttcctgctccaccattttcctagatgatagcacagtcagtcaaccaaacctcaagtatacaattaaatgtgtcgctcttgcaatatattatcacatcaaaaacagggacccagatggaaggatgctcttagatatttttgatgaaaatcttcaccctctttcgaaatccgaagtgccaccagattatgacaaacacaacccagagcagaagcagatttaccggttcgttcggacactgttcagtgctgctcagctgacggctgaatgtgccatcgtcaccctggtgtaccttgaaagacttttaacatacgcagagatagatatctgtccggccaactggaagcggattgttttaggggcgatcctgctggcctccaaggtgtgggatgaccaggctgtatggaatgtggattactgccagatcctgaaagacatcacggtggaggacatgaacgagctagagcgacagtttcttgaattgctgcagttcaacatcaatgttccttccagtgtctatgccaagtattattttgatcttcgttctctggcagaagcgaacaacctgagctttcccttggagcccctgagcagggagagggctcacaagcttgaggccatctctcgcctctgcgaggacaagtacaaggacctaagaagatccgcgaggaagcgctcagccagtgcagacaacctgactctgccccggtggtccccagccatcatctcttaactacggaggcccgccggaggccacaccatcccttagtttctcctttagtttgagaaaagacagacttggggtgggtttgtttttgttttttctttccttttctttttttacgcatagctccgtcaagctgcctggatgagcgcccatgcagcaaggcttggaggaagcgtcagtgccctggagatcccagctcgctctccccactgtcagcaacagcacttccttcgtggaggaagtggactcgaatcctggaggaggaaataaagggaaagggaagtcgtggagaggcagggaaaatggttaagcagcccggccctctggagtccccatgggggcggtagctgaagttggcgagcgcagcggtggatgcagagctggctgcacccagggctgggccagtgtgtcctgtaagacttcttgcattccttctgctgcttttttgggatgggggtatttttgttcatttgtttttgccctgttttgattttggtcccacagagcaggggatgtagtttgtacccaccatggcgcagacttccaaataaatagtactggtcatttctctctgcactatttctgcgcgctgtcttctgagctttcttcctcaccagtgggctgtgcttgttccatttctgtacacccttattttataccgtttttcttcaacaatggcgaaattgactgtagtgctgaaccaaaagtatccctttccctccttattcctcaccccaagaacattctagatcacatgggtgcttgtgccttccgattttcttgcatttgtttttttcctgacctgaagttgttgttacaaaatcagtcagactttgtgggctgaaggacacggtgcagcagagggtgtccctgtgagagttctgcagagtgctgggcatgtgcctggaactaccgagtaggagccatttctttgtacccctgcctaatccattcctctccttccaagtccattgttgcaagcaatattcttctcaatttttatatgtttactttaaatcaaagttagtctatttgtataaaatttttaaaaaatctaaaagaaaaagaaaaaaaacaagggtgggttgggtattccagtgggaagatcattgaagggaaaaatgttactatttactgaggtatttttcacagaatgattgaattaaaaaaaactcaacttgcattttcattgtgggtgcttagagaagttctacaaaattcaaactgtgaaggtttatgcttcattaattatgaccatactttttcattttctgacgatccctgatttccttatggactcaataagaatcttttatatcaagtaaaatgaaagttgatgatagaatatcaaatagtgaatttgatatgaaatctaagagtgtgagtcacttgcatatgtaatgctttgggtttttgcatattttcttaggtcacagtgacaggtttctgagttgtttcccttttcaagtctctgggaggccagtggcagcagcaggtctgtgtttcaccttcttcccatgtgagcttggaaaactttggcatcttaattagtcttgaatcatacacctgatccccaaacattgcctgctctcaatgaaacatgctttggaaatggaagggactcagaaagtcgaaatcccaagaactccaagccaaaagtgttaggttttagtgaaatttgtgtcaggtataagcatacctgtttgggccagaattattatcacagcctttctgacccaaactttcaaaagcaaataaacagcatataaaacgttaattatctttccattgtaattgtgatgatctactctgtatgggtaccaaaatcaccttctctcttcaagtcaaagttgaatttagaactttgaatacaggtcaaaaaatgtagaaaatatcattttatattccctaatctatatagctgaaaaagggttgtattttcttagctgaatatgaatacctcttaaacataaattagttcctctccagtgaagtatcttattttaccaatccatttcaggaaagaggttctgctgccgtaaaggcagaaattttatttttatcccttttatttgaatgagagatttgaaaatcgaattatgtaaatatttcaatgcatctgctattattttgtggagtttattaaactactttaaaaaaattgtatagtctatttattgtatgtatgtacatacagtctgatacctaaaatttaaagtggattccataaaaccagactcaagtcttgtttagactactgaatactgttttagcctgtgccctggattctacctctgtataggaaaattttccatattcattaattagtgttgatctgtattaattggttatgtttcttgcactaaggatgtttaaaactccgctgtaagtgtagattttagttttactggcaggatgaatcacttgacacataggtagatacttgaggttcattttcttttctttttctacatgatgatgaatagttatgttttcttctctgatttgttcaaagtttgccaaaagaaaacacaaaaccagtacagtacttactgataaatcgtagtgactgtaatttgtttgtaaggcgaattaatgctctacaattaaagctggattactattgaggaaaaaaaaaaaaaaaaaaaaaaaaagaaaaagaaacaaaaacaacacaaaaccaaacacgacaccacgaagaagaaaaaaaaaaaaagaaaaaagaaacgaggacaacagggaagaacagaagaagaagcgatgcactcacaccacgataagaagatgaacagggcggcagcgacatgacgccggtgccgaacggcaagcaccccagcagcggccccagacgatgcaggagcacagagggcgaacatga

SEQ ID NO: 453956 - DNA, 4197 bp, Homo sapiens
tgggagcggaggagagatgtgagcctcgtaccaggaagatcatactgaggccaccaggttgagagccgcctggctggggggcttgtccggggacagcaggggcagaggcatggaggttcacagccaggaaatcgtgcagtgaacctgtcccctccggtcacaacatcaagagctgaactgggactagaagtcatcgccccagagctttttgctaccagaactgccgggtgaaaatctttggaagagaagtttgagaacctgttaaacaagctctctaggtaattctgtgcacgttcagtctgagaactgctgcatctgaagaggccctccagaaaaaggaagaaaagtgggaagaaggtgactcagggagttgtgcaaatgactgactcatatttcatggatacgagtatggctgatgtaagactgcagttatctcctcctgattcaattaagatttgaacatggaattcaatccttcagatcatcctcgggccagcacaatattcctcagtaaatctcagacagacgtgagagaaaaacgcaagagtctcttcattaaccatcatcctccaggacaaatagcaaggaaatacagttcctgctccaccattttcctagatgatagcacagtcagtcaaccaaacctcaagtatacaattaaatgtgtcgctcttgcaatatattatcacatcaaaaacagggacccagatggaaggatgctcttagatatttttgatgaaaatcttcaccctctttcgaaatccgaagtgccaccagattatgacaaacacaacccagagcagaagcagatttaccggttcgttcggacactgttcagtgctgctcagctgacggctgaatgtgccatcgtcaccctggtgtaccttgaaagacttttaacatacgcagagatagatatctgtccggccaactggaagcggattgttttaggggcgatcctgctggcctccaaggtgtgggatgaccaggctgtatggaatgtggattactgccagatcctgaaagacatcacggtggaggacatgaacgagctagagcgacagtttcttgaattgctgcagttcaacatcaatgttccttccagtgtctatgccaagtattattttgatcttcgttctctggcagaagcgaacaacctgagctttcccttggagcccctgagcagggagagggctcacaagcttgaggccatctctcgcctctgcgaggacaagtacaaggacctaagaagatccgcgaggaagcgctcagccagtgcagacaacctgactctgccccggtggtccccagccatcatctcttaactacggaggcccgccggaggccacaccatcccttagtttctcctttagtttgagaaaagacagacttggggtgggtttgtttttgttttttctttccttttctttttttacgcatagctccgtcaagctgcctggatgagcgcccatgcagcaaggcttggaggaagcgtcagtgccctggagatcccagctcgctctccccactgtcagcaacagcacttccttcgtggaggaagtggactcgaatcctggaggaggaaataaagggaaagggaagtcgtggagaggcagggaaaatggttaagcagcccggccctctggagtccccatgggggcggtagctgaagttggcgagcgcagcggtggatgcagagctggctgcacccagggctgggccagtgtgtcctgtaagacttcttgcattccttctgctgcttttttgggatgggggtatttttgttcatttgtttttgccctgttttgattttggtcccacagagcaggggatgtagtttgtacccaccatggcgcagacttccaaataaatagtactggtcatttctctctgcactatttctgcgcgctgtcttctgagctttcttcctcaccagtgggctgtgcttgttccatttctgtacacccttattttataccgtttttcttcaacaatggcgaaattgactgtagtgctgaaccaaaagtatccctttccctccttattcctcaccccaagaacattctagatcacatgggtgcttgtgccttccgattttcttgcatttgtttttttcctgacctgaagttgttgttacaaaatcagtcagactttgtgggctgaaggacacggtgcagcagagggtgtccctgtgagagttctgcagagtgctgggcatgtgcctggaactaccgagtaggagccatttctttgtacccctgcctaatccattcctctccttccaagtccattgttgcaagcaatattcttctcaatttttatatgtttactttaaatcaaagttagtctatttgtataaaatttttaaaaaatctaaaagaaaaagaaaaaaaacaagggtgggttgggtattccagtgggaagatcattgaagggaaaaatgttactatttactgaggtatttttcacagaatgattgaattaaaaaaaactcaacttgcattttcattgtgggtgcttagagaagttctacaaaattcaaactgtgaaggtttatgcttcattaattatgaccatactttttcattttctgacgatccctgatttccttatggactcaataagaatcttttatatcaagtaaaatgaaagttgatgatagaatatcaaatagtgaatttgatatgaaatctaagagtgtgagtcacttgcatatgtaatgctttgggtttttgcatattttcttaggtcacagtgacaggtttctgagttgtttcccttttcaagtctctgggaggccagtggcagcagcaggtctgtgtttcaccttcttcccatgtgagcttggaaaactttggcatcttaattagtcttgaatcatacacctgatccccaaacattgcctgctctcaatgaaacatgctttggaaatggaagggactcagaaagtcgaaatcccaagaactccaagccaaaagtgttaggttttagtgaaatttgtgtcaggtataagcatacctgtttgggccagaattattatcacagcctttctgacccaaactttcaaaagcaaataaacagcatataaaacgttaattatctttccattgtaattgtgatgatctactctgtatgggtaccaaaatcaccttctctcttcaagtcaaagttgaatttagaactttgaatacaggtcaaaaaatgtagaaaatatcattttatattccctaatctatatagctgaaaaagggttgtattttcttagctgaatatgaatacctcttaaacataaattagttcctctccagtgaagtatcttattttaccaatccatttcaggaaagaggttctgctgccgtaaaggcagaaattttatttttatcccttttatttgaatgagagatttgaaaatcgaattatgtaaatatttcaatgcatctgctattattttgtggagtttattaaactactttaaaaaaattgtatagtctatttattgtatgtatgtacatacagtctgatacctaaaatttaaagtggattccataaaaccagactcaagtcttgtttagactactgaatactgttttagcctgtgccctggattctacctctgtataggaaaattttccatattcattaattagtgttgatctgtattaattggttatgtttcttgcactaaggatgtttaaaactccgctgtaagtgtagattttagttttactggcaggatgaatcacttgacacataggtagatacttgaggttcattttcttttctttttctacatgatgatgaatagttatgttttcttctctgatttgttcaaagtttgccaaaagaaaacacaaaaccagtacagtacttactgataaatcgtagtgactgtaatttgtttgtaaggcgaattaatgctctacaattaaagctggattactattgaggaaaaaaaaaaaaaaaaaaaaaaaaagaaaaagaaacaaaaacaacacaaaaccaaacacgacaccacgaagaagaaaaaaaaaaaaagaaaaaagaaacgaggacaacagggaagaacagaagaagaagcgatgcactcacaccacgataagaagatgaacagggcggcagcgacatgacgccggtgccgaacggcaagcaccccagcagcggccccagacgatgcaggagcacagagggcgaacatga

SEQ ID NO: 453957 - DNA, 4323 bp, Homo sapiens
tgggagcggaggagagatgtgagcctcgtaccaggaagatcatactgaggccaccaggttgagagccgcctggctggggggcttgtccggggacagcaggggcagaggcatggaggttcacagccaggaaatcgtgcagtgaacctgtcccctccggtcacaacatcaagagctgaactgggactagaagtcatcgccccagagctttttgctaccagaactgccgggtgaaaatctttggaagagaagtttgagaacctgttaaacaagctctctaggtaattctgtgcacgttcagtctgagaactgctgcatctgaagaggccctccagaaaaaggaagaaaagtgggaaggatccttgtgattatgttgggtccacctggaaaatctgggctcatctctctaccttgaagccagcagattagcagctttaattccatctgcagccttaattcccatttgctatatgagcacagggaatctactagagggccctgcctccacttccatcaaacaagggaagaaaatgctcttcatgaggtcactgttaactgagccagcatagggaggctcagcagatttgaacatggaattcaatccttcagatcatcctcgggccagcacaatattcctcagtaaatctcagacagacgtgagagaaaaacgcaagagtctcttcattaaccatcatcctccaggacaaatagcaaggaaatacagttcctgctccaccattttcctagatgatagcacagtcagtcaaccaaacctcaagtatacaattaaatgtgtcgctcttgcaatatattatcacatcaaaaacagggacccagatggaaggatgctcttagatatttttgatgaaaatcttcaccctctttcgaaatccgaagtgccaccagattatgacaaacacaacccagagcagaagcagatttaccggttcgttcggacactgttcagtgctgctcagctgacggctgaatgtgccatcgtcaccctggtgtaccttgaaagacttttaacatacgcagagatagatatctgtccggccaactggaagcggattgttttaggggcgatcctgctggcctccaaggtgtgggatgaccaggctgtatggaatgtggattactgccagatcctgaaagacatcacggtggaggacatgaacgagctagagcgacagtttcttgaattgctgcagttcaacatcaatgttccttccagtgtctatgccaagtattattttgatcttcgttctctggcagaagcgaacaacctgagctttcccttggagcccctgagcagggagagggctcacaagcttgaggccatctctcgcctctgcgaggacaagtacaaggacctaagaagatccgcgaggaagcgctcagccagtgcagacaacctgactctgccccggtggtccccagccatcatctcttaactacggaggcccgccggaggccacaccatcccttagtttctcctttagtttgagaaaagacagacttggggtgggtttgtttttgttttttctttccttttctttttttacgcatagctccgtcaagctgcctggatgagcgcccatgcagcaaggcttggaggaagcgtcagtgccctggagatcccagctcgctctccccactgtcagcaacagcacttccttcgtggaggaagtggactcgaatcctggaggaggaaataaagggaaagggaagtcgtggagaggcagggaaaatggttaagcagcccggccctctggagtccccatgggggcggtagctgaagttggcgagcgcagcggtggatgcagagctggctgcacccagggctgggccagtgtgtcctgtaagacttcttgcattccttctgctgcttttttgggatgggggtatttttgttcatttgtttttgccctgttttgattttggtcccacagagcaggggatgtagtttgtacccaccatggcgcagacttccaaataaatagtactggtcatttctctctgcactatttctgcgcgctgtcttctgagctttcttcctcaccagtgggctgtgcttgttccatttctgtacacccttattttataccgtttttcttcaacaatggcgaaattgactgtagtgctgaaccaaaagtatccctttccctccttattcctcaccccaagaacattctagatcacatgggtgcttgtgccttccgattttcttgcatttgtttttttcctgacctgaagttgttgttacaaaatcagtcagactttgtgggctgaaggacacggtgcagcagagggtgtccctgtgagagttctgcagagtgctgggcatgtgcctggaactaccgagtaggagccatttctttgtacccctgcctaatccattcctctccttccaagtccattgttgcaagcaatattcttctcaatttttatatgtttactttaaatcaaagttagtctatttgtataaaatttttaaaaaatctaaaagaaaaagaaaaaaaacaagggtgggttgggtattccagtgggaagatcattgaagggaaaaatgttactatttactgaggtatttttcacagaatgattgaattaaaaaaaactcaacttgcattttcattgtgggtgcttagagaagttctacaaaattcaaactgtgaaggtttatgcttcattaattatgaccatactttttcattttctgacgatccctgatttccttatggactcaataagaatcttttatatcaagtaaaatgaaagttgatgatagaatatcaaatagtgaatttgatatgaaatctaagagtgtgagtcacttgcatatgtaatgctttgggtttttgcatattttcttaggtcacagtgacaggtttctgagttgtttcccttttcaagtctctgggaggccagtggcagcagcaggtctgtgtttcaccttcttcccatgtgagcttggaaaactttggcatcttaattagtcttgaatcatacacctgatccccaaacattgcctgctctcaatgaaacatgctttggaaatggaagggactcagaaagtcgaaatcccaagaactccaagccaaaagtgttaggttttagtgaaatttgtgtcaggtataagcatacctgtttgggccagaattattatcacagcctttctgacccaaactttcaaaagcaaataaacagcatataaaacgttaattatctttccattgtaattgtgatgatctactctgtatgggtaccaaaatcaccttctctcttcaagtcaaagttgaatttagaactttgaatacaggtcaaaaaatgtagaaaatatcattttatattccctaatctatatagctgaaaaagggttgtattttcttagctgaatatgaatacctcttaaacataaattagttcctctccagtgaagtatcttattttaccaatccatttcaggaaagaggttctgctgccgtaaaggcagaaattttatttttatcccttttatttgaatgagagatttgaaaatcgaattatgtaaatatttcaatgcatctgctattattttgtggagtttattaaactactttaaaaaaattgtatagtctatttattgtatgtatgtacatacagtctgatacctaaaatttaaagtggattccataaaaccagactcaagtcttgtttagactactgaatactgttttagcctgtgccctggattctacctctgtataggaaaattttccatattcattaattagtgttgatctgtattaattggttatgtttcttgcactaaggatgtttaaaactccgctgtaagtgtagattttagttttactggcaggatgaatcacttgacacataggtagatacttgaggttcattttcttttctttttctacatgatgatgaatagttatgttttcttctctgatttgttcaaagtttgccaaaagaaaacacaaaaccagtacagtacttactgataaatcgtagtgactgtaatttgtttgtaaggcgaattaatgctctacaattaaagctggattactattgaggaaaaaaaaaaaaaaaaaaaaaaaaagaaaaagaaacaaaaacaacacaaaaccaaacacgacaccacgaagaagaaaaaaaaaaaaagaaaaaagaaacgaggacaacagggaagaacagaagaagaagcgatgcactcacaccacgataagaagatgaacagggcggcagcgacatgacgccggtgccgaacggcaagcaccccagcagcggccccagacgatgcaggagcacagagggcgaacatga

SEQ ID NO: 453958 - DNA, 3547 bp, Homo sapiens
tgacattcttgcagaaagtaagtttcattttctattattttccctaccagggacccagatggaaggatgctcttagatatttttgatgaaaatcttcaccctctttcgaaatccgaagtgccaccagattatgacaaacacaacccagagcagaagcagatttaccggttcgttcggacactgttcagtgctgctcagctgacggctgaatgtgccatcgtcaccctggtgtaccttgaaagacttttaacatacgcagagatagatatctgtccggccaactggaagcggattgttttaggggcgatcctgctggcctccaaggtgtgggatgaccaggctgtatggaatgtggattactgccagatcctgaaagacatcacggtggaggacatgaacgagctagagcgacagtttcttgaattgctgcagttcaacatcaatgttccttccagtgtctatgccaagtattattttgatcttcgttctctggcagaagcgaacaacctgagctttcccttggagcccctgagcagggagagggctcacaagcttgaggccatctctcgcctctgcgaggacaagtacaaggacctaagaagatccgcgaggaagcgctcagccagtgcagacaacctgactctgccccggtggtccccagccatcatctcttaactacggaggcccgccggaggccacaccatcccttagtttctcctttagtttgagaaaagacagacttggggtgggtttgtttttgttttttctttccttttctttttttacgcatagctccgtcaagctgcctggatgagcgcccatgcagcaaggcttggaggaagcgtcagtgccctggagatcccagctcgctctccccactgtcagcaacagcacttccttcgtggaggaagtggactcgaatcctggaggaggaaataaagggaaagggaagtcgtggagaggcagggaaaatggttaagcagcccggccctctggagtccccatgggggcggtagctgaagttggcgagcgcagcggtggatgcagagctggctgcacccagggctgggccagtgtgtcctgtaagacttcttgcattccttctgctgcttttttgggatgggggtatttttgttcatttgtttttgccctgttttgattttggtcccacagagcaggggatgtagtttgtacccaccatggcgcagacttccaaataaatagtactggtcatttctctctgcactatttctgcgcgctgtcttctgagctttcttcctcaccagtgggctgtgcttgttccatttctgtacacccttattttataccgtttttcttcaacaatggcgaaattgactgtagtgctgaaccaaaagtatccctttccctccttattcctcaccccaagaacattctagatcacatgggtgcttgtgccttccgattttcttgcatttgtttttttcctgacctgaagttgttgttacaaaatcagtcagactttgtgggctgaaggacacggtgcagcagagggtgtccctgtgagagttctgcagagtgctgggcatgtgcctggaactaccgagtaggagccatttctttgtacccctgcctaatccattcctctccttccaagtccattgttgcaagcaatattcttctcaatttttatatgtttactttaaatcaaagttagtctatttgtataaaatttttaaaaaatctaaaagaaaaagaaaaaaaacaagggtgggttgggtattccagtgggaagatcattgaagggaaaaatgttactatttactgaggtatttttcacagaatgattgaattaaaaaaaactcaacttgcattttcattgtgggtgcttagagaagttctacaaaattcaaactgtgaaggtttatgcttcattaattatgaccatactttttcattttctgacgatccctgatttccttatggactcaataagaatcttttatatcaagtaaaatgaaagttgatgatagaatatcaaatagtgaatttgatatgaaatctaagagtgtgagtcacttgcatatgtaatgctttgggtttttgcatattttcttaggtcacagtgacaggtttctgagttgtttcccttttcaagtctctgggaggccagtggcagcagcaggtctgtgtttcaccttcttcccatgtgagcttggaaaactttggcatcttaattagtcttgaatcatacacctgatccccaaacattgcctgctctcaatgaaacatgctttggaaatggaagggactcagaaagtcgaaatcccaagaactccaagccaaaagtgttaggttttagtgaaatttgtgtcaggtataagcatacctgtttgggccagaattattatcacagcctttctgacccaaactttcaaaagcaaataaacagcatataaaacgttaattatctttccattgtaattgtgatgatctactctgtatgggtaccaaaatcaccttctctcttcaagtcaaagttgaatttagaactttgaatacaggtcaaaaaatgtagaaaatatcattttatattccctaatctatatagctgaaaaagggttgtattttcttagctgaatatgaatacctcttaaacataaattagttcctctccagtgaagtatcttattttaccaatccatttcaggaaagaggttctgctgccgtaaaggcagaaattttatttttatcccttttatttgaatgagagatttgaaaatcgaattatgtaaatatttcaatgcatctgctattattttgtggagtttattaaactactttaaaaaaattgtatagtctatttattgtatgtatgtacatacagtctgatacctaaaatttaaagtggattccataaaaccagactcaagtcttgtttagactactgaatactgttttagcctgtgccctggattctacctctgtataggaaaattttccatattcattaattagtgttgatctgtattaattggttatgtttcttgcactaaggatgtttaaaactccgctgtaagtgtagattttagttttactggcaggatgaatcacttgacacataggtagatacttgaggttcattttcttttctttttctacatgatgatgaatagttatgttttcttctctgatttgttcaaagtttgccaaaagaaaacacaaaaccagtacagtacttactgataaatcgtagtgactgtaatttgtttgtaaggcgaattaatgctctacaattaaagctggattactattgaggaaaaaaaaaaaaaaaaaaaaaaaaagaaaaagaaacaaaaacaacacaaaaccaaacacgacaccacgaagaagaaaaaaaaaaaaagaaaaaagaaacgaggacaacagggaagaacagaagaagaagcgatgcactcacaccacgataagaagatgaacagggcggcagcgacatgacgccggtgccgaacggcaagcaccccagcagcggccccagacgatgcaggagcacagagggcgaacatga

SEQ ID NO: 453959 - DNA, 4024 bp, Homo sapiens
aggccccgccgccgccgccgctgctgacccggcggccggccgccgttccgccccctcccgtggcggcgagcgggcgggcctccccacacgcccccgccgcccgcgccccgcgtccacccgcgccccgctcccggggactgggagaacaggatagcagcaggagtcggggggccgccgaagatggggaacactacctcgtgctgcgtgtcgtccagtcccaagctccggaggaatgcccactcccggctggagtcctaccggccagacacggacctgagccgcgaggacacgggctgcaacctgcagcacatcagcgaccgggagaacatagacgatttgaacatggaattcaatccttcagatcatcctcgggccagcacaatattcctcagtaaatctcagacagacgtgagagaaaaacgcaagagtctcttcattaaccatcatcctccaggacaaatagcaaggaaatacagttcctgctccaccattttcctagatgatagcacagtcagtcaaccaaacctcaagtatacaattaaatgtgtcgctcttgcaatatattatcacatcaaaaacagggacccagatggaaggatgctcttagatatttttgatgaaaatcttcaccctctttcgaaatccgaagtgccaccagattatgacaaacacaacccagagcagaagcagatttaccggttcgttcggacactgttcagtgctgctcagctgacggctgaatgtgccatcgtcaccctggtgtaccttgaaagacttttaacatacgcagagatagatatctgtccggccaactggaagcggattgttttaggggcgatcctgctggcctccaaggtgtgggatgaccaggctgtatggaatgtggattactgccagatcctgaaagacatcacggtggaggacatgaacgagctagagcgacagtttcttgaattgctgcagttcaacatcaatgttccttccagtgtctatgccaagtattattttgatcttcgttctctggcagaagcgaacaacctgagctttcccttggagcccctgagcagggagagggctcacaagcttgaggccatctctcgcctctgcgaggacaagtacaaggacctaagaagatccgcgaggaagcgctcagccagtgcagacaacctgactctgccccggtggtccccagccatcatctcttaactacggaggcccgccggaggccacaccatcccttagtttctcctttagtttgagaaaagacagacttggggtgggtttgtttttgttttttctttccttttctttttttacgcatagctccgtcaagctgcctggatgagcgcccatgcagcaaggcttggaggaagcgtcagtgccctggagatcccagctcgctctccccactgtcagcaacagcacttccttcgtggaggaagtggactcgaatcctggaggaggaaataaagggaaagggaagtcgtggagaggcagggaaaatggttaagcagcccggccctctggagtccccatgggggcggtagctgaagttggcgagcgcagcggtggatgcagagctggctgcacccagggctgggccagtgtgtcctgtaagacttcttgcattccttctgctgcttttttgggatgggggtatttttgttcatttgtttttgccctgttttgattttggtcccacagagcaggggatgtagtttgtacccaccatggcgcagacttccaaataaatagtactggtcatttctctctgcactatttctgcgcgctgtcttctgagctttcttcctcaccagtgggctgtgcttgttccatttctgtacacccttattttataccgtttttcttcaacaatggcgaaattgactgtagtgctgaaccaaaagtatccctttccctccttattcctcaccccaagaacattctagatcacatgggtgcttgtgccttccgattttcttgcatttgtttttttcctgacctgaagttgttgttacgtgagagttctgcagagtgctgggcatgtgcctggaactaccgagtaggagccatttctttgtacccctgcctaatccattcctctccttccaagtccattgttgcaagcaatattcttctcaatttttatatgtttactttaaatcaaagttagtctatttgtataaaatttttaaaaaatctaaaagaaaaagaaaaaaaacaagggtgggttgggtattccagtgggaagatcattgaagggaaaaatgttactatttactgaggtatttttcacagaatgattgaattaaaaaaaactcaacttgcattttcattgtgggtgcttagagaagttctacaaaattcaaactgtgaaggtttatgcttcattaattatgaccatactttttcattttctgacgatccctgatttccttatggactcaataagaatcttttatatcaagtaaaatgaaagttgatgatagaatatcaaatagtgaatttgatatgaaatctaagagtgtgagtcacttgcatatgtaatgctttgggtttttgcatattttcttaggtcacagtgacaggtttctgagttgtttcccttttcaagtctctgggaggccagtggcagcagcaggtctgtgtttcaccttcttcccatgtgagcttggaaaactttggcatcttaattagtcttgaatcatacacctgatccccaaacattgcctgctctcaatgaaacatgctttggaaatggaagggactcagaaagtcgaaatcccaagaactccaagccaaaagtgttaggttttagtgaaatttgtgtcaggtataagcatacctgtttgggccagaattattatcacagcctttctgacccaaactttcaaaagcaaataaacagcatataaaacgttaattatctttccattgtaattgtgatgatctactctgtatgggtaccaaaatcaccttctctcttcaagtcaaagttgaatttagaactttgaatacaggtcaaaaaatgtagaaaatatcattttatattccctaatctatatagctgaaaaagggttgtattttcttagctgaatatgaatacctcttaaacataaattagttcctctccagtgaagtatcttattttaccaatccatttcaggaaagaggttctgctgccgtaaaggcagaaattttatttttatcccttttatttgaatgagagatttgaaaatcgaattatgtaaatatttcaatgcatctgctattattttgtggagtttattaaactactttaaaaaaattgtatagtctatttattgtatgtatgtacatacagtctgatacctaaaatttaaagtggattccataaaaccagactcaagtcttgtttagactactgaatactgttttagcctgtgccctggattctacctctgtataggaaaattttccatattcattaattagtgttgatctgtattaattggttatgtttcttgcactaaggatgtttaaaactccgctgtaagtgtagattttagttttactggcaggatgaatcacttgacacataggtagatacttgaggttcattttcttttctttttctacatgatgatgaatagttatgttttcttctctgatttgttcaaagtttgccaaaagaaaacacaaaaccagtacagtacttactgataaatcgtagtgactgtaatttgtttgtaaggcgaattaatgctctacaattaaagctggattactattgaggaaaaaaaaaaaaaaaaaaaaaaaaagaaaaagaaacaaaaacaacacaaaaccaaacacgacaccacgaagaagaaaaaaaaaaaaagaaaaaagaaacgaggacaacagggaagaacagaagaagaagcgatgcactcacaccacgataagaagatgaacagggcggcagcgacatgacgccggtgccgaacggcaagcaccccagcagcggccccagacgatgcaggagcacagagggcgaacatga

SEQ ID NO: 453960 - DNA, 3915 bp, Homo sapiens
aggccccgccgccgccgccgctgctgacccggcggccggccgccgttccgccccctcccgtggcggcgagcgggcgggcctccccacacgcccccgccgcccgcgccccgcgtccacccgcgccccgctcccggggactgggagaacaggatagcagcaggagtcggggggccgccgaagatggggaacactacctcgtgctgcgtgtcgtccagtcccaagctccggaggaatgcccactcccggctggagtcctaccggccagacacggacctgagccgcgaggacacgggctgcaacctgcagcacatcagcgaccgggagaacatagacgatttgaacatggaattcaatccttcagatcatcctcgggccagcacaatattcctcagtaaatctcagacagacgtgagagaaaaacgcaagagtctcttcattaaccatcatcctccaggacaaatagcaaggaaatacagttcctgctccaccattttcctagatgatagcacagtcagtcaaccaaacctcaagtatacaattaaatgtgtcgctcttgcaatatattatcacatcaaaaacagggacccagatggaaggatgctcttagatatttttgatgaaaatcttcaccctctttcgaaatccgaagtgccaccagattatgacaaacacaacccagagcagaagcagatttaccggttcgttcggacactgttcagtgctgctcagctgacggctgaatgtgccatcgtcaccctggtgtaccttgaaagacttttaacatacgcagagatagatatctgtccggccaactggaagcggattgttttaggggcgatcctgctggcctccaaggtgtgggatgaccaggctgtatggaatgtggattactgccagatcctgaaagacatcacggtggaggacatgaacgagctagagcgacagtttcttgaattgctgcagttcaacatcaatgttccttccagtgtctatgccaagtattattttgatcttcgttctctggcagaagcgaacaacctgagctttcccttggagcccctgagcagggagagggctcacaagcttgaggccatctctcgcctctgcgaggacaagtacaaggacctaagaagatccgcgaggaagcgctcagccagtgcagacaacctgactctgccccggtggtccccagccatcatctcttaactacggaggcccgccggaggccacaccatcccttagtttctcctttagtttgagaaaagacagacttggggtgggtttgtttttgttttttctttccttttctttttttacgcatagctccgtcaagctgcctggatgagcgcccatgcagcaaggcttggaggaagcgtcagtgccctggagatcccagctcgctctccccactgtcagcaacagcacttccttcgtggaggaagtggactcgaatcctggaggaggaaataaagggaaagggaagtcgtggagaggcagggaaaatggttaagcagcccggccctctggagtccccatgggggcggtagctgaagttggcgagcgcagcggtggatgcagagctggctgcacccagggctgggccagtgtgtcctgtaagacttcttgcattccttctgctgcttttttgggatgggggtatttttgttcatttgtttttgccctgttttgattttggtcccacagagcaggggatgtagtttgtacccaccatggcgcagacttccaaataaatagtactggtcatttctctctgcactatttctgcgcgctgtcttctgagctttcttcctcaccagtgggctgtgcttgttccatttctgtacacccttattttataccgtttttcttcaacaatggcgaaattgactgtagtgctgaaccaaaagtatccctttccctccttattcctcaccccaagaacattctagatcacatgggtgcttgtgccttccgattttcttgcatttgtttttttcctgacctgaagttgttgttacaaaatcagtcagactttgtgggctgaaggacacggtgcagcagagggtgtccctgtgagagttctgcagagtgctgggcatgtgcctggaactaccgagtaggagccatttctttgtacccctgcctaatccattcctctccttccaagtccattgttgcaagcaatattcttctcaatttttatatgtttactttaaatcaaagttagtctatttgtataaaatttttaaaaaatctaaaagaaaaagaaaaaaaacaagggtgggttgggtattccagtgggaagatcattgaagggaaaaatgttactatttactgaggtatttttcacagaatgattgaattaaaaaaaactcaacttgcattttcattgtgggtgcttagagaagttctacaaaattcaaactgtgaaggtttatgcttcattaattatgaccatactttttcattttctgacgatccctgatttccttatggactcaataagaatcttttatatcaagtaaaatgaaagttgatgatagaatatcaaatagtgaatttgatatgaaatctaagagtgtgagtcacttgcatatgtaatgctttgggtttttgcatattttcttaggtcacagtgacaggtttctgagttgtttcccttttcaagtctctgggaggccagtggcagcagcaggtctgtgtttcaccttcttcccatgtgagcttggaaaactttggcatcttaattagtcttgaatcatacacctgatccccaaactttcaaaagcaaataaacagcatataaaacgttaattatctttccattgtaattgtgatgatctactctgtatgggtaccaaaatcaccttctctcttcaagtcaaagttgaatttagaactttgaatacaggtcaaaaaatgtagaaaatatcattttatattccctaatctatatagctgaaaaagggttgtattttcttagctgaatatgaatacctcttaaacataaattagttcctctccagtgaagtatcttattttaccaatccatttcaggaaagaggttctgctgccgtaaaggcagaaattttatttttatcccttttatttgaatgagagatttgaaaatcgaattatgtaaatatttcaatgcatctgctattattttgtggagtttattaaactactttaaaaaaattgtatagtctatttattgtatgtatgtacatacagtctgatacctaaaatttaaagtggattccataaaaccagactcaagtcttgtttagactactgaatactgttttagcctgtgccctggattctacctctgtataggaaaattttccatattcattaattagtgttgatctgtattaattggttatgtttcttgcactaaggatgtttaaaactccgctgtaagtgtagattttagttttactggcaggatgaatcacttgacacataggtagatacttgaggttcattttcttttctttttctacatgatgatgaatagttatgttttcttctctgatttgttcaaagtttgccaaaagaaaacacaaaaccagtacagtacttactgataaatcgtagtgactgtaatttgtttgtaaggcgaattaatgctctacaattaaagctggattactattgaggaaaaaaaaaaaaaaaaaaaaaaaaagaaaaagaaacaaaaacaacacaaaaccaaacacgacaccacgaagaagaaaaaaaaaaaaagaaaaaagaaacgaggacaacagggaagaacagaagaagaagcgatgcactcacaccacgataagaagatgaacagggcggcagcgacatgacgccggtgccgaacggcaagcaccccagcagcggccccagacgatgcaggagcacagagggcgaacatga

SEQ ID NO: 453961 - DNA, 2256 bp, Homo sapiens
aggccccgccgccgccgccgctgctgacccggcggccggccgccgttccgccccctcccgtggcggcgagcgggcgggcctccccacacgcccccgccgcccgcgccccgcgtccacccgcgccccgctcccggggactgggagaacaggatagcagcaggagtcggggggccgccgaagatggggaacactacctcgtgctgcgtgtcgtccagtcccaagctccggaggaatgcccactcccggctggagtcctaccggccagacacggacctgagccgcgaggacacgggctgcaacctgcagcacatcagcgaccgggagaacatagacgatttgaacatggaattcaatccttcagatcatcctcgggccagcacaatattcctcagtaaatctcagacagacgtgagagaaaaacgcaagagtctcttcattaaccatcatcctccaggacaaatagcaaggaaatacagttcctgctccaccattttcctagatgatagcacagtcagtcaaccaaacctcaagtatacaattaaatgtgtcgctcttgcaatatattatcacatcaaaaacagggacccagatggaaggatgctcttagatatttttgatgaaaatcttcaccctctttcgaaatccgaagtgccaccagattatgacaaacacaacccagagcagaagcagatttaccggttcgttcggacactgttcagtgctgctcagctgacggctgaatgtgccatcgtcaccctggtgtaccttgaaagacttttaacatacgcagagatagatatctgtccggccaactggaagcggattgttttaggggcgatcctgctggcctccaaggtgtgggatgaccaggctgtatggaatgtggattactgccagatcctgaaagacatcacggtggaggacatgaacgagctagagcgacagtttcttgaattgctgcagttcaacatcaatgttccttccagtgtctatgccaagtattattttgatcttcgttctctggcagaagcgaacaacctgagctttcccttggagcccctgagcagggagagggctcacaagcttgaggccatctctcgcctctgcgaggacaagtacaaggacctaagaagatccgcgaggaagcgctcagccagtgcagacaacctgactctgccccggtggtccccagccatcatctcttaactacggaggcccgccggaggccacaccatcccttagtttctcctttagtttgagaaaagacagacttggggtgggtttgtttttgttttttctttccttttctttttttacgcatagctccgtcaagctgcctggatgagcgcccatgcagcaaggcttggaggaagcgtcagtgccctggagatcccagctcgctctccccactgtcagcaacagcacttccttcgtggaggaagtggactcgaatcctggaggaggaaataaagggaaagggaagtcgtggagaggcagggaaaatggttaagcagcccggccctctggagtccccatgggggcggtagctgaagttggcgagcgcagcggtggatgcagagctggctgcacccagggctgggccagtgtgtcctgtaagacttcttgcattccttctgctgcttttttgggatgggggtatttttgttcatttgtttttgccctgttttgattttggtcccacagagcaggggatgtagtttgtacccaccatggcgcagacttccaaataaatagtactggtcatttctctctgcactatttctgcgcgctgtcttctgagctttcttcctcaccagtgggctgtgcttgttccatttctgtacacccttattttataccgtttttcttcaacaatggcgaaattgactgtagtgctgaaccaaaagtatccctttccctccttattcctcaccccaagaacattctagatcacatgggtgcttgtgccttccgattttcttgcatttgtttttttcctgacctgaagttgttgttacaaaatcagtcagactttgtgggctgaaggacacggtgcagcagagggtgtccctgtgagagttctgcagagtgctgggcatgtgcctggaactaccgagtaggagccatttctttgtacccctgcctaatccattcctctccttccaagtccattgttgcaagcaatattcttctcaatttttatatgtttactttaaatcaaagttagtctatttgtataaaatttttaaaaaatct

SEQ ID NO: 453962 - DNA, 1717 bp, Homo sapiens
aggccccgccgccgccgccgctgctgacccggcggccggccgccgttccgccccctcccgtggcggcgagcgggcgggcctccccacacgcccccgccgcccgcgccccgcgtccacccgcgccccgctcccggggactgggagaacaggatagcagcaggagtcggggggccgccgaagatggggaacactacctcgtgctgcgtgtcgtccagtcccaagctccggaggaatgcccactcccggctggagtcctaccggccagacacggacctgagccgcgaggacacgggctgcaacctgcagcacatcagcgaccgggagaacatagacgatttgaacatggaattcaatccttcagatcatcctcgggccagcacaatattcctcagtaaatctcagacagacgtgagagaaaaacgcaagagtctcttcattaaccatcatcctccaggacaaatagcaaggaaatacagttcctgctccaccattttcctagatgatagcacagtcagtcaaccaaacctcaagtatacaattaaatgtgtcgctcttgcaatatattatcacatcaaaaacagggacccagatggaaggatgctcttagatatttttgatgaaaatcttcaccctctttcgaaatccgaagtgccaccagattatgacaaacacaacccagagcagaagcagatttaccggttcgttcggacactgttcagtgctgctcagctgacggctgaatgtgccatcgtcaccctggtgtaccttgaaagacttttaacatacgcagagatagatatctgtccggccaactggaagcggattgttttaggggcgatcctgctggcctccaaggtgtgggatgaccaggctgtatggaatgtggattactgccagatcctgaaagacatcacggtggaggacatgaacgagctagagcgacagtttcttgaattgctgcagttcaacatcaatgttccttccagtgtctatgccaagtattattttgatcttcgttctctggcagaagcgaacaacctgagctttcccttggagcccctgagcagggagagggctcacaagcttgaggccatctctcgcctctgcgaggacaagtacaaggacctaagaagatccgcgaggaagcgctcagccagtgcagacaacctgactctgccccggtggtccccagccatcatctcttaactacggaggcccgccggaggccacaccatcccttagtttctcctttagtttgagaaaagacagacttggggtgggtttgtttttgttttttctttccttttctttttttacgcatagctccgtcaagctgcctggatgagcgcccatgcagcaaggcttggaggaagcgtcaagtggactcgaatcctggaggaggaaataaagggaaagggaagtcgtggagaggcagggaaaatggttaagcagcccggccctctggagtccccatgggggcggtagctgaagttggcgagcgcagcggtggatgcagagctggctgcacccagggctgggccagtgtgtcctgtaagacttcttgcattccttctgctgcttttttgggatgggggtatttttgttcatttgtttttgccctgttttgattttggtcccacagagcaggggatgtagtttgtacccaccatggcgcagacttccaaataaatagtactggtcatttctctctgcacta

SEQ ID NO: 453963 - DNA, 1302 bp, Homo sapiens
aggccccgccgccgccgccgctgctgacccggcggccggccgccgttccgccccctcccgtggcggcgagcgggcgggcctccccacacgcccccgccgcccgcgccccgcgtccacccgcgccccgctcccggggactgggagaacaggatagcagcaggagtcggggggccgccgaagatggggaacactacctcgtgctgcgtgtcgtccagtcccaagctccggaggaatgcccactcccggctggagtcctaccggccagacacggacctgagccgcgaggacacgggctgcaacctgcagcacatcagcgaccgggagaacatagacgatttgaacatggaattcaatccttcagatcatcctcgggccagcacaatattcctcagtaaatctcagacagacgtgagagaaaaacgcaagagtctcttcattaaccatcatcctccaggacaaatagcaaggaaatacagttcctgctccaccattttcctagatgatagcacagtcagtcaaccaaacctcaagtatacaattaaatgtgtcgctcttgcaatatattatcacatcaaaaacagggacccagatggaaggatgctcttagatatttttgatgaaaatcttcaccctctttcgaaatccgaagtgccaccagattatgacaaacacaacccagagcagaagcagatttaccggttcgttcggacactgttcagtgctgctcagctgacggctgaatgtgccatcgtcaccctggtgtaccttgaaagacttttaacatacgcagagatagatatctgtccggccaactggaagcggattgttttaggggcgatcctgctggcctccaaggtgtgggatgaccaggctgtatggaatgtggattactgccagatcctgaaagacatcacggtggaggacatgaacgagctagagcgacagtttcttgaattgctgcagttcaacatcaatgttccttccagtgtctatgccaagtattattttgatcttcgttctctggcagaagcgaacaacctgagctttcccttggagcccctgagcagggagagggctcacaagcttgaggccatctctcgcctctgcgaggacaagtacaaggacctaagaagatccgcgaggaagcgctcagccagtgcagacaacctgactctgccccggtggtccccagccatcatctcttaactacggaggccgcctggaaggctcaacaaatggtaattacaaatgttgtttactactctcaatagacggccagggataccgtatgtcatgcgtcta

SEQ ID NO: 453964 - DNA, 400 bp, Homo sapiens
actgtactgttatttcacatcctgagagtcttttctcagactgtaagctcttgggaaacaagagctgagtccacactcccttcgtatctccctgctgccagcagagagctgggctctgggccggagctccacaggggcaggggctctgcctgtccctcatgcagcgccctcggcgcccaggacgagtgagcaatggacgcagatatggcccgccctgacccacactgtctttcttgcccctcaggccatctctcgcctctgcgaggacaagtacaaggacctaagaagatccgcgaggaagcgctcagccagtgcagacaacctgactctgccccggtggtccccagccatcatctcttaactacggaggcccgccggaggccacaccatcccttagttt

SEQ ID NO: 453965 - DNA, 1740 bp, Homo sapiens
tctgagaacacacgcatgcattccaggcggtgctgctggggctcggcggggccgtgtctggtctgcaaggcgcgcgggctcgtggggggttggctggggagcccacgctgcctggcgactcgggccaccgaatgtgagaccgagtccctttatgtcaccagcgcacacgctgatttgaaccctgcttcgacgtgtgtgtcatggcttaaaaatagctgctaatctgtcaacctgtcttgggcagaaacagcggcggcgacagcagcaggagcgtcatggccgtggcgctgtctgcgccggcgatccgcctttcggactgaggcccagcgcagcgcttgcaaagagcagcagctacctggcaactgaacccatcatcaccacagccactcctgcagctgccacggtttctgccacctctaagatgtgccctggtaactggctttgggcttctatgacttttatggcccgcttctcccggagtagctcaaggtctcctgttcgaactcgagggaccctggaggagatgccaaccgttcaacatcctttcctcaatgtcttcgagttggagcggctcctctacacaggcaagacagcctgtaaccatgccgacgaggtctggccaggcctctatctcggagaccaggacatggctaacaaccgccgggagcttcgccgcctgggcatcacgcacgtcctcaatgcctcacacagccggtggcgaggcacgcccgaggcctatgaggggctgggcatccgctacctgggtgttgaggcccacgactcgccagcctttgacatgagcatccacttccagacggctgccgacttcatccaccgggcgctgagccagccaggagggaagatcctggtgcattgtgctgtgggcgtgagccgatccgccaccctggtactggcctacctcatgctgtaccaccaccttaccctcgtggaggccatcaagaaagtcaaagaccaccgaggcatcatccccaaccggggcttcctgaggcagctcctggccctggaccgcaggctgcggcagggtctggaagcatgaggggagggggagagaggtcaggccaggcccgtgggtaggtccctggctcccagctggagataggaggcccaggtggcaggtagcaggaggcccagatcacccatcctcccctggggtcaggagaggccgagccccaggccactgtcactctttgtgggaggggacggggagtgaggttgggcagtgtggtggatgggcacccaggaagggttgaccagggaaggaggcagctaggctgtagatggaagatggtcctgggattcgaacaccgctgggatctggccagggtgctccctgggattcacagtcccttcccctctttgtgcccaagtgtttccctctctccctcaccaaaacaaaagggccatctctgccctgcacttgtgcagaaagtcagggatacggcaagcatgaatgcaatggtgtagagttgtgtgaaacccctagcatagagacagacagcgaagagatggtgtgaaaagcttgcagaaccagacagagaaccccacagactttccactccaagcacaggaggaggtagctagcgtgtgagggttggcactaggcccacggctgctgcttgggccaaaaacatacagaggtgcatggctggcagtcttgaaattgtcactcgcttactggatccaagcgtctcgaggataaataaagatcatgaaaaagaa

SEQ ID NO: 453966 - DNA, 1616 bp, Homo sapiens
aacaaggacatgtgactctcccacctcgttgcgtggcagagccaaagagctgagcaaaaggagctgctgcagcttgaagaaaaagccacccctgaaggctcctgccagagccaggcttaccttctctccctcgagaatcttctcccgaaggaccagcccagggaagggaagcagctgctctggactcactcaagtgtgtctcacaccccttcctcttccagcagcagctacctggcaactgaacccatcatcaccacagccactcctgcagctgccacggtttctgccacctctaagatgtgccctggtaactggctttgggcttctatgacttttatggcccgcttctcccggagtagctcaaggtctcctgttcgaactcgagggaccctggaggagatgccaaccgttcaacatcctttcctcaatgtcttcgagttggagcggctcctctacacaggcaagacagcctgtaaccatgccgacgaggtctggccaggcctctatctcggagaccaggacatggctaacaaccgccgggagcttcgccgcctgggcatcacgcacgtcctcaatgcctcacacagccggtggcgaggcacgcccgaggcctatgaggggctgggcatccgctacctgggtgttgaggcccacgactcgccagcctttgacatgagcatccacttccagacggctgccgacttcatccaccgggcgctgagccagccaggagggaagatcctggtgcattgtgctgtgggcgtgagccgatccgccaccctggtactggcctacctcatgctgtaccaccaccttaccctcgtggaggccatcaagaaagtcaaagaccaccgaggcatcatccccaaccggggcttcctgaggcagctcctggccctggaccgcaggctgcggcagggtctggaagcatgaggggagggggagagaggtcaggccaggcccgtgggtaggtccctggctcccagctggagataggaggcccaggtggcaggtagcaggaggcccagatcacccatcctcccctggggtcaggagaggccgagccccaggccactgtcactctttgtgggaggggacggggagtgaggttgggcagtgtggtggatgggcacccaggaagggttgaccagggaaggaggcagctaggctgtagatggaagatggtcctgggattcgaacaccgctgggatctggccagggtgctccctgggattcacagtcccttcccctctttgtgcccaagtgtttccctctctccctcaccaaaacaaaagggccatctctgccctgcacttgtgcagaaagtcagggatacggcaagcatgaatgcaatggtgtagagttgtgtgaaacccctagcatagagacagacagcgaagagatggtgtgaaaagcttgcagaaccagacagagaaccccacagactttccactccaagcacaggaggaggtagctagcgtgtgagggttggcactaggcccacggctgctgcttgggccaaaaacatacagaggtgcatggctggcagtcttgaaattgtcactcgcttactggatccaagcgtctcgaggataaataaagatcatgaaaaagaa

SEQ ID NO: 453967 - DNA, 1167 bp, Homo sapiens
tctgagaacacacgcatgcattccaggcggtgctgctggggctcggcggggccgtgtctggtctgcaaggcgcgcgggctcgtggggggttggctggggagcccacgctgcctggcgactcgggccaccgaatgtgagaccgagtccctttatgtcaccagcgcacacgctgatttgaaccctgcttcgacgtgtgtgtcatggcttaaaaatagctgctaatctgtcaacctgtcttgggcagaaacagcggcggcgacagcagcaggagcgtcatggccgtggcgctgtctgcgccggcgatccgcctttcggactgaggcccagcgcagcgcttgcaaagagcagcagctacctggcaactgaacccatcatcaccacagccactcctgcagctgccacggtttctgccacctctaagatgtgccctggtaactggctttgggcttctatgacttttatggcccgcttctcccggagtagctcaaggtctcctgttcgaactcgagggaccctggaggagatgccaaccgttcaacatcctttcctcaatgtcttcgagttggagcggctcctctacacaggcaagacagcctgtaaccatgccgacgaggtctggccaggcctctatctcggagaccaggacatggctaacaaccgccgggagcttcgccgcctgggcatcacgcacgtcctcaatgcctcacacagccggtggcgaggcacgcccgaggcctatgaggggctgggcatccgctacctgggtgttgaggcccacgactcgccagcctttgacatgagcatccacttccagacggctgccgacttcatccaccaaaacaaaagggccatctctgccctgcacttgtgcagaaagtcagggatacggcaagcatgaatgcaatggtgtagagttgtgtgaaacccctagcatagagacagacagcgaagagatggtgtgaaaagcttgcagaaccagacagagaaccccacagactttccactccaagcacaggaggaggtagctagcgtgtgagggttggcactaggcccacggctgctgcttgggccaaaaacatacagaggtgcatggctggcagtcttgaaattgtcactcgcttactggatccaagcgtctcgaggataaataaagatcatgaaaaagaa

SEQ ID NO: 453968 - DNA, 327 bp, Homo sapiens
tgagatggggtttcacttttgttgcctgggtggagtgcaatgacacgatcttggctcactgcagcctcagcctcctgagtagctgagattacaggcatgggccaccacgcccagttgatttttgtatttttagtagagatggggtttcaccatgttggccaggctggtctcgaactcctgacctcaggcaatcttcccccttcggcctccaaaagtgctggaattaccgccgtgagccaccatgcccggccccatgtcaccctttccccagcctcctccaagctgccacaagcagtctcaaagctctctctgtgtctctcctctcag

SEQ ID NO: 453969 - DNA, 864 bp, Homo sapiens
tctgagaacacacgcatgcattccaggcggtgctgctggggctcggcggggccgtgtctggtctgcaaggcgcgcgggctcgtggggggttggctggggagcccacgctgcctggcgactcgggccaccgaatgtgagaccgagtccctttatgtcaccagcgcacacgctgatttgaaccctgcttcgacgtgtgtgtcatggcttaaaaatagctgctaatctgtcaacctgtcttgggcagaaacagcggcggcgacagcagcaggagcgtcatggccgtggcgctgtctgcgccggcgatccgcctttcggactgaggcccagcgcagcgcttgcaaagagcagcagctacctggcaactgaacccatcatcaccacagccactcctgcagctgccacggtttctgccacctctaagatgtgccctggtaactggctttgggcttctatgacttttatggcccgcttctcccggagtagctcaaggtctcctgttcgaactcgagggaccctggaggagatgccaaccgttcaacatcctttcctcaatgtcttcgagttggagcggctcctctacacaggcaagacagcctgtaaccatgccgacgaggtctggccaggcctctatctcggagaccaggacatggctaacaaccgccgggagcttcgccgcctgggcatcacgcacgtcctcaatgcctcacacagccggtggcgaggcacgcccgaggcctatgaggggctgggcatccgctacctgggtgttgaggcccacgactcgccagcctttgacatgaggggcaggggaaagaggacaaggccaagaacaggggagggcctgaataccaagtggagaaagag

SEQ ID NO: 453970 - DNA, 1951 bp, Homo sapiens
tctgagaacacacgcatgcattccaggcggtgctgctggggctcggcggggccgtgtctggtctgcaaggcgcgcgggctcgtggggggttggctggggagcccacgctgcctggcgactcgggccaccgaatgtgagaccgagtccctttatgtcaccagcgcacacgctgatttgaaccctgcttcgacgtgtgtgtcatggcttaaaaatagctgctaatctgtcaacctgtcttgggcagaaacagcggcggcgacagcagcaggagcgtcatggccgtggcgctgtctgcgccggcgatccgcctttcggactgaggcccagcgcagcgcttgcaaagagcagcagctacctggcaactgaacccatcatcaccacagccactcctgcagctgccacggtttctgccacctctaagatgtgccctggtaactggctttgggcttctatgacttttatggcccgcttctcccggagtagctcaaggtctcctgttcgaactcgagggaccctggaggagatgccaaccgttcaacatcctttcctcaatgtcttcgagttggagcggctcctctacacaggcaagacagcctgtaaccatgccgacgaggtctggccaggcctctatctcggagaccaggacatggctaacaaccgccgggagcttcgccgcctgggcatcacgcacgtcctcaatgcctcacacagccggtggcgaggcacgcccgaggcctatgaggggctgggcatccgctacctgggtgttgaggcccacgactcgccagcctttgacatgagcatccacttccagacggctgccgacttcatccaccgggcgctgagccagccaggagggaagatcctggtgcattgtgctgtgggcgtgagccgatccgccaccctggtactggcctacctcatgctgtaccaccaccttaccctcgtggaggccatcaagaaagtcaaagaccaccgaggcatcatccccaaccggggcttcctgaggcagctcctggccctggaccgcaggctgcggcagggtctggaagcatgaggggagggggagagaggtcaggccaggcccgtgggtaggtccctggctcccagctggagataggaggcccaggtggcaggtagcaggaggcccagatcacccatcctcccctggggtcaggagaggccgagccccaggccactgtcactctttgtgggaggggacggggagtgaggttgggcagtgtggtggatgggcacccaggaagggttgaccagggaaggaggcagctaggctgtagatggaagatggtcctgggattcgaacaccgctgggatctggccagggtgctccctgggattcacagtcccttcccctctttgtgcccaagtgtttccctctctccctcaccaaaacaaaagggccatctctgccctgcacttgtgcagaaagtcagggatacggcaagcatgaatgcaatggtgtagagttgtgtgaaacccctagcatagagacagacagcgaagagatggtgtgaaaagcttgcagaaccagacagagaaccccacagactttccactccaagcacaggaggaggtagctagcgtgtgagggttggcactaggcccacggctgctgcttgggccaaaaacatacagaggtgcatggctggcagtcttgaaattgtcactcgcttactggatccaagcgtctcgaggataaataaagatcatgaaaaagaaaaaaaaaaaaaaaaattgtggggacgccgagaccagaaaagtttaaaaaccttcgggtgggggccgggcccacagaggtagagaaaagggcaggggccaaagaaaccggcacgaaaaagggggggttcccacaaaaaacggcggggaacgacgtcgaaaaaccaagggcggggcaagggctcaaaggggccggagcgataccaacgggagg

SEQ ID NO: 453971 - DNA, 765 bp, Homo sapiens
aataactacacaaaatctcaccaaaagaacatttaaaataggagtttcgtatataaactatgcctcaaagtcaacttgataaatatagtcactgataaaaaaatcaaataatagtaaccaattttaatttaaatacaaaatggatatggttgcagattctacattgcaactaacccttaagaaactatcatttgttgaattttagtatagtatcataaaaggatagtcactctatttatatggaaagtccagaataggcaaatccatagagacaaagtagattagtggttgtcaggcactggggagaggaaaggaatggagagtgactttactgggtatttaggtatccaccttccaaaaaaatcataggttttcttcttgtggtaatgaaatgttctagaatttgatactggtgatgactgcacaaccaatattgaaaaccattgactagtaactacacttttaatgagtgaattttatggtatgtgagttttatctcaataaaaaaattacacagaaaagctagatttttcgtatactttgaaataatgtgtcacaacagattgtatgcagaaatagatatgaaaatcctgctgtcttctagtacgctatgttagagatttgcaaatgtaaaacattgccattcttctactaaatgttttttgttatggcttaaaaaaaatttggttactttttataaaagtgctatttatgttaaacacataatgggtttattatttttaatgaattaaatattttttgaaa

SEQ ID NO: 453972 - DNA, 531 bp, Homo sapiens
gcggccgcggcagagggcagcccggggcggcgccggctggccggggaggggcggggggcctggccccggggcggtggtgcgggatgccgccgcctccgggccgcgtccgttctccaccttccaaaaaaatcataggttttcttcttgtggtaatgaaatgttctagaatttgatactggtgatgactgcacaaccaatattgaaaaccattgactagtaactacacttttaatgagtgaattttatggtatgtgagttttatctcaataaaaaaattacacagaaaagctagatttttcgtatactttgaaataatgtgtcacaacagattgtatgcagaaatagatatgaaaatcctgctgtcttctagtacgctatgttagagatttgcaaatgtaaaacattgccattcttctactaaatgttttttgttatggcttaaaaaaaatttggttactttttataaaagtgctatttatgttaaacacataatgggtttattatttttaatgaattaaatattttttgaaa

SEQ ID NO: 453973 - DNA, 6283 bp, Homo sapiens
gattccccaacaacgacctccggtccttccccttccccgcgagacctccgccccagctccgccccgcccggggctcttgcgtttcggagtcccaactacgcggagcgggcgccgcggccggagcgtccctccacacgtcctcccccagccgccagctccgccgcggggccagaccgggcccgggacgccgccgcccctctccccgcccagaggcgccccgggggcaccatgcaggcgcagcagctgccctacgagtttttcagcgaagagaacgcgcccaagtggcggggactactggtgcctgcgctgaaaaaggtccaggggcaagttcatcctactctcgagtctaatgatgatgctcttcagtatgttgaagaattaattttgcaattattaaatatgctatgccaagctcagccccgaagtgcttcagatgtagaggaacgtgttcaaaaaagtttccctcatccaattgataaatgggcaatagctgatgcccaatcagctattgaaaagaggaagcgaagaaaccctttatctctcccagtagaaaaaattcatcctttattaaaggaggtcctaggttataaaattgaccaccaggtttctgtttacatagtagcagtcttagaatacatttctgcagacattttaaagctggttgggaattatgtaagaaatatacggcattatgaaattacaaaacaagatattaaagtggcaatgtgtgctgacaaggtattgatggatatgtttcatcaagatgtagaagatattaatatattatctttaactgacgaagagccttccacctcaggagaacaaacttactatgatttggtaaaagcatttatggcagaaattcgacaatatataagggaactaaatctaattataaaagtttttagagagccctttgtctccaattcaaaattgttttcagctaatgatgtagaaaatatatttagtcgcatagtagatatacatgaacttagtgtaaagttactgggccatatagaagatacagtagaaatgacagatgaaggcagtccccatccactagtaggaagctgctttgaagacttagcagaggaactggcatttgatccatatgaatcgtatgctcgagatattttgcgacctggttttcatgatcgtttccttagtcagttatcaaagcctggggcagcactttatttgcagtcaataggcgaaggtttcaaagaagctgttcaatatgttttacccaggctgcttctggcccctgtttaccactgtctccattactttgaacttttgaagcagttagaagaaaaaagtgaagatcaagaagacaaggaatgtttaaaacaagcaataacagctttgcttaatgttcagagtggtatggaaaaaatatgttctaaaagtcttgcaaaacgaagactgagtgaatctgcatgtcggttttatagtcagcaaatgaaggggaaacaactagcaatcaagaagatgaacgagattcagaagaatattgatggttgggagggaaaagacattggacagtgttgtaatgaatttataatggaaggaactcttacacgtgtaggagccaaacatgagagacacatatttctctttgatggcttaatgatttgctgtaaatcaaatcatgggcagccaagacttcctggtgctagcaatgcagaatatcgtcttaaagaaaagttttttatgcgaaaggtacaaattaatgataaagatgacaccaatgaatacaagcatgcttttgaaataattttaaaagatgaaaatagtgttatattttctgccaagtcagctgaagagaaaaacaattggatggcagcattgatatctttacagtaccggagtacactggaaaggatgcttgatgtaacaatgctacaggaagagaaagaggagcagatgaggctgcctagtgctgatgtttatagatttgcagagcctgactctgaagagaatattatatttgaagagaacatgcagcccaaggctggaattccaattatcaaagcaggaactgttattaaacttatagagaggcttacgtaccatatgtacgcagatcccaattttgttcggacatttcttacaacatacagatccttttgcaaacctcaagaactactgagtcttataatagaaaggtttgaaattccagagcctgagccaacagaagctgatcgcatagctatagagaatggagatcaacccttgagtgcagaactgaaaagatttagaaaagaatatatacagcctgtgcaactgcgagtattaaatgtatgtcggcactgggtagagcaccacttctatgattttgaaagagatgcatatcttttgcaacgaatggaagaatttattggaacagtaagaggtaaagcaatgaaaaaatgggttgaatccatcactaaaataatccaaaggaaaaaaattgcaagagacaatggaccaggtcataatattacatttcagagttcacctcccacagttgagtggcatataagcagacctgggcacatagagacttttgacctgctcaccttacacccaatagaaattgctcgacaactcactttacttgaatcagatctataccgagctgtacagccatcagaattagttggaagtgtgtggacaaaagaagacaaagaaattaactctcctaatcttctgaaaatgattcgacataccaccaacctcactctgtggtttgagaaatgtattgtagaaactgaaaatttagaagaaagagtagctgtggtgagtcgaattattgagattctacaagtctttcaagagttgaacaactttaatggtgtccttgaggttgtcagtgctatgaattcatcacctgtttacagactagaccacacatttgagcaaataccaagtcgccagaagaaaattttagaagaagctcatgaattgagtgaagatcactataagaaatatttggcaaaactcaggtctattaatccaccatgtgtgcctttctttggaatttatctcactaatatcttgaaaacagaagaaggcaaccctgaggtcctaaaaagacatggaaaagagcttataaactttagcaaaaggaggaaagtagcagaaataacaggagagatccagcagtaccaaaatcagccttactgtttacgagtagaatcagatatcaaaaggttctttgaaaacttgaatccgatgggaaatagcatggagaaggaatttacagattatcttttcaacaaatccctagaaatagaaccacgaaaccctaagcctctcccaagatttccaaaaaaatatagctatcccctaaaatctcctggtgttcgtccatcaaacccaagaccaggtaccatgaggcatcccacacctctgcagcaggagccaaggaaaattagttatagtaggatccctgaaagtgaaacagaaagtacagcatctgcaccaaattctccaagaacaccgttaacacctccgcctgcttctggtgcttccagtaccacagatgtttgcagtgtatttgattccgatcattcgagcccttttcactcaagcaatgataccgtctttatccaagttactctgccccatggcccaagatctgcttctgtatcatctataagtttaaccaaaggcactgatgaagtgcctgtccctcctcctgttcctccacgaagacgaccagaatctgccccagcagaatcttcaccatctaagattatgtctaagcatttggacagtcccccagccattcctcctaggcaacccacatcaaaagcctattcaccacgatattcaatatcagaccggacctctatctcagaccctcctgaaagccctcccttattaccaccacgagaacctgtgaggacacctgatgttttctcaagctcaccactacatctccaacctccccctttgggcaaaaaaagtgaccatggcaatgccttcttcccaaacagcccttccccctttacaccacctcctcctcaaacaccttctcctcacggcacaagaaggcatctgccatcaccaccattgacacaagaagtggaccttcattccattgctgggccgcctgttcctccacgacaaagcacttctcaacatatccctaaactccctccaaaaacttacaaaagggagcacacacacccatccatgcacagagatggaccaccactgttggagaatgcccattcttcctgagttcctctgtactgggatgtatattttcctagccccaaatccattgctggcaatggatgcactgaatgtgccagcactgaggagttaaaatgagaactccaaacactaacgactcttcttcaagatgcagtataagacaatgaattttaacctagatgtaattatacaatggaaatggtattccagtttagaatatggaaagaccgacctagaggaattggacaactgattgcacctgaaaatcataaagggactttttctggccaataggcaggagtcctctttttgtgaagtgatcttttgtgaagtgatcattaaagggatggaaaacacagtctagtgtccagcaggcccacatgacagtttttgtaattcaaattatgcacttttaaaaaaaaacaaacttaaacagggatcttaatatcttcctttgttttcctttgctttactcttctactttagaatattttcttaaaaatcactcaaaggactgtgaggaaaggctgtggtacctgaccttgttgaaatcaaggcccggcactgtactacaggcctgtttacagattattacggtgaactgaatgggtaccgaggcttcaccaaagaggtacttttttgttgttgttgttgttttaggaataattgtaccaattttaagagcattccccccacctgtccccacacacccaaacaaaatgtggtggtgttgccttcaaaaaagagaagttttgtgtcattaacatgacagaagaactttttaaaaaaaaataactgtcaactattctatttgcatttaggagactgttcatctatgctagattgtcattttccctccttctcccacagaagtttactggtagtccatgtcatggctcgtagctatccctctaaccataccatggaaatgcaggcacccaatgtgaaaaggagcacttgctgggcatcactgacaccgctcatgttttacacatagttgagtaatcagcatatctagaattatcttgcattgcctaaatcatatgtatatagtgaatgttatataatatacctggcaggtctgttttaatttaattgaataaagatacaaatactttgtttggctggcatatattaaattattatatgaagaaaatggttgattcttatttcttttagttgaaaaacacacaaaaacactaaacataaaagcacgttttgtggtacgccttggtttctagttctggatatatgtattaatcttaaagaatgatctaaagtcacagcttggcatataggaagatacttggttagaataggatgggtatcttttaagcagaactttgtaagtaagttttaagttcctaagcaacaagtatacagtttgttaaggtttatattgaacattctaccttgcttgaggttttctgctttatcaaaactattcataatagaacatctacctgcatcattactatcataatatggattattcataaagcgtatgtactgttcttctgagtctaacaaatactgtgactgaaatgcatgcaccttgttgaagagaaaacattttattaatctccactataatgtctgtgaaatgtgcagtattccatccttagagagttatctggttcatcagcatctgcatgtatcctctgaataatgaagcaacatttcagcaattctgttaaccacaccattagagacatttttagaagtgctgcaacatggtgggaacctagtactttaataatttcctatgatatttattagagcataaaatgtacatcacgatagtacagtatgtagtcctttaagaccagaaggtatgttaactgcaccatcattaagcagtctatcctgttttcttatttatttgttagaattgaatcctttctcaatatctgtaccattcctatgatggtagccattcttctctttataaaatatttcctctttgaaaagcgtcctaaaacattaatttcaaatcccctcttggatgcaaagtgtccctaagaccatccattcaacagtatttatgtgagccaacttactagagccgctacaacta

SEQ ID NO: 453974 - DNA, 4538 bp, Homo sapiens
gattccccaacaacgacctccggtccttccccttccccgcgagacctccgccccagctccgccccgcccggggctcttgcgtttcggagtcccaactacgcggagcgggcgccgcggccggagcgtccctccacacgtcctcccccagccgccagctccgccgcggggccagaccgggcccgggacgccgccgcccctctccccgcccagaggcgccccgggggcaccatgcaggcgcagcagctgccctacgagtttttcagcgaagagaacgcgcccaagtggcggggactactggtgcctgcgctgaaaaaggtccaggggcaagttcatcctactctcgagtctaatgatgatgctcttcagtatgttgaagaattaattttgcaattattaaatatgctatgccaagctcagccccgaagtgcttcagatgtagaggaacgtgttcaaaaaagtttccctcatccaattgataaatgggcaatagctgatgcccaatcagctattgaaaagaggaagcgaagaaaccctttatctctcccagtagaaaaaattcatcctttattaaaggaggtcctaggttataaaattgaccaccaggtttctgtttacatagtagcagtcttagaatacatttctgcagacattttaaagctggttgggaattatgtaagaaatatacggcattatgaaattacaaaacaagatattaaagtggcaatgtgtgctgacaaggtattgatggatatgtttcatcaagatgtagaagatattaatatattatctttaactgacgaagagccttccacctcaggagaacaaacttactatgatttggtaaaagcatttatggcagaaattcgacaatatataagggaactaaatctaattataaaagtttttagagagccctttgtctccaattcaaaattgttttcagctaatgatgtagaaaatatatttagtcgcatagtagatatacatgaacttagtgtaaagttactgggccatatagaagatacagtagaaatgacagatgaaggcagtccccatccactagtaggaagctgctttgaagacttagcagaggaactggcatttgatccatatgaatcgtatgctcgagatattttgcgacctggttttcatgatcgtttccttagtcagttatcaaagcctggggcagcactttatttgcagtcaataggcgaaggtttcaaagaagctgttcaatatgttttacccaggctgcttctggcccctgtttaccactgtctccattactttgaacttttgaagcagttagaagaaaaaagtgaagatcaagaagacaaggaatgtttaaaacaagcaataacagctttgcttaatgttcagagtggtatggaaaaaatatgttctaaaagtcttgcaaaacgaagactgagtgaatctgcatgtcggttttatagtcagcaaatgaaggggaaacaactagcaatcaagaagatgaacgagattcagaagaatattgatggttgggagggaaaagacattggacagtgttgtaatgaatttataatggaaggaactcttacacgtgtaggagccaaacatgagagacacatatttctctttgatggcttaatgatttgctgtaaatcaaatcatgggcagccaagacttcctggtgctagcaatgcagaatatcgtcttaaagaaaagttttttatgcgaaaggtacaaattaatgataaagatgacaccaatgaatacaagcatgcttttgaaataattttaaaagatgaaaatagtgttatattttctgccaagtcagctgaagagaaaaacaattggatggcagcattgatatctttacagtaccggagtacactggaaaggatgcttgatgtaacaatgctacaggaagagaaagaggagcagatgaggctgcctagtgctgatgtttatagatttgcagagcctgactctgaagagaatattatatttgaagagaacatgcagcccaaggctggaattccaattatcaaagcaggaactgttattaaacttatagagaggcttacgtaccatatgtacgcagatcccaattttgttcggacatttcttacaacatacagatccttttgcaaacctcaagaactactgagtcttataatagaaaggtttgaaattccagagcctgagccaacagaagctgatcgcatagctatagagaatggagatcaacccttgagtgcagaactgaaaagatttagaaaagaatatatacagcctgtgcaactgcgagtattaaatgtatgtcggcactgggtagagcaccacttctatgattttgaaagagatgcatatcttttgcaacgaatggaagaatttattggaacagtaagaggtaaagcaatgaaaaaatgggttgaatccatcactaaaataatccaaaggaaaaaaattgcaagagacaatggaccaggtcataatattacatttcagagttcacctcccacagttgagtggcatataagcagacctgggcacatagagacttttgacctgctcaccttacacccaatagaaattgctcgacaactcactttacttgaatcagatctataccgagctgtacagccatcagaattagttggaagtgtgtggacaaaagaagacaaagaaattaactctcctaatcttctgaaaatgattcgacataccaccaacctcactctgtggtttgagaaatgtattgtagaaactgaaaatttagaagaaagagtagctgtggtgagtcgaattattgagattctacaagtctttcaagagttgaacaactttaatggtgtccttgaggttgtcagtgctatgaattcatcacctgtttacagactagaccacacatttgagcaaataccaagtcgccagaagaaaattttagaagaagctcatgaattgagtgaagatcactataagaaatatttggcaaaactcaggtctattaatccaccatgtgtgcctttctttggaatttatctcactaatatcttgaaaacagaagaaggcaaccctgaggtcctaaaaagacatggaaaagagcttataaactttagcaaaaggaggaaagtagcagaaataacaggagagatccagcagtaccaaaatcagccttactgtttacgagtagaatcagatatcaaaaggttctttgaaaacttgaatccgatgggaaatagcatggagaaggaatttacagattatcttttcaacaaatccctagaaatagaaccacgaaaccctaagcctctcccaagatttccaaaaaaatatagctatcccctaaaatctcctggtgttcgtccatcaaacccaagaccaggtaccatgaggcatcccacacctctgcagcaggagccaaggaaaattagttatagtaggatccctgaaagtgaaacagaaagtacagcatctgcaccaaattctccaagaacaccgttaacacctccgcctgcttctggtgcttccagtaccacagatgtttgcagtgtatttgattccgatcattcgagcccttttcactcaagcaatgataccgtctttatccaagttactctgccccatggcccaagatctgcttctgtatcatctataagtttaaccaaaggcactgatgaagtgcctgtccctcctcctgttcctccacgaagacgaccagaatctgccccagcagaatcttcaccatctaagattatgtctaagcatttggacagtcccccagccattcctcctaggcaacccacatcaaaagcctattcaccacgatattcaatatcagaccggacctctatctcagaccctcctgaaagccctcccttattaccaccacgagaacctgtgaggacacctgatgttttctcaagctcaccactacatctccaacctccccctttgggcaaaaaaagtgaccatggcaatgccttcttcccaaacagcccttccccctttacaccacctcctcctcaaacaccttctcctcacggcacaagaaggcatctgccatcaccaccattgacacaagaagtggaccttcattccattgctgggccgcctgttcctccacgacaaagcacttctcaacatatccctaaactccctccaaaaacttacaaaagggagcacacacacccatccatgcacagagatggaccaccactgttggagaatgcccattcttcctgagttcctctgtactgggatgtatattttcctagccccaaatccattgctggcaatggatgcactgaatgtgccagcactgaggagttaaaatgagaactccaaacactaacgactcttcttcaagatgcagtataagacaatgaattttaacctagatgtaattatacaatggaaatggtattccagtttagaatatggaaagatcacttcacaagaagaggactcctcctattggccagaaaaagtccctttatgattttcaggtgcaatcagttgtccaattcctctaggtcggtctttcgtctagc

SEQ ID NO: 453975 - DNA, 6238 bp, Homo sapiens
gattccccaacaacgacctccggtccttccccttccccgcgagacctccgccccagctccgccccgcccggggctcttgcgtttcggagtcccaactacgcggagcgggcgccgcggccggagcgtccctccacacgtcctcccccagccgccagctccgccgcggggccagaccgggcccgggacgccgccgcccctctccccgcccagaggcgccccgggggcaccatgcaggcgcagcagctgccctacgagtttttcagcgaagagaacgcgcccaagtggcggggactactggtgcctgcgctgaaaaaggtccaggggcaagttcatcctactctcgagtctaatgatgatgctcttcagtatgttgaagaattaattttgcaattattaaatatgctatgccaagctcagccccgaagtgcttcagatgtagaggaacgtgttcaaaaaagtttccctcatccaattgataaatgggcaatagctgatgcccaatcagctattgaaaagaggaagcgaagaaaccctttatctctcccagtagaaaaaattcatcctttattaaaggaggtcctaggttataaaattgaccaccaggtttctgtttacatagtagcagtcttagaatacatttctgcagacattttaaagctggttgggaattatgtaagaaatatacggcattatgaaattacaaaacaagatattaaagtggcaatgtgtgctgacaaggtattgatggatatgtttcatcaagatgtagaagatattaatatattatctttaactgacgaagagccttccacctcaggagaacaaacttactatgatttggtaaaagcatttatggcagaaattcgacaatatataagggaactaaatctaattataaaagtttttagagagccctttgtctccaattcaaaattgttttcagctaatgatgtagaaaatatatttagtcgcatagtagatatacatgaacttagtgtaaagttactgggccatatagaagatacagtagaaatgacagatgaaggcagtccccatccactagtaggaagctgctttgaagacttagcagaggaactggcatttgatccatatgaatcgtatgctcgagatattttgcgacctggttttcatgatcgtttccttagtcagttatcaaagcctggggcagcactttatttgcagtcaataggcgaaggtttcaaagaagctgttcaatatgttttacccaggctgcttctggcccctgtttaccactgtctccattactttgaacttttgaagcagttagaagaaaaaagtgaagatcaagaagacaaggaatgtttaaaacaagcaataacagctttgcttaatgttcagagtggtatggaaaaaatatgttctaaaagtcttgcaaaacgaagactgagtgaatctgcatgtcggttttatagtcagcaaatgaaggggaaacaactagcaatcaagaagatgaacgagattcagaagaatattgatggttgggagggaaaagacattggacagtgttgtaatgaatttataatggaaggaactcttacacgtgtaggagccaaacatgagagacacatatttctctttgatggcttaatgatttgctgtaaatcaaatcatgggcagccaagacttcctggtgctagcaatgcagaatatcgtcttaaagaaaagttttttatgcgaaaggtacaaattaatgataaagatgacaccaatgaatacaagcatgcttttgaaataattttaaaagatgaaaatagtgttatattttctgccaagtcagctgaagagaaaaacaattggatggcagcattgatatctttacagtaccggagtacactggaaaggatgcttgatgtaacaatgctacaggaagagaaagaggagcagatgaggctgcctagtgctgatgtttatagatttgcagagcctgactctgaagagaatattatatttgaagagaacatgcagcccaaggctggaattccaattatcaaagcaggaactgttattaaacttatagagaggcttacgtaccatatgtacgcagatcccaattttgttcggacatttcttacaacatacagatccttttgcaaacctcaagaactactgagtcttataatagaaaggtttgaaattccagagcctgagccaacagaagctgatcgcatagctatagagaatggagatcaacccttgagtgcagaactgaaaagatttagaaaagaatatatacagcctgtgcaactgcgagtattaaatgtatgtcggcactgggtagagcaccacttctatgattttgaaagagatgcatatcttttgcaacgaatggaagaatttattggaacagtaagaggtaaagcaatgaaaaaatgggttgaatccatcactaaaataatccaaaggaaaaaaattgcaagagacaatggaccaggtcataatattacatttcagagttcacctcccacagttgagtggcatataagcagacctgggcacatagagacttttgacctgctcaccttacacccaatagaaattgctcgacaactcactttacttgaatcagatctataccgagctgtacagccatcagaattagttggaagtgtgtggacaaaagaagacaaagaaattaactctcctaatcttctgaaaatgattcgacataccaccaacctcactctgtggtttgagaaatgtattgtagaaactgaaaatttagaagaaagagtagctgtggtgagtcgaattattgagattctacaagtctttcaagagttgaacaactttaatggtgtccttgaggttgtcagtgctatgaattcatcacctgtttacagactagaccacacatttgagcaaataccaagtcgccagaagaaaattttagaagaagctcatgaattgagtgaagatcactataagaaatatttggcaaaactcaggtctattaatccaccatgtgtgcctttctttggaatttatctcactaatatcttgaaaacagaagaaggcaaccctgaggtcctaaaaagacatggaaaagagcttataaactttagcaaaaggaggaaagtagcagaaataacaggagagatccagcagtaccaaaatcagccttactgtttacgagtagaatcagatatcaaaaggttctttgaaaacttgaatccgatgggaaatagcatggagaaggaatttacagattatcttttcaacaaatccctagaaatagaaccacgaaaccctaagcctctcccaagatttccaaaaaaatatagctatcccctaaaatctcctggtgttcgtccatcaaacccaagaccaggtaccatgaggcatcccacacctctgcagcaggagccaaggaaaattagttatagtaggatccctgaaagtgaaacagaaagtacagcatctgcaccaaattctccaagaacaccgttaacacctccgcctgcttctggtgcttccagtaccacagatgtttgcagtgtatttgattccgatcattcgagcccttttcactcaagatctgcttctgtatcatctataagtttaaccaaaggcactgatgaagtgcctgtccctcctcctgttcctccacgaagacgaccagaatctgccccagcagaatcttcaccatctaagattatgtctaagcatttggacagtcccccagccattcctcctaggcaacccacatcaaaagcctattcaccacgatattcaatatcagaccggacctctatctcagaccctcctgaaagccctcccttattaccaccacgagaacctgtgaggacacctgatgttttctcaagctcaccactacatctccaacctccccctttgggcaaaaaaagtgaccatggcaatgccttcttcccaaacagcccttccccctttacaccacctcctcctcaaacaccttctcctcacggcacaagaaggcatctgccatcaccaccattgacacaagaagtggaccttcattccattgctgggccgcctgttcctccacgacaaagcacttctcaacatatccctaaactccctccaaaaacttacaaaagggagcacacacacccatccatgcacagagatggaccaccactgttggagaatgcccattcttcctgagttcctctgtactgggatgtatattttcctagccccaaatccattgctggcaatggatgcactgaatgtgccagcactgaggagttaaaatgagaactccaaacactaacgactcttcttcaagatgcagtataagacaatgaattttaacctagatgtaattatacaatggaaatggtattccagtttagaatatggaaagaccgacctagaggaattggacaactgattgcacctgaaaatcataaagggactttttctggccaataggcaggagtcctctttttgtgaagtgatcttttgtgaagtgatcattaaagggatggaaaacacagtctagtgtccagcaggcccacatgacagtttttgtaattcaaattatgcacttttaaaaaaaaacaaacttaaacagggatcttaatatcttcctttgttttcctttgctttactcttctactttagaatattttcttaaaaatcactcaaaggactgtgaggaaaggctgtggtacctgaccttgttgaaatcaaggcccggcactgtactacaggcctgtttacagattattacggtgaactgaatgggtaccgaggcttcaccaaagaggtacttttttgttgttgttgttgttttaggaataattgtaccaattttaagagcattccccccacctgtccccacacacccaaacaaaatgtggtggtgttgccttcaaaaaagagaagttttgtgtcattaacatgacagaagaactttttaaaaaaaaataactgtcaactattctatttgcatttaggagactgttcatctatgctagattgtcattttccctccttctcccacagaagtttactggtagtccatgtcatggctcgtagctatccctctaaccataccatggaaatgcaggcacccaatgtgaaaaggagcacttgctgggcatcactgacaccgctcatgttttacacatagttgagtaatcagcatatctagaattatcttgcattgcctaaatcatatgtatatagtgaatgttatataatatacctggcaggtctgttttaatttaattgaataaagatacaaatactttgtttggctggcatatattaaattattatatgaagaaaatggttgattcttatttcttttagttgaaaaacacacaaaaacactaaacataaaagcacgttttgtggtacgccttggtttctagttctggatatatgtattaatcttaaagaatgatctaaagtcacagcttggcatataggaagatacttggttagaataggatgggtatcttttaagcagaactttgtaagtaagttttaagttcctaagcaacaagtatacagtttgttaaggtttatattgaacattctaccttgcttgaggttttctgctttatcaaaactattcataatagaacatctacctgcatcattactatcataatatggattattcataaagcgtatgtactgttcttctgagtctaacaaatactgtgactgaaatgcatgcaccttgttgaagagaaaacattttattaatctccactataatgtctgtgaaatgtgcagtattccatccttagagagttatctggttcatcagcatctgcatgtatcctctgaataatgaagcaacatttcagcaattctgttaaccacaccattagagacatttttagaagtgctgcaacatggtgggaacctagtactttaataatttcctatgatatttattagagcataaaatgtacatcacgatagtacagtatgtagtcctttaagaccagaaggtatgttaactgcaccatcattaagcagtctatcctgttttcttatttatttgttagaattgaatcctttctcaatatctgtaccattcctatgatggtagccattcttctctttataaaatatttcctctttgaaaagcgtcctaaaacattaatttcaaatcccctcttggatgcaaagtgtccctaagaccatccattcaacagtatttatgtgagccaacttactagagccgctacaacta

SEQ ID NO: 453976 - DNA, 4620 bp, Homo sapiens
tctatagaaaaatgcttgtttctatcaagaatgactcctttataaactggggagtatctttaagagtggtttcaaccctgactgtatagtatcatctgttgaggagcttaaaaaaaatatgtaggcccagcccacactagactggcattggtacctggtatcagtattttttaaaaacttcccataggattctaatgtacagccaagattgaggaccatttgtctgtcatctgggattatgcttaataaattaatactgttttttaaattaattagatttcacttctaagtcattatcagtaaatttactcagtatctaactgacaagaatttctagcatatatttcttgattagtgcatgtaaaattctaaaagaatttctatagtattttccaggcaataagacaactagtgccccaaatttaccaaatgcatgagtctaagcctgtgctatatataaatatactcaaagccaagtttacatctgtgtacacaagtgtgcatgcatatgtacaattaaagactatagttgtaacagtcatgagcttgtgttttgattttactcctattcctgtattgtattaagtgtactatcatgttcttgaggcatatctccaggagatatgtttatttcttttccaggaaaagtgggacatatataagtagggtaaacgctagagctagatactcctttaatctctattacgtcagatctctggctcccttttacaaccaggcaatcttcaattataggtggctaatagggaagaaaatcatcggcagagcaacagcttcatgtaatttcagagtagaaaaatgaattttaatcttctgaaaggtaatattagaattagctggattgctacacttaggaatcataggttccaaataaatatcagtacatacggaaatcagataatgggacagattatttgaaattagggctgcctagaaatctggaatgtgagatcaccctccttctgaccaaatatgcttgaataaacttaatattccaaattatgtgagggattgcctattgtgcaaaaaaaaaaaaacgaaatctgaatttaaaaaaaattaccacagtctagtattattttagtctcttggatgttataacgttatctgttccatctgttgttaatatgagacactgtacaaacaaacaactatattgatttagaatcagtatagatcacctagctttttgtctcaattttcctactttaatgctcttggggctttcgcttttgattttcagttttttccttaaaataattaatattgttgaaattagactttctaaatttaaatttatcagaatttcctatgtaaaatgagtctaggcaccaaatgtttaatgactttaaaaaaaatgtttatgactataaaaggaaaaaccctgtatcaatttcaagcttgttttatatccaaagtgctagttattttgtgatgagaatatatgccccaagaacatttttgaaagacatataattagtaacttttttatttttcaacttacataaaataaacttattacttgtttcacaagtttgagttttcaaaataatatttactaaatggcatatttatgtacatccagctgaactttttgcttgaattgggtttctacattttaaaaagtctttcagtaatatacgatttttttatgaatgtttttcatttaataattatgaaatcaagtaaagctaaaaggaatcttaaattcccaatatgatatcatttttttcttctcaaaagtaagtagtaatgaggttttactataaactgttacagcattctttaaaacgacaatgacaataacattttcatcataatacaaatttttgcagatgagttgaatatatcaatgaaagaaaaaaatctactttttcttgtttcctttcacaggcaatgataccgtctttatccaagttactctgccccatggcccaagatctgcttctgtatcatctataagtttaaccaaaggcactgatgaagtgcctgtccctcctcctgttcctccacgaagacgaccagaatctgccccagcagaatcttcaccatctaagattatgtctaagcatttggacagtcccccagccattcctcctaggcaacccacatcaaaagcctattcaccacgatattcaatatcagaccggacctctatctcagaccctcctgaaagccctcccttattaccaccacgagaacctgtgaggacacctgatgttttctcaagctcaccactacatctccaacctccccctttgggcaaaaaaagtgaccatggcaatgccttcttcccaaacagcccttccccctttacaccacctcctcctcaaacaccttctcctcacggcacaagaaggcatctgccatcaccaccattgacacaagaagtggaccttcattccattgctgggccgcctgttcctccacgacaaagcacttctcaacatatccctaaactccctccaaaaacttacaaaagggagcacacacacccatccatgcacagagatggaccaccactgttggagaatgcccattcttcctgagttcctctgtactgggatgtatattttcctagccccaaatccattgctggcaatggatgcactgaatgtgccagcactgaggagttaaaatgagaactccaaacactaacgactcttcttcaagatgcagtataagacaatgaattttaacctagatgtaattatacaatggaaatggtattccagtttagaatatggaaagaccgacctagaggaattggacaactgattgcacctgaaaatcataaagggactttttctggccaataggcaggagtcctctttttgtgaagtgatcttttgtgaagtgatcattaaagggatggaaaacacagtctagtgtccagcaggcccacatgacagtttttgtaattcaaattatgcacttttaaaaaaaaacaaacttaaacagggatcttaatatcttcctttgttttcctttgctttactcttctactttagaatattttcttaaaaatcactcaaaggactgtgaggaaaggctgtggtacctgaccttgttgaaatcaaggcccggcactgtactacaggcctgtttacagattattacggtgaactgaatgggtaccgaggcttcaccaaagaggtacttttttgttgttgttgttgttttaggaataattgtaccaattttaagagcattccccccacctgtccccacacacccaaacaaaatgtggtggtgttgccttcaaaaaagagaagttttgtgtcattaacatgacagaagaactttttaaaaaaaaataactgtcaactattctatttgcatttaggagactgttcatctatgctagattgtcattttccctccttctcccacagaagtttactggtagtccatgtcatggctcgtagctatccctctaaccataccatggaaatgcaggcacccaatgtgaaaaggagcacttgctgggcatcactgacaccgctcatgttttacacatagttgagtaatcagcatatctagaattatcttgcattgcctaaatcatatgtatatagtgaatgttatataatatacctggcaggtctgttttaatttaattgaataaagatacaaatactttgtttggctggcatatattaaattattatatgaagaaaatggttgattcttatttcttttagttgaaaaacacacaaaaacactaaacataaaagcacgttttgtggtacgccttggtttctagttctggatatatgtattaatcttaaagaatgatctaaagtcacagcttggcatataggaagatacttggttagaataggatgggtatcttttaagcagaactttgtaagtaagttttaagttcctaagcaacaagtatacagtttgttaaggtttatattgaacattctaccttgcttgaggttttctgctttatcaaaactattcataatagaacatctacctgcatcattactatcataatatggattattcataaagcgtatgtactgttcttctgagtctaacaaatactgtgactgaaatgcatgcaccttgttgaagagaaaacattttattaatctccactataatgtctgtgaaatgtgcagtattccatccttagagagttatctggttcatcagcatctgcatgtatcctctgaataatgaagcaacatttcagcaattctgttaaccacaccattagagacatttttagaagtgctgcaacatggtgggaacctagtactttaataatttcctatgatatttattagagcataaaatgtacatcacgatagtacagtatgtagtcctttaagaccagaaggtatgttaactgcaccatcattaagcagtctatcctgttttcttatttatttgttagaattgaatcctttctcaatatctgtaccattcctatgatggtagccattcttctctttataaaatatttcctctttgaaaagcgtcctaaaacattaatttcaaatcccctcttggatgcaaagtgtccctaagaccatccattcaacagtatttatgtgagccaacttactagagccgctacaacta

SEQ ID NO: 453977 - DNA, 3143 bp, Homo sapiens
cgagctcggtaccctcataggttcgcaggtacgagtagaatcagatatcaaaaggttctttgaaaacttgaatccgatgggaaatagcatggagaaggaatttacagattatcttttcaacaaatccctagaaatagaaccacgaaaccctaagcctctcccaagatttccaaaaaaatatagctatcccctaaaatctcctggtgttcgtccatcaaacccaagaccaggtaccatgaggcatcccacacctctgcagcaggagccaaggaaaattagttatagtaggatccctgaaagtgaaacagaaagtacagcatctgcaccaaattctccaagaacaccgttaacacctccgcctgcttctggtgcttccagtaccacagatgtttgcagtgtatttgattccgatcattcgagcccttttcactcaagcaatgataccgtctttatccaagttactctgccccatggcccaagatctgcttctgtatcatctataagtttaaccaaaggcactgatgaagtgcctgtccctcctcctgttcctccacgaagacgaccagaatctgccccagcagaatcttcaccatctaagattatgtctaagcatttggacagtcccccagccattcctcctaggcaacccacatcaaaagcctattcaccacgatattcaatatcagaccggacctctatctcagaccctcctgaaagccctcccttattaccaccacgagaacctgtgaggacacctgatgttttctcaagctcaccactacatctccaacctccccctttgggcaaaaaaagtgaccatggcaatgccttcttcccaaacagcccttccccctttacaccacctcctcctcaaacaccttctcctcacggcacaagaaggcatctgccatcaccaccattgacacaagaagtggaccttcattccattgctgggccgcctgttcctccacgacaaagcacttctcaacatatccctaaactccctccaaaaacttacaaaagggagcacacacacccatccatgcacagagatggaccaccactgttggagaatgcccattcttcctgagttcctctgtactgggatgtatattttcctagccccaaatccattgctggcaatggatgcactgaatgtgccagcactgaggagttaaaatgagaactccaaacactaacgactcttcttcaagatgcagtataagacaatgaattttaacctagatgtaattatacaatggaaatggtattccagtttagaatatggaaagaccgacctagaggaattggacaactgattgcacctgaaaatcataaagggactttttctggccaataggcaggagtcctctttttgtgaagtgatcttttgtgaagtgatcattaaagggatggaaaacacagtctagtgtccagcaggcccacatgacagtttttgtaattcaaattatgcacttttaaaaaaaaacaaacttaaacagggatcttaatatcttcctttgttttcctttgctttactcttctactttagaatattttcttaaaaatcactcaaaggactgtgaggaaaggctgtggtacctgaccttgttgaaatcaaggcccggcactgtactacaggcctgtttacagattattacggtgaactgaatgggtaccgaggcttcaccaaagaggtacttttttgttgttgttgttgttttaggaataattgtaccaattttaagagcattccccccacctgtccccacacacccaaacaaaatgtggtggtgttgccttcaaaaaagagaagttttgtgtcattaacatgacagaagaactttttaaaaaaaaataactgtcaactattctatttgcatttaggagactgttcatctatgctagattgtcattttccctccttctcccacagaagtttactggtagtccatgtcatggctcgtagctatccctctaaccataccatggaaatgcaggcacccaatgtgaaaaggagcacttgctgggcatcactgacaccgctcatgttttacacatagttgagtaatcagcatatctagaattatcttgcattgcctaaatcatatgtatatagtgaatgttatataatatacctggcaggtctgttttaatttaattgaataaagatacaaatactttgtttggctggcatatattaaattattatatgaagaaaatggttgattcttatttcttttagttgaaaaacacacaaaaacactaaacataaaagcacgttttgtggtacgccttggtttctagttctggatatatgtattaatcttaaagaatgatctaaagtcacagcttggcatataggaagatacttggttagaataggatgggtatcttttaagcagaactttgtaagtaagttttaagttcctaagcaacaagtatacagtttgttaaggtttatattgaacattctaccttgcttgaggttttctgctttatcaaaactattcataatagaacatctacctgcatcattactatcataatatggattattcataaagcgtatgtactgttcttctgagtctaacaaatactgtgactgaaatgcatgcaccttgttgaagagaaaacattttattaatctccactataatgtctgtgaaatgtgcagtattccatccttagagagttatctggttcatcagcatctgcatgtatcctctgaataatgaagcaacatttcagcaattctgttaaccacaccattagagacatttttagaagtgctgcaacatggtgggaacctagtactttaataatttcctatgatatttattagagcataaaatgtacatcacgatagtacagtatgtagtcctttaagaccagaaggtatgttaactgcaccatcattaagcagtctatcctgttttcttatttatttgttagaattgaatcctttctcaatatctgtaccattcctatgatggtagccattcttctctttataaaatatttcctctttgaaaagcgtcctaaaacattaatttcaaatcccctcttggatgcaaagtgtccctaagaccatccattcaacagtatttatgtgagccaacttactagagccgctacaacta

SEQ ID NO: 453978 - DNA, 2727 bp, Homo sapiens
tctatagaaaaatgcttgtttctatcaagaatgactcctttataaactggggagtatctttaagagtggtttcaaccctgactgtatagtatcatctgttgaggagcttaaaaaaaatatgtaggcccagcccacactagactggcattggtacctggtatcagtattttttaaaaacttcccataggattctaatgtacagccaagattgaggaccatttgtctgtcatctgggattatgcttaataaattaatactgttttttaaattaattagatttcacttctaagtcattatcagtaaatttactcagtatctaactgacaagaatttctagcatatatttcttgattagtgcatgtaaaattctaaaagaatttctatagtattttccaggcaataagacaactagtgccccaaatttaccaaatgcatgagtctaagcctgtgctatatataaatatactcaaagccaagtttacatctgtgtacacaagtgtgcatgcatatgtacaattaaagactatagttgtaacagtcatgagcttgtgttttgattttactcctattcctgtattgtattaagtgtactatcatgttcttgaggcatatctccaggagatatgtttatttcttttccaggaaaagtgggacatatataagtagggtaaacgctagagctagatactcctttaatctctattacgtcagatctctggctcccttttacaaccaggcaatcttcaattataggtggctaatagggaagaaaatcatcggcagagcaacagcttcatgtaatttcagagtagaaaaatgaattttaatcttctgaaaggtaatattagaattagctggattgctacacttaggaatcataggttccaaataaatatcagtacatacggaaatcagataatgggacagattatttgaaattagggctgcctagaaatctggaatgtgagatcaccctccttctgaccaaatatgcttgaataaacttaatattccaaattatgtgagggattgcctattgtgcaaaaaaaaaaaaacgaaatctgaatttaaaaaaaattaccacagtctagtattattttagtctcttggatgttataacgttatctgttccatctgttgttaatatgagacactgtacaaacaaacaactatattgatttagaatcagtatagatcacctagctttttgtctcaattttcctactttaatgctcttggggctttcgcttttgattttcagttttttccttaaaataattaatattgttgaaattagactttctaaatttaaatttatcagaatttcctatgtaaaatgagtctaggcaccaaatgtttaatgactttaaaaaaaatgtttatgactataaaaggaaaaaccctgtatcaatttcaagcttgttttatatccaaagtgctagttattttgtgatgagaatatatgccccaagaacatttttgaaagacatataattagtaacttttttatttttcaacttacataaaataaacttattacttgtttcacaagtttgagttttcaaaataatatttactaaatggcatatttatgtacatccagctgaactttttgcttgaattgggtttctacattttaaaaagtctttcagtaatatacgatttttttatgaatgtttttcatttaataattatgaaatcaagtaaagctaaaaggaatcttaaattcccaatatgatatcatttttttcttctcaaaagtaagtagtaatgaggttttactataaactgttacagcattctttaaaacgacaatgacaataacattttcatcataatacaaatttttgcagatgagttgaatatatcaatgaaagaaaaaaatctactttttcttgtttcctttcacaggcaatgataccgtctttatccaagttactctgccccatggcccaagttagtatatttggtttaagactcataattcttgctttggctttaaaaatcaaaccaagtgtaacctttcctgctaaaactcttcttgggtctggcagcattggtaccttgcttgcaacatcctagaagtgaggccttcacttgtgctatctttagatcataagtgatttgcttaaatttatatatttctcatgctttttataaaaccttgtttctctcttaaaagaacatattaaataagtggcttccacatttaaccatttcttttttccaactatagagttctaagtatattttaatgctcaactttgaaaaaaaaaaaaaggcaagagcatgcatgcgcatatgggaatgctggcagctacatgcagtttctaaatcacaaaatatacttagcctgatggcaggatagattatagacaactgcttttgactttagaagaactttcttataattgtaattattcaaagtatagcctaaatactgataaacaaaataaagttccattttaattttaaggtaaactaacaagtcactaaattccattattttaattatttaagctaatatttttttgctgtcctttcatacaatttcaaaatatgtacaatggaaaatactagttacaagctgaattaactatattcttaagaaaaaaggtaggtgatcaaaatgttgatcatttaaataatatcagtacacaaagtactctttttaagttctatattttataacatatgacaaaataaaaagcttaatgcttaaaggga

SEQ ID NO: 453979 - DNA, 2473 bp, Homo sapiens
gattccccaacaacgacctccggtccttccccttccccgcgagacctccgccccagctccgccccgcccggggctcttgcgtttcggagtcccaactacgcggagcgggcgccgcggccggagcgtccctccacacgtcctcccccagccgccagctccgccgcggggccagaccgggcccgggacgccgccgcccctctccccgcccagaggcgccccgggggcaccatgcaggcgcagcagctgccctacgagtttttcagcgaagagaacgcgcccaagtggcggggactactggtgcctgcgctgaaaaaggtccaggggcaagttcatcctactctcgagtctaatgatgatgctcttcagtatgttgaagaattaattttgcaattattaaatatgctatgccaagctcagccccgaagtgcttcagatgtagaggaacgtgttcaaaaaagtttccctcatccaattgataaatgggcaatagctgatgcccaatcagctattgaaaagaggaagcgaagaaaccctttatctctcccagtagaaaaaattcatcctttattaaaggaggtcctaggttataaaattgaccaccaggtttctgtttacatagtagcagtcttagaatacatttctgcagacattttaaagctggttgggaattatgtaagaaatatacggcattatgaaattacaaaacaagatattaaagtggcaatgtgtgctgacaaggtattgatggatatgtttcatcaagatgtagaagatattaatatattatctttaactgacgaagagccttccacctcaggagaacaaacttactatgatttggtaaaagcatttatggcagaaattcgacaatatataagggaactaaatctaattataaaagtttttagagagccctttgtctccaattcaaaattgttttcagctaatgatgtagaaaatatatttagtcgcatagtagatatacatgaacttagtgtaaagttactgggccatatagaagatacagtagaaatgacagatgaaggcagtccccatccactagtaggaagctgctttgaagacttagcagaggaactggcatttgatccatatgaatcgtatgctcgagatattttgcgacctggttttcatgatcgtttccttagtcagttatcaaagcctggggcagcactttatttgcagtcaataggcgaaggtttcaaagaagctgttcaatatgttttacccaggctgcttctggcccctgtttaccactgtctccattactttgaacttttgaagcagttagaagaaaaaagtgaagatcaagaagacaaggaatgtttaaaacaagcaataacagctttgcttaatgttcagagtggtatggaaaaaatatgttctaaaagtcttgcaaaacgaagactgagtgaatctgcatgtcggttttatagtcagcaaatgaaggggaaacaactagcaatcaagaagatgaacgagattcagaagaatattgatggttgggagggaaaagacattggacagtgttgtaatgaatttataatggaaggaactcttacacgtgtaggagccaaacatgagagacacatatttctctttgatggcttaatgatttgctgtaaatcaaatcatgggcagccaagacttcctggtgctagcaatgcagaatatcgtcttaaagaaaagttttttatgcgaaaggtacaaattaatgataaagatgacaccaatgaatacaagcatgcttttgaaataattttaaaagatgaaaatagtgttatattttctgccaagtcagctgaagagaaaaacaattggatggcagcattgatatctttacagtaccggagtacactggaaaggatgcttgatgtaacaatgctacaggaagagaaagaggagcagatgaggctgcctagtgctgatgtttatagatttgcagagcctgactctgaagagaatattatatttgaagagaacatgcagcccaaggctggaattccaattatcaaagcaggaactgttattaaacttatagagaggcttacgtaccatatgtacgcaggtaagaattatgcagttgcctgtcacttttgttttcctgcttcaaactgattttctttcctgcatgggtttattgtgcctaaaatagaaaagaaactaacaaccaaagacctcttttctttgactaaaaataccccactttatatttctttggaatgttttactttttctactacacttaaatacttttttttaaccttaccatcagttatagatgagaaaatgaggtcacttggctaaatttatccagttagaaagtgacagaaacaagactaaagttagtagtaaatcatcattattggcatctaaaaagttttttactcctttatcttttttttctttcttctttttccatttctgagattataaataaaaattttaatataac

SEQ ID NO: 453980 - DNA, 1187 bp, Homo sapiens
gattccccaacaacgacctccggtccttccccttccccgcgagacctccgccccagctccgccccgcccggggctcttgcgtttcggagtcccaactacgcggagcgggcgccgcggccggagcgtccctccacacgtcctcccccagccgccagctccgccgcggggccagaccgggcccgggacgccgccgcccctctccccgcccagaggcgccccgggggcaccatgcaggcgcagcagctgccctacgagtttttcagcgaagagaacgcgcccaagtggcggggactactggtgcctgcgctgaaaaaggtccaggggcaagttcatcctactctcgagtctaatgatgatgctcttcagtatgttgaagaattaattttgcaattattaaatatgctatgccaagctcagccccgaagtgcttcagatgtagaggaacgtgttcaaaaaagtttccctcatccaattgataaatgggcaatagctgatgcccaatcagctattgaaaagaggaagcgaagaaaccctttatctctcccagtagaaaaaattcatcctttattaaaggaggtcctaggttataaaattgaccaccaggtttctgtttacatagtagcagtcttagaatacatttctgcagacattttaaagctggttgggaattatgtaagaaatatacggcattatgaaattacaaaacaagatattaaagtggcaatgtgtgctgacaaggtattgatggatatgtttcatcaagatgtagaagatattaatatattatctttaactgacgaagagccttccacctcaggagaacaaacttactatgatttggtaaaagcatttatggcagaaattcgacaatatataagggaactaaatctaattataaaagtttttagagagccctttgtctccaattcaaaattgttttcagctaatgtaagtatcattgtatatatgcctctcattgaatgtgttgtgaaatttgcatgaccacttcaaatttgaagttgtacagttcatcattactaatttgttaatttttttaagttgtgggacttaattcatgatcacaaagttttacaacagtttcaagagatttaacattagaaattaagagacaaaatacaaagtagactgattatgtaagtgaaaatgaattcacagaattctccatg

SEQ ID NO: 453981 - DNA, 800 bp, Homo sapiens
ctttgaaataatgtgtcacaacagattgtatgcagaaatagatatgaaaatcctgctgtcttctagtacgctatgttagagatttgcaaatgtaaaacattgccattcttctactaaatgttttttgttatggcttaaaaaaaatttggttactttttataaaagtgctatttatgttaaacacataatgggtttattatttttaatgaattaaatattttttgaaatttttggttttaacttctaatatggtaaacattgaaatacatagttataaacaaaaggtttttagaatcttcaataatttttaagagtgtgaaggagtcctgagaccagaaagttacaagaccactgacctagagaaatgtatttgcaaattgtacacctttgcagaaggaattcttgaattgtcctttattcatatttctaagtcattaaaatttttcactgtgtctgacatgttaaattttgtgattataaaatgacttattggctcaaaatttgtttaatattataataatacagcctcactgaattaatgtgttttcccccaaacaggatgtagaaaatatatttagtcgcatagtagatatacatgaacttagtgtaaagttactgggccatatagaagatacagtagaaatgacagatgaaggcagtccccatccactagtaggaagctgctttgaagacttagcagaggtaagtacttcaattatatacccgaaaagtctgcataaaagcctacatttacattaaaattgagagtcttacttctttccagctaaagtcatagatac

SEQ ID NO: 453982 - DNA, 338 bp, Homo sapiens
agacctgggcacatagagacttttgacctgctcaccttacacccaatagaaattgctcgacaactcactttacttgaatcagatctataccggtatgtaatttaacattcaagttgaaaagtcatttcaaaagagttaacttttaaaatgaaatactgatttctgccttatagggttttcataagacttaactgaaatattacatgaagtgtctagtaataaggccaggcaggcagttcctgttcttttactcccctggtccctctagctgaatttacaccttctgtctttctgtgttcacccctagttggtaaggctaggttcaaatcctggcttta

SEQ ID NO: 453983 - DNA, 696 bp, Homo sapiens
taagtgaagagcactatttaatatattttttgcttagttgttattttcctattttccaaggaacgtgttcaaaaaagtttccctcatccaattgataaatgggcaatagctgatgcccaatcagctattgaaaagaggaagcgaagaaaccctttatctctcccagtagaaaaaattcatcctttattaaaggtaatgctgaactactgccttcttgccttttaagggaaaaataaaacccaccatttttatacaataagaatatattttatggataattgagtcaacttaagagtaaaattctctcattctaagttttccagagatttatgtggtgagaagggatgctatgataataagaaaatataaactgggcaacatgatttaaagtaatttcatatcaatagtaataagcaagttgagaggactaagaaagttattgtggattttgtttatctcagatgtaattaggaccacaaagagaatttataaaactcctcctttcttgttggttagacctaagtgttcctataaatccttttgatgttagtactttgtgtagagacctctgtgaaaaggctacaaggctatgtgtaatcttggaacaaaaagataacctaaactctccagtcctacttatcatgtaaataagtcagtcagtcagttgaatctctatagaactaatagaataactgc

SEQ ID NO: 453984 - DNA, 113 bp, Homo sapiens
tgtgtggacaaaagaagacaaagaaattaactctcctaatcttctgaaaatgattcgacataccaccaacctcactctgtggtttgagaagtaagtattcctagcattcttat

SEQ ID NO: 453985 - DNA, 5405 bp, Homo sapiens
attggctcaaaatttgtttaatattataataatacagcctcactgaattaatgtgttttcccccaaacaggatgtagaaaatatatttagtcgcatagtagatatacatgaacttagtgtaaagttactgggccatatagaagatacagtagaaatgacagatgaaggcagtccccatccactagtaggaagctgctttgaagacttagcagaggaactggcatttgatccatatgaatcgtatgctcgagatattttgcgacctggttttcatgatcgtttccttagtcagttatcaaagcctggggcagcactttatttgcagtcaataggcgaaggtttcaaagaagctgttcaatatgttttacccaggctgcttctggcccctgtttaccactgtctccattactttgaacttttgaagcagttagaagaaaaaagtgaagatcaagaagacaaggaatgtttaaaacaagcaataacagctttgcttaatgttcagagtggtatggaaaaaatatgttctaaaagtcttgcaaaacgaagactgagtgaatctgcatgtcggttttatagtcagcaaatgaaggggaaacaactagcaatcaagaagatgaacgagattcagaagaatattgatggttgggagggaaaagacattggacagtgttgtaatgaatttataatggaaggaactcttacacgtgtaggagccaaacatgagagacacatatttctctttgatggcttaatgatttgctgtaaatcaaatcatgggcagccaagacttcctggtgctagcaatgcagaatatcgtcttaaagaaaagttttttatgcgaaaggtacaaattaatgataaagatgacaccaatgaatacaagcatgcttttgaaataattttaaaagatgaaaatagtgttatattttctgccaagtcagctgaagagaaaaacaattggatggcagcattgatatctttacagtaccggagtacactggaaaggatgcttgatgtaacaatgctacaggaagagaaagaggagcagatgaggctgcctagtgctgatgtttatagatttgcagagcctgactctgaagagaatattatatttgaagagaacatgcagcccaaggctggaattccaattatcaaagcaggaactgttattaaacttatagagaggcttacgtaccatatgtacgcagatcccaattttgttcggacatttcttacaacatacagatccttttgcaaacctcaagaactactgagtcttataatagaaaggtttgaaattccagagcctgagccaacagaagctgatcgcatagctatagagaatggagatcaacccttgagtgcagaactgaaaagatttagaaaagaatatatacagcctgtgcaactgcgagtattaaatgtatgtcggcactgggtagagcaccacttctatgattttgaaagagatgcatatcttttgcaacgaatggaagaatttattggaacagtaagaggtaaagcaatgaaaaaatgggttgaatccatcactaaaataatccaaaggaaaaaaattgcaagagacaatggaccaggtcataatattacatttcagagttcacctcccacagttgagtggcatataagcagacctgggcacatagagacttttgacctgctcaccttacacccaatagaaattgctcgacaactcactttacttgaatcagatctataccgagctgtacagccatcagaattagttggaagtgtgtggacaaaagaagacaaagaaattaactctcctaatcttctgaaaatgattcgacataccaccaacctcactctgtggtttgagaaatgtattgtagaaactgaaaatttagaagaaagagtagctgtggtgagtcgaattattgagattctacaagtctttcaagagttgaacaactttaatggtgtccttgaggttgtcagtgctatgaattcatcacctgtttacagactagaccacacatttgagcaaataccaagtcgccagaagaaaattttagaagaagctcatgaattgagtgaagatcactataagaaatatttggcaaaactcaggtctattaatccaccatgtgtgcctttctttggaatttatctcactaatatcttgaaaacagaagaaggcaaccctgaggtcctaaaaagacatggaaaagagcttataaactttagcaaaaggaggaaagtagcagaaataacaggagagatccagcagtaccaaaatcagccttactgtttacgagtagaatcagatatcaaaaggttctttgaaaacttgaatccgatgggaaatagcatggagaaggaatttacagattatcttttcaacaaatccctagaaatagaaccacgaaaccctaagcctctcccaagatttccaaaaaaatatagctatcccctaaaatctcctggtgttcgtccatcaaacccaagaccaggtaccatgaggcatcccacacctctgcagcaggagccaaggaaaattagttatagtaggatccctgaaagtgaaacagaaagtacagcatctgcaccaaattctccaagaacaccgttaacacctccgcctgcttctggtgcttccagtaccacagatgtttgcagtgtatttgattccgatcattcgagcccttttcactcaagcaatgataccgtctttatccaagttactctgccccatggcccaagatctgcttctgtatcatctataagtttaaccaaaggcactgatgaagtgcctgtccctcctcctgttcctccacgaagacgaccagaatctgccccagcagaatcttcaccatctaagattatgtctaagcatttggacagtcccccagccattcctcctaggcaacccacatcaaaagcctattcaccacgatattcaatatcagaccggacctctatctcagaccctcctgaaagccctcccttattaccaccacgagaacctgtgaggacacctgatgttttctcaagctcaccactacatctccaacctccccctttgggcaaaaaaagtgaccatggcaatgccttcttcccaaacagcccttccccctttacaccacctcctcctcaaacaccttctcctcacggcacaagaaggcatctgccatcaccaccattgacacaagaagtggaccttcattccattgctgggccgcctgttcctccacgacaaagcacttctcaacatatccctaaactccctccaaaaacttacaaaagggagcacacacacccatccatgcacagagatggaccaccactgttggagaatgcccattcttcctgagttcctctgtactgggatgtatattttcctagccccaaatccattgctggcaatggatgcactgaatgtgccagcactgaggagttaaaatgagaactccaaacactaacgactcttcttcaagatgcagtataagacaatgaattttaacctagatgtaattatacaatggaaatggtattccagtttagaatatggaaagaccgacctagaggaattggacaactgattgcacctgaaaatcataaagggactttttctggccaataggcaggagtcctctttttgtgaagtgatcttttgtgaagtgatcattaaagggatggaaaacacagtctagtgtccagcaggcccacatgacagtttttgtaattcaaattatgcacttttaaaaaaaaacaaacttaaacagggatcttaatatcttcctttgttttcctttgctttactcttctactttagaatattttcttaaaaatcactcaaaggactgtgaggaaaggctgtggtacctgaccttgttgaaatcaaggcccggcactgtactacaggcctgtttacagattattacggtgaactgaatgggtaccgaggcttcaccaaagaggtacttttttgttgttgttgttgttttaggaataattgtaccaattttaagagcattccccccacctgtccccacacacccaaacaaaatgtggtggtgttgccttcaaaaaagagaagttttgtgtcattaacatgacagaagaactttttaaaaaaaaataactgtcaactattctatttgcatttaggagactgttcatctatgctagattgtcattttccctccttctcccacagaagtttactggtagtccatgtcatggctcgtagctatccctctaaccataccatggaaatgcaggcacccaatgtgaaaaggagcacttgctgggcatcactgacaccgctcatgttttacacatagttgagtaatcagcatatctagaattatcttgcattgcctaaatcatatgtatatagtgaatgttatataatatacctggcaggtctgttttaatttaattgaataaagatacaaatactttgtttggctggcatatattaaattattatatgaagaaaatggttgattcttatttcttttagttgaaaaacacacaaaaacactaaacataaaagcacgttttgtggtacgccttggtttctagttctggatatatgtattaatcttaaagaatgatctaaagtcacagcttggcatataggaagatacttggttagaataggatgggtatcttttaagcagaactttgtaagtaagttttaagttcctaagcaacaagtatacagtttgttaaggtttatattgaacattctaccttgcttgaggttttctgctttatcaaaactattcataatagaacatctacctgcatcattactatcataatatggattattcataaagcgtatgtactgttcttctgagtctaacaaatactgtgactgaaatgcatgcaccttgttgaagagaaaacattttattaatctccactataatgtctgtgaaatgtgcagtattccatccttagagagttatctggttcatcagcatctgcatgtatcctctgaataatgaagcaacatttcagcaattctgttaaccacaccattagagacatttttagaagtgctgcaacatggtgggaacctagtactttaataatttcctatgatatttattagagcataaaatgtacatcacgatagtacagtatgtagtcctttaagaccagaaggtatgttaactgcaccatcattaagcagtctatcctgttttcttatttatttgttagaattgaatcctttctcaatatctgtaccattcctatgatggtagccattcttctctttataaaatatttcctctttgaaaagcgtcctaaaacattaatttcaaatcccctcttggatgcaaagtgtccctaagaccatccattcaacagtatttatgtgagccaacttactagagccgctacaacta

SEQ ID NO: 453986 - DNA, 5432 bp, Homo sapiens
ggccccgacgtgaagtgagagaagatgcaagaaggagatagacaaagggaaacacctgtttccctgtgtctccgattcaaaatggttttcagctaatgatgtagaaaatatatttagtcgcatagtagatatacatgaacttagtgtaaagttactgggccatatagaagatacagtagaaatgacagatgaaggcagtccccatccactagtaggaagctgctttgaagacttagcagaggaactggcatttgatccatatgaatcgtatgctcgagatattttgcgacctggttttcatgatcgtttccttagtcagttatcaaagcctggggcagcactttatttgcagtcaataggcgaaggtttcaaagaagctgttcaatatgttttacccaggctgcttctggcccctgtttaccactgtctccattactttgaacttttgaagcagttagaagaaaaaagtgaagatcaagaagacaaggaatgtttaaaacaagcaataacagctttgcttaatgttcagagtggtatggaaaaaatatgttctaaaagtcttgcaaaacgaagactgagtgaatctgcatgtcggttttatagtcagcaaatgaaggggaaacaactagcaatcaagaagatgaacgagattcagaagaatattgatggttgggagggaaaagacattggacagtgttgtaatgaatttataatggaaggaactcttacacgtgtaggagccaaacatgagagacacatatttctctttgatggcttaatgatttgctgtaaatcaaatcatgggcagccaagacttcctggtgctagcaatgcagaatatcgtcttaaagaaaagttttttatgcgaaaggtacaaattaatgataaagatgacaccaatgaatacaagcatgcttttgaaataattttaaaagatgaaaatagtgttatattttctgccaagtcagctgaagagaaaaacaattggatggcagcattgatatctttacagtaccggagtacactggaaaggatgcttgatgtaacaatgctacaggaagagaaagaggagcagatgaggctgcctagtgctgatgtttatagatttgcagagcctgactctgaagagaatattatatttgaagagaacatgcagcccaaggctggaattccaattatcaaagcaggaactgttattaaacttatagagaggcttacgtaccatatgtacgcagatcccaattttgttcggacatttcttacaacatacagatccttttgcaaacctcaagaactactgagtcttataatagaaaggtttgaaattccagagcctgagccaacagaagctgatcgcatagctatagagaatggagatcaacccttgagtgcagaactgaaaagatttagaaaagaatatatacagcctgtgcaactgcgagtattaaatgtatgtcggcactgggtagagcaccacttctatgattttgaaagagatgcatatcttttgcaacgaatggaagaatttattggaacagtaagaggtaaagcaatgaaaaaatgggttgaatccatcactaaaataatccaaaggaaaaaaattgcaagagacaatggaccaggtcataatattacatttcagagttcacctcccacagttgagtggcatataagcagacctgggcacatagagacttttgacctgctcaccttacacccaatagaaattgctcgacaactcactttacttgaatcagatctataccgagctgtacagccatcagaattagttggaagtgtgtggacaaaagaagacaaagaaattaactctcctaatcttctgaaaatgattcgacataccaccaacctcactctgtggtttgagaaatgtattgtagaaactgaaaatttagaagaaagagtagctgtggtgagtcgaattattgagattctacaagtctttcaagagttgaacaactttaatggtgtccttgaggttgtcagtgctatgaattcatcacctgtttacagactagaccacacatttgagcaaataccaagtcgccagaagaaaattttagaagaagctcatgaattgagtgaagatcactataagaaatatttggcaaaactcaggtctattaatccaccatgtgtgcctttctttggaatttatctcactaatatcttgaaaacagaagaaggcaaccctgaggtcctaaaaagacatggaaaagagcttataaactttagcaaaaggaggaaagtagcagaaataacaggagagatccagcagtaccaaaatcagccttactgtttacgagtagaatcagatatcaaaaggttctttgaaaacttgaatccgatgggaaatagcatggagaaggaatttacagattatcttttcaacaaatccctagaaatagaaccacgaaaccctaagcctctcccaagatttccaaaaaaatatagctatcccctaaaatctcctggtgttcgtccatcaaacccaagaccaggtaccatgaggcatcccacacctctgcagcaggagccaaggaaaattagttatagtaggatccctgaaagtgaaacagaaagtacagcatctgcaccaaattctccaagaacaccgttaacacctccgcctgcttctggtgcttccagtaccacagatgtttgcagtgtatttgattccgatcattcgagcccttttcactcaagcaatgataccgtctttatccaagttactctgccccatggcccaagatctgcttctgtatcatctataagtttaaccaaaggcactgatgaagtgcctgtccctcctcctgttcctccacgaagacgaccagaatctgccccagcagaatcttcaccatctaagattatgtctaagcatttggacagtcccccagccattcctcctaggcaacccacatcaaaagcctattcaccacgatattcaatatcagaccggacctctatctcagaccctcctgaaagccctcccttattaccaccacgagaacctgtgaggacacctgatgttttctcaagctcaccactacatctccaacctccccctttgggcaaaaaaagtgaccatggcaatgccttcttcccaaacagcccttccccctttacaccacctcctcctcaaacaccttctcctcacggcacaagaaggcatctgccatcaccaccattgacacaagaagtggaccttcattccattgctgggccgcctgttcctccacgacaaagcacttctcaacatatccctaaactccctccaaaaacttacaaaagggagcacacacacccatccatgcacagagatggaccaccactgttggagaatgcccattcttcctgagttcctctgtactgggatgtatattttcctagccccaaatccattgctggcaatggatgcactgaatgtgccagcactgaggagttaaaatgagaactccaaacactaacgactcttcttcaagatgcagtataagacaatgaattttaacctagatgtaattatacaatggaaatggtattccagtttagaatatggaaagaccgacctagaggaattggacaactgattgcacctgaaaatcataaagggactttttctggccaataggcaggagtcctctttttgtgaagtgatcttttgtgaagtgatcattaaagggatggaaaacacagtctagtgtccagcaggcccacatgacagtttttgtaattcaaattatgcacttttaaaaaaaaacaaacttaaacagggatcttaatatcttcctttgttttcctttgctttactcttctactttagaatattttcttaaaaatcactcaaaggactgtgaggaaaggctgtggtacctgaccttgttgaaatcaaggcccggcactgtactacaggcctgtttacagattattacggtgaactgaatgggtaccgaggcttcaccaaagaggtacttttttgttgttgttgttgttttaggaataattgtaccaattttaagagcattccccccacctgtccccacacacccaaacaaaatgtggtggtgttgccttcaaaaaagagaagttttgtgtcattaacatgacagaagaactttttaaaaaaaaataactgtcaactattctatttgcatttaggagactgttcatctatgctagattgtcattttccctccttctcccacagaagtttactggtagtccatgtcatggctcgtagctatccctctaaccataccatggaaatgcaggcacccaatgtgaaaaggagcacttgctgggcatcactgacaccgctcatgttttacacatagttgagtaatcagcatatctagaattatcttgcattgcctaaatcatatgtatatagtgaatgttatataatatacctggcaggtctgttttaatttaattgaataaagatacaaatactttgtttggctggcatatattaaattattatatgaagaaaatggttgattcttatttcttttagttgaaaaacacacaaaaacactaaacataaaagcacgttttgtggtacgccttggtttctagttctggatatatgtattaatcttaaagaatgatctaaagtcacagcttggcatataggaagatacttggttagaataggatgggtatcttttaagcagaactttgtaagtaagttttaagttcctaagcaacaagtatacagtttgttaaggtttatattgaacattctaccttgcttgaggttttctgctttatcaaaactattcataatagaacatctacctgcatcattactatcataatatggattattcataaagcgtatgtactgttcttctgagtctaacaaatactgtgactgaaatgcatgcaccttgttgaagagaaaacattttattaatctccactataatgtctgtgaaatgtgcagtattccatccttagagagttatctggttcatcagcatctgcatgtatcctctgaataatgaagcaacatttcagcaattctgttaaccacaccattagagacatttttagaagtgctgcaacatggtgggaacctagtactttaataatttcctatgatatttattagagcataaaatgtacatcacgatagtacagtatgtagtcctttaagaccagaaggtatgttaactgcaccatcattaagcagtctatcctgttttcttatttatttgttagaattgaatcctttctcaatatctgtaccattcctatgatggtagccattcttctctttataaaatatttcctctttgaaaagcgtcctaaaacattaatttcaaatcccctcttggatgcaaagtgtccctaagaccatccattcaacagtatttatgtgagccaacttactagagccgctacaacta

SEQ ID NO: 453987 - DNA, 3959 bp, Homo sapiens
gattccccaacaacgacctccggtccttccccttccccgcgagacctccgccccagctccgccccgcccggggctcttgcgtttcggagtcccaactacgcggagcgggcgccgcggccggagcgtccctccacacgtcctcccccagccgccagctccgccgcggggccagaccgggcccgggacgccgccgcccctctccccgcccagaggcgccccgggggcaccatgcaggcgcagcagctgccctacgagtttttcagcgaagagaacgcgcccaagtggcggggactactggtgcctgcgctgaaaaaggtccaggggcaagttcatcctactctcgagtctaatgatgatgctcttcagtatgttgaagaattaattttgcaattattaaatatgctatgccaagctcagccccgaagtgcttcagatgtagaggaacgtgttcaaaaaagtttccctcatccaattgataaatgggcaatagctgatgcccaatcagctattgaaaagaggaagcgaagaaaccctttatctctcccagtagaaaaaattcatcctttattaaaggaggtcctaggttataaaattgaccaccaggtttctgtttacatagtagcagtcttagaatacatttctgcagacattttaaagctggttgggaattatgtaagaaatatacggcattatgaaattacaaaacaagatattaaagtggcaatgtgtgctgacaaggtattgatggatatgtttcatcaagatgtagaagatattaatatattatctttaactgacgaagagccttccacctcaggagaacaaacttactatgatttggtaaaagcatttatggcagaaattcgacaatatataagggaactaaatctaattataaaagtttttagagagccctttgtctccaattcaaaattgttttcagctaatgatgtagaaaatatatttagtcgcatagtagatatacatgaacttagtgtaaagttactgggccatatagaagatacagtagaaatgacagatgaaggcagtccccatccactagtaggaagctgctttgaagacttagcagaggaactggcatttgatccatatgaatcgtatgctcgagatattttgcgacctggttttcatgatcgtttccttagtcagttatcaaagcctggggcagcactttatttgcagtcaataggcgaaggtttcaaagaagctgttcaatatgttttacccaggctgcttctggcccctgtttaccactgtctccattactttgaacttttgaagcagttagaagaaaaaagtgaagatcaagaagacaaggaatgtttaaaacaagcaataacagctttgcttaatgttcagagtggtatggaaaaaatatgttctaaaagtcttgcaaaacgaagactgagtgaatctgcatgtcggttttatagtcagcaaatgaaggggaaacaactagcaatcaagaagatgaacgagattcagaagaatattgatggttgggagggaaaagacattggacagtgttgtaatgaatttataatggaaggaactcttacacgtgtaggagccaaacatgagagacacatatttctctttgatggcttaatgatttgctgtaaatcaaatcatgggcagccaagacttcctggtgctagcaatgcagaatatcgtcttaaagaaaagttttttatgcgaaaggtacaaattaatgataaagatgacaccaatgaatacaagcatgcttttgaaataattttaaaagatgaaaatagtgttatattttctgccaagtcagctgaagagaaaaacaattggatggcagcattgatatctttacagtaccggagtacactggaaaggatgcttgatgtaacaatgctacaggaagagaaagaggagcagatgaggctgcctagtgctgatgtttatagatttgcagagcctgactctgaagagaatattatatttgaagagaacatgcagcccaaggctggaattccaattatcaaagcaggaactgttattaaacttatagagaggcttacgtaccatatgtacgcagatcccaattttgttcggacatttcttacaacatacagatccttttgcaaacctcaagaactactgagtcttataatagaaaggtttgaaattccagagcctgagccaacagaagctgatcgcatagctatagagaatggagatcaacccttgagtgcagaactgaaaagatttagaaaagaatatatacagcctgtgcaactgcgagtattaaatgtatgtcggcactgggtagagcaccacttctatgattttgaaagagatgcatatcttttgcaacgaatggaagaatttattggaacagtaagaggtaaagcaatgaaaaaatgggttgaatccatcactaaaataatccaaaggaaaaaaattgcaagagacaatggaccaggtcataatattacatttcagagttcacctcccacagttgagtggcatataagcagacctgggcacatagagacttttgacctgctcaccttacacccaatagaaattgctcgacaactcactttacttgaatcagatctataccgagctgtacagccatcagaattagttggaagtgtgtggacaaaagaagacaaagaaattaactctcctaatcttctgaaaatgattcgacataccaccaacctcactctgtggtttgagaaatgtattgtagaaactgaaaatttagaagaaagagtagctgtggtgagtcgaattattgagattctacaagtctttcaagagttgaacaactttaatggtgtccttgaggttgtcagtgctatgaattcatcacctgtttacagactagaccacacatttgagcaaataccaagtcgccagaagaaaattttagaagaagctcatgaattgagtgaagatcactataagaaatatttggcaaaactcaggtctattaatccaccatgtgtgcctttctttggaatttatctcactaatatcttgaaaacagaagaaggcaaccctgaggtcctaaaaagacatggaaaagagcttataaactttagcaaaaggaggaaagtagcagaaataacaggagagatccagcagtaccaaaatcagccttactgtttacgagtagaatcagatatcaaaaggttctttgaaaacttgaatccgatgggaaatagcatggagaaggaatttacagattatcttttcaacaaatccctagaaatagaaccacgaaaccctaagcctctcccaagatttccaaaaaaatatagctatcccctaaaatctcctggtgttcgtccatcaaacccaagaccaggtaccatgaggcatcccacacctctgcagcaggagccaaggaaaattagttatagtaggatccctgaaagtgaaacagaaagtacagcatctgcaccaaattctccaagaacaccgttaacacctccgcctgcttctggtgcttccagtaccacagatgtttgcagtgtatttgattccgatcattcgagcccttttcactcaagcaatgataccgtctttatccaagttactctgccccatggcccaagatctgcttctgtatcatctataagtttaaccaaaggcactgatgaagtgcctgtccctcctcctgttcctccacgaagacgaccagaatctgccccagcagaatcttcaccatctaagattatgtctaagcatttggacagtcccccagccattcctcctaggcaacccacatcaaatatttgaggatcatccttctcacctgccttaactactccttggaccctagatgtaaatttctcagtagcttatctatgctatggtgtcacctgatggcctagcattaaccaattcatgccaacttctgaatgatgaaaccagtctttacagacagtagttcc

SEQ ID NO: 453988 - DNA, 1040 bp, Homo sapiens
  misc_feature (34)..(34): n is a, c, g, or t
  misc_feature (902)..(902): n is a, c, g, or t
  misc_feature (907)..(907): n is a, c, g, or t
  misc_feature (909)..(909): n is a, c, g, or t
  misc_feature (914)..(914): n is a, c, g, or t
  misc_feature (918)..(919): n is a, c, g, or t
  misc_feature (928)..(928): n is a, c, g, or t
aatatgctagaggacgagcccagagtctacgtgnagcacatgaggtgctgagcagctggagggccgctgaataagcttccaaaatgatgcccacaccagttatcctattgaaagaggggactgatagctcccaaggcatcccccagcttgtgagtaacatcagtgcctgccaggtgattgctgaggctgtaagaactaccctgggtccccgtggcatggacaagcttattgtagatggcagaggcaaagcaacaatttctaatgatggggccacaattctgaaacttcttgatgttgtccatcctgcagcaaagactttggtagacattgccaaatcccaagatgctgaggtgggtgatggcaccacctcagtgaccttgctggctgcagagtttctgaagcaggtgaaaccctatgtggaggaaggtttacacccccagatcatcattcgagctttccgcacagccacccagctggcagttaacaagatcaaagagattgctgtgaccgtgaagaaggcagataaagtggagcagaggaagctgctggaaaagtgtgccatgaccgctctgagctccaagctgatctcccagcagaaagctttctttgctaagatggtggtggatgcagtgatgatgctcgatgatttgctgcagcttaaaatgattggaatcaagaaggtacagggtggagccctcgaggattctcagctggtagctggtgttgcattcaagaagactttctcttacgctgggtttgaaatgcaacccaaaaagtaccacaatcccaagattgcccttttgaatgtcgagctcgagttgaaagctgagaaagacaatgctgagataagagtccacacagttgagccgtgggttttcggcctgtgtgtcggggggctttcntgcangnggagncccnntgggccggngtggtccccctgggggtgtccccttttcgggggttgttggcgcccgggtggaagggggggtcccagtttcttgtgcgtggcctcggttatgcgaccccgggggaaaatctgg

SEQ ID NO: 453989 - DNA, 480 bp, Homo sapiens
ccaccaagttcagagagtctgcgggttcctagcagtgtcttttggagtaccagtttacaagaggaaagttgaaagtagttccatattacctcctttcttttcctactcttttaggggggtacatggtatggagtagacatcaacaacgaggacattgctgacaactttgaagctttcgtgtgggagccagctatggtgcggatcaatgcgctgacagcagcctctgaggctgcgtgcctgatcgtgtctgtagatgaaaccatcaagaacccccgctcgactgtggatgctcccacagcagcaggccggggccgtggtcgtggccgcccccactgagaggcaccccacccatcacatggctggctggctgctgggtgcacttaccctccttggcttggttacttcattttacaaggaaggggtagtaattggcccactctcttcttactggaggctatttaaataaaatgtaagacttca

SEQ ID NO: 453990 - DNA, 411 bp, Homo sapiens
aattcgcggccgcgtcgaccgagaagacgacagaagggtgcccaggggggtacatggtatggagtagacatcaacaacgaggacattgctgacaactttgaagctttcgtgtgggagccagctatggtgcggatcaatgcgctgacagcagcctctgaggctgcgtgcctgatcgtgtctgtagatgaaaccatcaagaacccccgctcgactgtggatgctcccacagcagcaggccggggccgtggtcgtggccgcccccactgagaggcaccccacccatcacatggctggctggctgctgggtgcacttaccctccttggcttggttacttcattttacaaggaaggggtagtaattggcccactctcttcttactggaggctatttaaataaaatgtaagacttca

SEQ ID NO: 453991 - DNA, 403 bp, Homo sapiens
actactaaattcgcggcccgtcgaccggcatgcccaggggggtacatggtatggagtagacatcaacaacgaggacattgctgacaactttgaagctttcgtgtgggagccagctatggtgcggatcaatgcgctgacagcagcctctgaggctgcgtgcctgatcgtgtctgtagatgaaaccatcaagaacccccgctcgactgtggatgctcccacagcagcaggccggggccgtggtcgtggccgcccccactgagaggcaccccacccatcacatggctggctggctgctgggtgcacttaccctccttggcttggttacttcattttacaaggaaggggtagtaattggcccactctcttcttactggaggctatttaaataaaatgtaagacttca

SEQ ID NO: 453992 - DNA, 653 bp, Homo sapiens
tactactacattcgcggccggtcgacttctcaacaagctgcgggctcggcatgcccaggggggtacatggtatggagtagacatcaacaacgaggacattgctgacaactttgaagctttcgtgtgggagccagctatggtgcggatcaatgcgctgacagcagcctctgaggctgcgtgcctgatcgtgtctgtagatgaaaccatcaagaacccccgctcgactgtggatgctcccacagcagcaggccggggccgtggtcgtggccgcccccactgagaggcaccccacccatcacatggctggctggctgctgggtgcacttaccctccttggcttggttacttcattttacaaggaaggggtagtaattggcccactctcttcttactggaggctatttaaataaaatgtaagacttcaaaaaaaaaaaaaaaaaaaaaaaaaaaaaaaaaaccccgcaaaaatgtcctctctctctcctctcctccccgcgcccctctgggcggggtggcgcaaacaacacagcgccgccttacaaaacgcgccggccaaagggcgcccaaaaaaaagcgcggtgccccttctcttaaaaatgttggttctgtcttgaacccccggtatcgtctcttacacatcttggcaaccccgt

SEQ ID NO: 453993 - DNA, 557 bp, Homo sapiens
cgccccagcatactctccgggtcctcgctggcggtgggcgggccagggaggacaagcactggaggtgtgcccgtagccggacttgcttcagctgtcgatagtcgaggccgttaacccttgcggtctcggtcctgtccactccaaggccgcctcgattgacgacgattagccttctcccagctgcgcttccctcctcccagctgcgcttccctcctccccacgccttcacgggaaggcactcgtcttgcgccagggggtcttccgcccagtgccaccaacgcttgcgcgctcaccgtggataggcgctggggccgcggcctgcgcacgccatccacgaggagcctctggccagtgcaaagccagaaaacgggcattgggggcagcttcccacgctcgtcccgttgacactgactatgtaactgtgacactggacaccttgacctctcagcctcctttctgtcatcagtaaaatggccttaataggaccaacgcaatagggttgtgaggattaaatgagatcgctcacgtaaagtgctttggcaccagcctatcccaca

SEQ ID NO: 453994 - DNA, 1876 bp, Homo sapiens
aacttaggctaggtacgaggccgggtggtgttgtgggttgctgggcggcccggtctcggagaagaggggagagtggcgggccgctgaataagcttccaaaatgatgcccacaccagttatcctattgaaagaggggactgatagctcccaaggcatcccccagcttgtgagtaacatcagtgcctgccaggtgattgctgaggctgtaagaactaccctgggtccccgtggcatggacaagcttattgtagatggcagaggcaaagcaacaatttctaatgatggggccacaattctgaaacttcttgatgttgtccatcctgcagcaaagactttggtagacattgccaaatcccaagatgctgaggtgggtgatggcaccacctcagtgaccttgctggctgcagagtttctgaagcaggtgaaaccctatgtggaggaaggtttacacccccagatcatcattcgagctttccgcacagccacccagctggcagttaacaagatcaaagagattgctgtgaccgtgaagaaggcagataaagtggagcagaggaagctgctggaaaagtgtgccatgaccgctctgagctccaagctgatctcccagcagaaagctttctttgctaagatggtggtggatgcagtgatgatgctcgatgatttgctgcagcttaaaatgattggaatcaagaaggtacagggtggagccctcgaggattctcagctggtagctggtgttgcattcaagaagactttctcttacgctgggtttgaaatgcaacccaaaaagtaccacaatcccaagattgcccttttgaatgtcgagctcgagttgaaagctgagaaagacaatgctgagataagagtccacacagttgaggattatcaggcaattgttgatgctgagtggaacattctctatgacaagttagagaagatccatcattctggagccaaagttgtcttgtccaaactccccattggggatgtggccacccagtactttgctgacagggacatgttctgtgctggccgagtacctgaggaggatctgaagaggacaatgatggcctgtggaggctcaatccagaccagtgtgaatgctctgtcagcagatgtgctgggtcgatgccaggtgtttgaagagacccagattggaggcgagaggtacaatttttttactggctgccccaaggccaagacatgcaccttcattctccgtggcggcgccgagcagtttatggaggagacagagcggtccctgcatgatgccatcatgatcgtcaggagggccatcaagaatgattcagtggtggctggtggcggggccattgagatggaactctccaagtacctgcgggattactcaaggactattccaggaaaacagcagctgttgattggggcatatgccaaggccttggagattatcccacgccagctgtgtgacaatgctggctttgatgccacaaacattctcaacaagctgcgggctcggcatgcccaggggggtacatggtatggagtagacatcaacaacgaggacattgctgacaactttgaagctttcgtgtgggagccagctatggtgcggatcaatgcgctgacagcagcctctgaggctgcgtgcctgatcgtgtctgtagatgaaaccatcaagaacccccgctcgactgtggatgctcccacagcagcaggccggggccgtggtcgtggccgcccccactgagaggcaccccacccatcacatggctggctggctgctgggtgcacttaccctccttggcttggttacttcattttacaaggaaggggtagtaattggcccactctcttcttactggaggctatttaaataaaatgtaagacttca

SEQ ID NO: 453995 - DNA, 2187 bp, Homo sapiens
tcccaggcgtcgagcttctgggtatttctattgcgcgaggcattgtgggttgctgggcggcccggtctcggagaagaggggagagtggcgggccgctgaataagcttccaaaatgatgcccacaccagttatcctattgaaagaggggactgatagctcccaaggcatcccccagcttgtgagtaacatcagtgcctgccaggtgattgctgaggctgtaagaactaccctgggtccccgtggcatggacaagcttattgtagatggcagaggcaaagcaacaatttctaatgatggggccacaattctgaaacttcttgatgttgtccatcctgcagcaaagactttggtagacattgccaaatcccaagatgctgaggtgggtgatggcaccacctcagtgaccttgctggctgcagagtttctgaagcaggtgaaaccctatgtggaggaaggtttacacccccagatcatcattcgagctttccgcacagccacccagctggcagttaacaagatcaaagagattgctgtgaccgtgaagaaggcagataaagtggagcagaggaagctgctggaaaagtgtgccatgaccgctctgagctccaagctgatctcccagcagaaagctttctttgctaagatggtggtggatgcagtgatgatgctcgatgatttgctgcagcttaaaatgattggaatcaagaaggtacagggtggagccctcgaggattctcagctggtagctggtgttgcattcaagaagactttctcttacgctgggtttgaaatgcaacccaaaaagtaccacaatcccaagattgcccttttgaatgtcgagctcgagttgaaagctgagaaagacaatgctgagataagagtccacacagttgaggattatcaggcaattgttgatgctgagtggaacattctctatgacaagttagagaagatccatcattctggagccaaagttgtcttgtccaaactccccattggggatgtggccacccagtactttgctgacagggacatgttctgtgctggccgagtacctgaggaggatctgaagaggacaatgatggcctgtggaggctcaatccagaccagtgtgaatgctctgtcagcagatgtgctgggtcgatgccaggtgtttgaagagacccagattggaggcgagaggtacaatttttttactggctgccccaaggccaagacatgcaccttcattctccgtggcggcgccgagcagtttatggaggagacagagcggtccctgcatgatgccatcatgatcgtcaggagggccatcaagaatgattcagtggtggctggtggcggggccattgagatggaactctccaagtacctgcgggattactcaaggactattccaggaaaacagcagctgttgattggggcatatgccaaggccttggagattatcccacgccagctgtgtgacaatgctggctttgatgccacaaacattctcaacaagctgcgggctcggcatgcccaggggggtacatggtatggagtagacatcaacaacgaggacattgctgacaactttgaagctttcgtgtgggagccagctatggtgcggatcaatgcgctgacagcagcctctgaggctgcgtgcctgatcgtgtctgtagatgaaaccatcaagaacccccgctcgactgtggatgctcccacagcagcaggccggggccgtggtcgtggccgcccccactgagaggcaccccacccatcacatggctggctggctgctgggtgcacttaccctccttggcttggttacttcattttacaaggaaggggtagtaattggcccactctcttcttactggaggctatttaaataaaatgtaagacttcaaaaaaaaaaaaaaaaaactcgagactagtttctctccagaaatcctgggcccccagaagaccttttgcccacacacactcctttcccccttgtccctggggcactcccccaggtttgtcgcactagtcagagtgtcccttttggcaggggactgggcccaggggtcctcggccattctgtccatcctcctctccatgcaagtgctgttggggcaggagtccccatgccgggtgtgacttcggcaaccacgtacaaggccacccagctgctgcatctgtgcctgtccgagaactgatctc

SEQ ID NO: 453996 - DNA, 2022 bp, Homo sapiens
tcccaggcgtcgagcttctgggtatttctattgcgcgaggcattgtgggttgctgggcggcccggtctcggagaagaggggagagtggcgggccgctgaataagcttccaaaatgatgcccacaccagttatcctattgaaagaggggactgatagctcccaaggcatcccccagcttgtgagtaacatcagtgcctgccaggtgattgctgaggctgtaagaactaccctgggtccccgtggcatggacaagcttattgtagatggcagaggcaaagcaacaatttctaatgatggggccacaattctgaaacttcttgatgttgtccatcctgcagcaaagactttggtagacattgccaaatcccaagatgctgaggtgggtgatggcaccacctcagtgaccttgctggctgcagagtttctgaagcaggtgaaaccctatgtggaggaaggtttacacccccagatcatcattcgagctttccgcacagccacccagctggcagttaacaagatcaaagagattgctgtgaccgtgaagaaggcagataaagtggagcagaggaagctgctggaaaagtgtgccatgaccgctctgagctccaagctgatctcccagcagaaagctttctttgctaagatggtggtggatgcagtgatgatgctcgatgatttgctgcagcttaaaatgattggaatcaagaaggtacagggtggagccctcgaggattctcagctggtagctggtgttgcattcaagaagactttctcttacgctgggtttgaaatgcaacccaaaaagtaccacaatcccaagattgcccttttgaatgtcgagctcgagttgaaagctgagaaagacaatgctgagataagagtccacacagttgaggattatcaggcaattgttgatgctgagtggaacattctctatgacaagttagagaagatccatcattctggagccaaagttgtcttgtccaaactccccattggggatgtggccacccagtactttgctgacagggacatgttctgtgctggccgagtacctgaggaggatctgaagaggacaatgatggcctgtggaggctcaatccagaccagtgtgaatgctctgtcagcagatgtgctgggtcgatgccaggtgtttgaagagacccagattggaggcgagaggtacaatttttttactggctgccccaaggccaagacatgcaccttcattctccgtggcggcgccgagcagtttatggaggagacagagcggtccctgcatgatgccatcatgatcgtcaggagggccatcaagaatgattcagtggtggctggtggcggggccattgagatggaactctccaagtacctgcgggattactcaaggactattccaggaaaacagcagctgttgattggggcatatgccaaggccttggagattatcccacgccagctgtgtgacaatgctggctttgatgccacaaacattctcaacaagctgcgggctcggcatgcccaggggggtacatggtatggagtagacatcaacaacgaggacattgctgacaactttgaagctttcgtgtgggagccagctatggtgcggatcaatgcgctgacagcagcctctgaggctgcgtgcctgatcgtgtctgtagatgaaaccatcaagaacccccgctcgactgtggatgctcccacagcagcaggccggggccgtggtcgtggccgcccccactgagaggcaccccacccatcacatggctggctggctgctgggtgcacttaccctccttggcttggttacttcattttacaaggaaggggtagtaattggcccactctcttcttactggaggctatttaaataaaatgtaagacttcaaaaaaaaaaaaaaaaaaaaaaaaaaaaaaaaaacacaaaaggggggggtcaaaatatcggggcaaaaccaccttttaaaggccaaaagaaaaaaaggggggaaccgggaaactgttgtagaccctggggataac

SEQ ID NO: 453997 - DNA, 2156 bp, Homo sapiens
tcccaggcgtcgagcttctgggtatttctattgcgcgaggcattgtgggttgctgggcggcccggtctcggagaagaggggagagtggcgggccgctgaataagcttccaaaatgatgcccacaccagttatcctattgaaagaggggactgatagctcccaaggcatcccccagcttgtgagtaacatcagtgcctgccaggtgattgctgaggctgtaagaactaccctgggtccccgtggcatggacaagcttattgtagatggcagaggcaaagcaacaatttctaatgatggggccacaattctgaaacttcttgatgttgtccatcctgcagcaaagactttggtagacattgccaaatcccaagatgctgaggtgggtgatggcaccacctcagtgaccttgctggctgcagagtttctgaagcaggtgaaaccctatgtggaggaaggtttacacccccagatcatcattcgagctttccgcacagccacccagctggcagttaacaagatcaaagagattgctgtgaccgtgaagaaggcagataaagtggagcagaggaagctgctggaaaagtgtgccatgaccgctctgagctccaagctgatctcccagcagaaagctttctttgctaagatggtggtggatgcagtgatgatgctcgatgatttgctgcagcttaaaatgattggaatcaagaaggtacagggtggagccctcgaggattctcagctggtagctggtgttgcattcaagaagactttctcttacgctgggtttgaaatgcaacccaaaaagtaccacaatcccaagattgcccttttgaatgtcgagctcgagttgaaagctgagaaagacaatgctgagataagagtccacacagttgaggattatcaggcaattgttgatgctgagtggaacattctctatgacaagttagagaagatccatcattctggagccaaagttgtcttgtccaaactccccattggggatgtggccacccagtactttgctgacagggacatgttctgtgctggccgagtacctgaggaggatctgaagaggacaatgatggcctgtggaggctcaatccagaccagtgtgaatgctctgtcagcagatgtgctgggtcgatgccaggtgtttgaagagacccagattggaggcgagaggtacaatttttttactggctgccccaaggccaagacatgcaccttcattctccgtggcggcgccgagcagtttatggaggagacagagcggtccctgcatgatgccatcatgatcgtcaggagggccatcaagaatgattcagtggtggctggtggcggggccattgagatggaactctccaagtacctgcgggattactcaaggactattccaggaaaacagcagctgttgattggggcatatgccaaggccttggagattatcccacgccagctgtgtgacaatgctggctttgatgccacaaacattctcaacaagctgcgggctcggcatgcccaggggggtacatggtatggagtagacatcaacaacgaggacattgctgacaactttgaagctttcgtgtgggagccagctatggtgcggatcaatgcgctgacagcagcctctgaggctgcgtgcctgatcgtgtctgtagatgaaaccatcaagaacccccgctcgactgtggatgctcccacagcagcaggccggggccgtggtcgtggccgcccccactgagaggcaccccacccatcacatggctggctggctgctgggtgcacttaccctccttggcttggttacttcattttacaaggaaggggtagtaattggcccactctcttcttactggaggctatttaaataaaatgtaagacttcaaaaaaaaaaaaaaaaaaaaaaaaaaaaaaaaaacctcggagggctctctattggtcgggggggcgggaagaaagagagggtatgtgagaaattgggcccatgtgggccatatagcgcgtggttcccctggagcccaaggctttccttggggtacaaaggggggtagaattcgtggcgcgggttctccctatattaggggagggctcggatattaaatttccggttaaggccagggttacccgggcatttaattggattcccgggaaat

SEQ ID NO: 453998 - DNA, 1908 bp, Homo sapiens
  misc_feature (1851)..(1851): n is a, c, g, or t
  misc_feature (1871)..(1871): n is a, c, g, or t
tcccaggcgtcgagcttctgggtatttctattgcgcgaggcattgtgggttgctgggcggcccggtctcggagaagaggggagagtggcgggccgctgaataagcttccaaaatgatgcccacaccagttatcctattgaaagaggggactgatagctcccaaggcatcccccagcttgtgagtaacatcagtgcctgccaggtgattgctgaggctgtaagaactaccctgggtccccgtggcatggacaagcttattgtagatggcagaggcaaagcaacaatttctaatgatggggccacaattctgaaacttcttgatgttgtccatcctgcagcaaagactttggtagacattgccaaatcccaagatgctgaggtgggtgatggcaccacctcagtgaccttgctggctgcagagtttctgaagcaggtgaaaccctatgtggaggaaggtttacacccccagatcatcattcgagctttccgcacagccacccagctggcagttaacaagatcaaagagattgctgtgaccgtgaagaaggcagataaagtggagcagaggaagctgctggaaaagtgtgccatgaccgctctgagctccaagctgatctcccagcagaaagctttctttgctaagatggtggtggatgcagtgatgatgctcgatgatttgctgcagcttaaaatgattggaatcaagaaggtacagggtggagccctcgaggattctcagctggtagctggtgttgcattcaagaagactttctcttacgctgggtttgaaatgcaacccaaaaagtaccacaatcccaagattgcccttttgaatgtcgagctcgagttgaaagctgagaaagacaatgctgagataagagtccacacagttgaggattatcaggcaattgttgatgctgagtggaacattctctatgacaagttagagaagatccatcattctggagccaaagttgtcttgtccaaactccccattggggatgtggccacccagtactttgctgacagggacatgttctgtgctggccgagtacctgaggaggatctgaagaggacaatgatggcctgtggaggctcaatccagaccagtgtgaatgctctgtcagcagatgtgctgggtcgatgccaggtgtttgaagagacccagattggaggcgagaggtacaatttttttactggctgccccaaggccaagacatgcaccttcattctccgtggcggcgccgagcagtttatggaggagacagagcggtccctgcatgatgccatcatgatcgtcaggagggccatcaagaatgattcagtggtggctggtggcggggccattgagatggaactctccaagtacctgcgggattactcaaggactattccaggaaaacagcagctgttgattggggcatatgccaaggccttggagattatcccacgccagctgtgtgacaatgctggctttgatgccacaaacattctcaacaagctgcgggctcggcatgcccaggggggtacatggtatggagtagacatcaacaacgaggacattgctgacaactttgaagctttcgtgtgggagccagctatggtgcggatcaatgcgctgacagcagcctctgaggctgcgtgcctgatcgtgtctgtagatgaaaccatcaagaacccccgctcgactgtggatgctcccacagcagcaggccggggccgtggtcgtggccgcccccactgagaggcaccccacccatcacatggctggctggctgctgggtgcacttaccctccttggcttggttacttcattttacaaggaaggggtagtaattggcccactctctnttcttttaaacactccgacngggggggattcttaaattctttagttgagctttcatg

SEQ ID NO: 453999 - DNA, 1902 bp, Homo sapiens
  misc_feature (1842)..(1842): n is a, c, g, or t
tcccaggcgtcgagcttctgggtatttctattgcgcgaggcattgtgggttgctgggcggcccggtctcggagaagaggggagagtggcgggccgctgaataagcttccaaaatgatgcccacaccagttatcctattgaaagaggggactgatagctcccaaggcatcccccagcttgtgagtaacatcagtgcctgccaggtgattgctgaggctgtaagaactaccctgggtccccgtggcatggacaagcttattgtagatggcagaggcaaagcaacaatttctaatgatggggccacaattctgaaacttcttgatgttgtccatcctgcagcaaagactttggtagacattgccaaatcccaagatgctgaggtgggtgatggcaccacctcagtgaccttgctggctgcagagtttctgaagcaggtgaaaccctatgtggaggaaggtttacacccccagatcatcattcgagctttccgcacagccacccagctggcagttaacaagatcaaagagattgctgtgaccgtgaagaaggcagataaagtggagcagaggaagctgctggaaaagtgtgccatgaccgctctgagctccaagctgatctcccagcagaaagctttctttgctaagatggtggtggatgcagtgatgatgctcgatgatttgctgcagcttaaaatgattggaatcaagaaggtacagggtggagccctcgaggattctcagctggtagctggtgttgcattcaagaagactttctcttacgctgggtttgaaatgcaacccaaaaagtaccacaatcccaagattgcccttttgaatgtcgagctcgagttgaaagctgagaaagacaatgctgagataagagtccacacagttgaggattatcaggcaattgttgatgctgagtggaacattctctatgacaagttagagaagatccatcattctggagccaaagttgtcttgtccaaactccccattggggatgtggccacccagtactttgctgacagggacatgttctgtgctggccgagtacctgaggaggatctgaagaggacaatgatggcctgtggaggctcaatccagaccagtgtgaatgctctgtcagcagatgtgctgggtcgatgccaggtgtttgaagagacccagattggaggcgagaggtacaatttttttactggctgccccaaggccaagacatgcaccttcattctccgtggcggcgccgagcagtttatggaggagacagagcggtccctgcatgatgccatcatgatcgtcaggagggccatcaagaatgattcagtggtggctggtggcggggccattgagatggaactctccaagtacctgcgggattactcaaggactattccaggaaaacagcagctgttgattggggcatatgccaaggccttggagattatcccacgccagctgtgtgacaatgctggctttgatgccacaaacattctcaacaagctgcgggctcggcatgcccaggggggtacatggtatggagtagacatcaacaacgaggacattgctgacaactttgaagctttcgtgtgggagccagctatggtgcggatcaatgcgctgacagcagcctctgaggctgcgtgcctgatcgtgtctgtagatgaaaccatcaagaacccccgctcgactgtggatgctcccacagcagcaggccggggccgtggtcgtggccgcccccactgagaggcaccccacccatcacatggctggctggctgctgggtgcacttaccctccttggcttggttacttcattttacaagaacaagagggtgtaatttngggccccaccctcttcaaatccctttagggtgggaggccctactttaaattaaaatgacc

SEQ ID NO: 454000 - DNA, 1816 bp, Homo sapiens
tcccaggcgtcgagcttctgggtatttctattgcgcgaggcattgtgggttgctgggcggcccggtctcggagaagaggggagagtggcgggccgctgaataagcttccaaaatgatgcccacaccagttatcctattgaaagaggggactgatagctcccaaggcatcccccagcttgtgagtaacatcagtgcctgccaggtgattgctgaggctgtaagaactaccctgggtccccgtggcatggacaagcttattgtagatggcagaggcaaagcaacaatttctaatgatggggccacaattctgaaacttcttgatgttgtccatcctgcagcaaagactttggtagacattgccaaatcccaagatgctgaggtgggtgatggcaccacctcagtgaccttgctggctgcagagtttctgaagcaggtgaaaccctatgtggaggaaggtttacacccccagatcatcattcgagctttccgcacagccacccagctggcagttaacaagatcaaagagattgctgtgaccgtgaagaaggcagataaagtggagcagaggaagctgctggaaaagtgtgccatgaccgctctgagctccaagctgatctcccagcagaaagctttctttgctaagatggtggtggatgcagtgatgatgctcgatgatttgctgcagcttaaaatgattggaatcaagaaggtacagggtggagccctcgaggattctcagctggtagctggtgttgcattcaagaagactttctcttacgctgggtttgaaatgcaacccaaaaagtaccacaatcccaagattgcccttttgaatgtcgagctcgagttgaaagctgagaaagacaatgctgagataagagtccacacagttgaggattatcaggcaattgttgatgctgagtggaacattctctatgacaagttagagaagatccatcattctggagccaaagttgtcttgtccaaactccccattggggatgtggccacccagtactttgctgacagggacatgttctgtgctggccgagtacctgaggaggatctgaagaggacaatgatggcctgtggaggctcaatccagaccagtgtgaatgctctgtcagcagatgtgctgggtcgatgccaggtgtttgaagagacccagattggaggcgagaggtacaatttttttactggctgccccaaggccaagacatgcaccttcattctccgtggcggcgccgagcagtttatggaggagacagagcggtccctgcatgatgccatcatgatcgtcaggagggccatcaagaatgattcagtggtggctggtggcggggccattgagatggaactctccaagtacctgcgggattactcaaggactattccaggaaaacagcagctgttgattggggcatatgccaaggccttggagattatcccacgccagctgtgtgacaatgctggctttgatgccacaaacattctcaacaagctgcgggctcggcatgcccagccagctatggtgcggatcaatgcgctgacagcagcctctgaggctgcgtgcctgatcgtgtctgtagatgaaaccatcaagaacccccgctcgactgtggatgctcccacagcagcaggccggggccgtggtcgtggccgcccccactgagaggcaccccacccatcacatggctggctggctgctgggtgcacttaccctccttggcttggttacttcattttacaaggaaggggtagtaattggcccactctcttcttactggaggctatttaaataaaatgtaagacttca

SEQ ID NO: 454001 - DNA, 1721 bp, Homo sapiens
tcccaggcgtcgagcttctgggtatttctattgcgcgaggcattgtgggttgctgggcggcccggtctcggagaagaggggagagtggcgggccgctgaataagcttccaaaatgatgcccacaccagttatcctattgaaagaggggactgatagctcccaaggcatcccccagcttgtgagtaacatcagtgcctgccaggtgattgctgaggctgtaagaactaccctgggtccccgtggcatggacaagcttattgtagatggcagaggcaaagcaacaatttctaatgatggggccacaattctgaaacttcttgatgttgtccatcctgcagcaaagactttggtagacattgccaaatcccaagatgctgaggtgggtgatggcaccacctcagtgaccttgctggctgcagagtttctgaagcaggtgaaaccctatgtggaggaaggtttacacccccagatcatcattcgagctttccgcacagccacccagctggcagttaacaagatcaaagagattgctgtgaccgtgaagaaggcagataaagtggagcagaggaagctgctggaaaagtgtgccatgaccgctctgagctccaagctgatctcccagcagaaagctttctttgctaagatggtggtggatgcagtgatgatgctcgatgatttgctgcagcttaaaatgattggaatcaagaaggtacagggtggagccctcgaggattctcagctggtagctggtgttgcattcaagaagactttctcttacgctgggtttgaaatgcaacccaaaaagtaccacaatcccaagattgcccttttgaatgtcgagctcgagttgaaagctgagaaagacaatgctgagataagagtccacacagttgaggattatcaggcaattgttgatgctgagtggaacattctctatgacaagttagagaagatccatcattctggagccaaagttgtcttgtccaaactccccattggggatgtggccacccagtactttgctgacagggacatgttctgtgctggccgagtacctgaggaggatctgaagaggacaatgatggcctgtggaggctcaatccagaccagtgtgaatgctctgtcagcagatgtgctgggtcgatgccaggtgtttgaagagacccagattggaggcgagaggtacaatttttttactggctgccccaaggccaagacatgcaccttcattctccgtggcggcgccgagcagtttatggaggagacagagcggtccctgcatgatgccatcatgatcgtcaggagggccatcaagaatgattcagtggtggctggtggcggggccattgagatggaactctccaagtacctgcgggattactcaaggactattccaggaaaacagcagctgttgattggggcatatgccaaggccttggagattatcccacgccagctgtgtgacaatgctggctttgatgccacaaacattctcaacaagctgcgggctcggcatgcccagtgtggatgctcccacagcagcaggccggggccgtggtcgtggccgcccccactgagaggcaccccacccatcacatggctggctggctgctgggtgcacttaccctccttggcttggttacttcattttacaaggaaggggtagtaattggcccactctcttcttactggaggctatttaaataaaatgtaagacttca

SEQ ID NO: 454002 - DNA, 1681 bp, Homo sapiens
tcccaggcgtcgagcttctgggtatttctattgcgcgaggcattgtgggttgctgggcggcccggtctcggagaagaggggagagtggcgggccgctgaataagcttccaaaatgatgcccacaccagttatcctattgaaagaggggactgatagctcccaaggcatcccccagcttgtgagtaacatcagtgcctgccaggtgattgctgaggctgtaagaactaccctgggtccccgtggcatggacaagcttattgtagatggcagaggcaaagcaacaatttctaatgatggggccacaattctgaaacttcttgatgttgtccatcctgcagcaaagactttggtagacattgccaaatcccaagatgctgaggtgggtgatggcaccacctcagtgaccttgctggctgcagagtttctgaagcaggtgaaaccctatgtggaggaaggtttacacccccagatcatcattcgagctttccgcacagccacccagctggcagttaacaagatcaaagagattgctgtgaccgtgaagaaggcagataaagtggagcagaggaagctgctggaaaagtgtgccatgaccgctctgagctccaagctgatctcccagcagaaagctttctttgctaagatggtggtggatgcagtgatgatgctcgatgatttgctgcagcttaaaatgattggaatcaagaaggtacagggtggagccctcgaggattctcagctggtagctggtgttgcattcaagaagactttctcttacgctgggtttgaaatgcaacccaaaaagtaccacaatcccaagattgcccttttgaatgtcgagctcgagttgaaagctgagaaagacaatgctgagataagagtccacacagttgaggattatcaggcaattgttgatgctgagtggaacattctctatgacaagttagagaagatccatcattctggagccaaagttgtcttgtccaaactccccattggggatgtggccacccagtactttgctgacagggacatgttctgtgctggccgagtacctgaggaggatctgaagaggacaatgatggcctgtggaggctcaatccagaccagtgtgaatgctctgtcagcagatgtgctgggtcgatgccaggtgtttgaagagacccagattggaggcgagaggtacaatttttttactggctgccccaaggccaagacatgcaccttcattctccgtggcggcgccgagcagtttatggaggagacagagcggtccctgcatgatgccatcatgatcgtcaggagggccatcaaggggggtacatggtatggagtagacatcaacaacgaggacattgctgacaactttgaagctttcgtgtgggagccagctatggtgcggatcaatgcgctgacagcagcctctgaggctgcgtgcctgatcgtgtctgtagatgaaaccatcaagaacccccgctcgactgtggatgctcccacagcagcaggccggggccgtggtcgtggccgcccccactgagaggcaccccacccatcacatggctggctggctgctgggtgcacttaccctccttggcttggttacttcattttacaaggaaggggtagtaattggcccactctcttcttactggaggctatttaaataaaatgtaagacttca

SEQ ID NO: 454003 - DNA, 1289 bp, Homo sapiens
  misc_feature (1247)..(1247): n is a, c, g, or t
  misc_feature (1260)..(1260): n is a, c, g, or t
  misc_feature (1266)..(1266): n is a, c, g, or t
  misc_feature (1268)..(1268): n is a, c, g, or t
tcccaggcgtcgagcttctgggtatttctattgcgcgaggcattgtgggttgctgggcggcccggtctcggagaagaggggagagtggcgggccgctgaataagcttccaaaatgatgcccacaccagttatcctattgaaagaggggactgatagctcccaaggcatcccccagcttgtgagtaacatcagtgcctgccaggtgattgctgaggctgtaagaactaccctgggtccccgtggcatggacaagcttattgtagatggcagaggcaaagcaacaatttctaatgatggggccacaattctgaaacttcttgatgttgtccatcctgcagcaaagactttggtagacattgccaaatcccaagatgctgaggtgggtgatggcaccacctcagtgaccttgctggctgcagagtttctgaagcaggtgaaaccctatgtggaggaaggtttacacccccagatcatcattcgagctttccgcacagccacccagctggcagttaacaagatcaaagagattgctgtgaccgtgaagaaggcagataaagtggagcagaggaagctgctggaaaagtgtgccatgaccgctctgagctccaagctgatctcccagcagaaagctttctttgctaagatggtggtggatgcagtgatgatgctcgatgatttgctgcagcttaaaatgattggaatcaagaaggtacagggtggagccctcgaggattctcagctggtagctggtgttgcattcaagaagactttctcttacgctgggtttgaaatgcaacccaaaaagtaccacaatcccaagattgcccttttgaatgtcgagctcgagttgaaagctgagaaagacaatgctgagataagagtccacacagttgaggattatcaggcaattgttgatgctgagtggaacattctctatgacaagttagagaagatccatcattctggagccaaagttgtcttgtccaaactccccattggggatgtggccacccagtactttgctgacagggacatgttctgtgctggccgagtacctgaggaggatctgaagaggacaatgatggcctgtggaggctcaatccagaccagtgtgaatgctctgtcagcagatgtgctgggtcgatgccaggtgtttgaagagacccagattggaggcgagagggggacaggacaatttttactgggtgcccaggccagaatgcccttcatctcggggggcgccacanttgggggaaaaanggccgntntgcaaatcgagggccagaaaa

SEQ ID NO: 454004 - DNA, 2347 bp, Homo sapiens
ttttttttgttttttaagcattgatttaaaagatgcacggaaagttatcttacagcaaactgtagtttgcctccaagacaccattgtctccctttaatcttctcttttgtatacatttgttacccatggtgttctttgttccttttcataagctaataccactgtagggattttgttttgaacgcatattgacagcacgctttacttagtagccggttcccatttgccatacaatgtaggttctgcttaatgtaacttcttttttgcttaagcattgcatgactattagtgcttcaaagtcaatttttaaaaatgcacaagttataaatacagaagaaagagcaacccaccaaacctaacaaggacccccgaacactttcatactaagactgtaagtagatctcagttctgcgtttattgtaagttgataaaaacatctggaagaaaatgactaaaactgtttgcatctttgtatgtatttattacttgatgtaattaaagcttattttcattaacaaaaaaaaaaaaagagaagaggggagagtggcgggccgctgaataagcttccaaaatgatgcccacaccagttatcctattgaaagaggggactgatagctcccaaggcatcccccagcttgtgagtaacatcagtgcctgccaggtgattgctgaggctgtaagaactaccctgggtccccgtggcatggacaagcttattgtagatggcagaggcaaagcaacaatttctaatgatggggccacaattctgaaacttcttgatgttgtccatcctgcagcaaagactttggtagacattgccaaatcccaagatgctgaggtgggtgatggcaccacctcagtgaccttgctggctgcagagtttctgaagcaggtgaaaccctatgtggaggaaggtttacacccccagatcatcattcgagctttccgcacagccacccagctggcagttaacaagatcaaagagattgctgtgaccgtgaagaaggcagataaagtggagcagaggaagctgctggaaaagtgtgccatgaccgctctgagctccaagctgatctcccagcagaaagctttctttgctaagatggtggtggatgcagtgatgatgctcgatgatttgctgcagcttaaaatgattggaatcaagaaggtacagggtggagccctcgaggattctcagctggtagctggtgttgcattcaagaagactttctcttacgctgggtttgaaatgcaacccaaaaagtaccacaatcccaagattgcccttttgaatgtcgagctcgagttgaaagctgagaaagacaatgctgagataagagtccacacagttgaggattatcaggcaattgttgatgctgagtggaacattctctatgacaagttagagaagatccatcattctggagccaaagttgtcttgtccaaactccccattggggatgtggccacccagtactttgctgacagggacatgttctgtgctggccgagtacctgaggaggatctgaagaggacaatgatggcctgtggaggctcaatccagaccagtgtgaatgctctgtcagcagatgtgctgggtcgatgccaggtgtttgaagagacccagattggaggcgagaggtacaatttttttactggctgccccaaggccaagacatgcaccttcattctccgtggcggcgccgagcagtttatggaggagacagagcggtccctgcatgatgccatcatgatcgtcaggagggccatcaagaatgattcagtggtggctggtggcggggccattgagatggaactctccaagtacctgcgggattactcaaggactattccaggaaaacagcagctgttgattggggcatatgccaaggccttggagattatcccacgccagctgtgtgacaatgctggctttgatgccacaaacattctcaacaagctgcgggctcggcatgcccaggggggtacatggtatggagtagacatcaacaacgaggacattgctgacaactttgaagctttcgtgtgggagccagctatggtgcggatcaatgcgctgacagcagcctctgaggctgcgtgcctgatcgtgtctgtagatgaaaccatcaagaacccccgctcgactgtggatgctcccacagcagcaggccggggccgtggtcgtggccgcccccactgagaggcaccccacccatcacatggctggctggctgctgggtgcacttaccctccttggcttggttacttcattttacaaggaaggggtagtaattggcccactctcttcttactggaggctatttaaataaaatgtaagacttca

SEQ ID NO: 454005 - DNA, 1200 bp, Homo sapiens
  misc_feature (1054)..(1054): n is a, c, g, or t
tcccaggcgtcgagcttctgggtatttctattgcgcgaggcattgtgggttgctgggcggcccggtctcggagaagaggggagagtggcgggccgctgaataagcttccaaaatgatgcccacaccagttatcctattgaaagaggggactgatagctcccaaggcatcccccagcttgtgagtaacatcagtgcctgccaggtgattgctgaggctgtaagaactaccctgggtccccgtggcatggacaagcttattgtagatggcagaggcaaagcaacaatttctaatgatggggccacaattctgaaacttcttgatgttgtccatcctgcagcaaagactttggtagacattgccaaatcccaagatgctgaggtgggtgatggcaccacctcagtgaccttgctggctgcagagtttctgaagcaggtgaaaccctatgtggaggaaggtttacacccccagatcatcattcgagctttccgcacagccacccagctggcagttaacaagatcaaagagattgctgtgaccgtgaagaaggcagataaagtggagcagaggaagctgctggaaaagtgtgccatgaccgctctgagctccaagctgatctcccagcagaaagctttctttgctaagatggtggtggatgcagtgatgatgctcgatgatttgctgcagcttaaaatgattggaatcaagaaggtacagggtggagccctcgaggattctcagctggtagctggtgttgcattcaagaagactttctcttacgctgggtttgaaatgcaacccaaaaagtaccacaatcccaagattgcccttttgaatgtcgagctcgagttgaaagctgagaaagacaatgctgagataagagtccacacagttgaggattatcaggcaattgttgatgctgagtggaacattctctatgacaagttagagaagatccatcattctggagccaaagttgtcttgtccaaactccccattggggatgtggccacccagtactttgctgacagggacatgttctgtgctggcggtcgngggtctggggcaggggcgggggcccccgctgttgccgtcccgtggtcttcgggttcaccctgggcggcctcggccgcacgcctcgggcctgggaagcctctcggccaggggggtccccttcccctgcccgtgactggtccggtcct

SEQ ID NO: 454006 - DNA, 1072 bp, Homo sapiens
  misc_feature (914)..(914): n is a, c, g, or t
tcccaggcgtcgagcttctgggtatttctattgcgcgaggcattgtgggttgctgggcggcccggtctcggagaagaggggagagtggcgggccgctgaataagcttccaaaatgatgcccacaccagttatcctattgaaagaggggactgatagctcccaaggcatcccccagcttgtgagtaacatcagtgcctgccaggtgattgctgaggctgtaagaactaccctgggtccccgtggcatggacaagcttattgtagatggcagaggcaaagcaacaatttctaatgatggggccacaattctgaaacttcttgatgttgtccatcctgcagcaaagactttggtagacattgccaaatcccaagatgctgaggtgggtgatggcaccacctcagtgaccttgctggctgcagagtttctgaagcaggtgaaaccctatgtggaggaaggtttacacccccagatcatcattcgagctttccgcacagccacccagctggcagttaacaagatcaaagagattgctgtgaccgtgaagaaggcagataaagtggagcagaggaagctgctggaaaagtgtgccatgaccgctctgagctccaagctgatctcccagcagaaagctttctttgctaagatggtggtggatgcagtgatgatgctcgatgatttgctgcagcttaaaatgattggaatcaagaaggtacagggtggagccctcgaggattctcagctggtagctggtgttgcattcaagaagactttctcttacgctgggtttgaaatgcaacccaaaaagtaccacaatcccaagattgcccttttgaatgtcgagctcgagttgaaagctgagaaagacaatgctgagataagagtccacacagttgagacccgggaggattcagcantgtgtgctgggggaacttcttgcagttaggaaaacccatcgggcagggtggcaatccagggggcccgaatggaaagacgcggcggcgaacgggccgaaggaagggcgggcaccaggaagtcaagggtccgcggaaccggggccgggcggaacacgggg

SEQ ID NO: 454007 - DNA, 1859 bp, Homo sapiens
  misc_feature (34)..(34): n is a, c, g, or t
aatatgctagaggacgagcccagagtctacgtgnagcacatgaggtgctgagcagctggagggccgctgaataagcttccaaaatgatgcccacaccagttatcctattgaaagaggggactgatagctcccaaggcatcccccagcttgtgagtaacatcagtgcctgccaggtgattgctgaggctgtaagaactaccctgggtccccgtggcatggacaagcttattgtagatggcagaggcaaagcaacaatttctaatgatggggccacaattctgaaacttcttgatgttgtccatcctgcagcaaagactttggtagacattgccaaatcccaagatgctgaggtgggtgatggcaccacctcagtgaccttgctggctgcagagtttctgaagcaggtgaaaccctatgtggaggaaggtttacacccccagatcatcattcgagctttccgcacagccacccagctggcagttaacaagatcaaagagattgctgtgaccgtgaagaaggcagataaagtggagcagaggaagctgctggaaaagtgtgccatgaccgctctgagctccaagctgatctcccagcagaaagctttctttgctaagatggtggtggatgcagtgatgatgctcgatgatttgctgcagcttaaaatgattggaatcaagaaggtacagggtggagccctcgaggattctcagctggtagctggtgttgcattcaagaagactttctcttacgctgggtttgaaatgcaacccaaaaagtaccacaatcccaagattgcccttttgaatgtcgagctcgagttgaaagctgagaaagacaatgctgagataagagtccacacagttgaggattatcaggcaattgttgatgctgagtggaacattctctatgacaagttagagaagatccatcattctggagccaaagttgtcttgtccaaactccccattggggatgtggccacccagtactttgctgacagggacatgttctgtgctggccgagtacctgaggaggatctgaagaggacaatgatggcctgtggaggctcaatccagaccagtgtgaatgctctgtcagcagatgtgctgggtcgatgccaggtgtttgaagagacccagattggaggcgagaggtacaatttttttactggctgccccaaggccaagacatgcaccttcattctccgtggcggcgccgagcagtttatggaggagacagagcggtccctgcatgatgccatcatgatcgtcaggagggccatcaagaatgattcagtggtggctggtggcggggccattgagatggaactctccaagtacctgcgggattactcaaggactattccaggaaaacagcagctgttgattggggcatatgccaaggccttggagattatcccacgccagctgtgtgacaatgctggctttgatgccacaaacattctcaacaagctgcgggctcggcatgcccaggggggtacatggtatggagtagacatcaacaacgaggacattgctgacaactttgaagctttcgtgtgggagccagctatggtgcggatcaatgcgctgacagcagcctctgaggctgcgtgcctgatcgtgtctgtagatgaaaccatcaagaacccccgctcgactgtggatgctcccacagcagcaggccggggccgtggtcgtggccgcccccactgagaggcaccccacccatcacatggctggctggctgctgggtgcacttaccctccttggcttggttacttcattttacaaggaaggggtagtaattggcccactctcttcttactggaggctatttaaataaaatgtaagacttca

SEQ ID NO: 454008 - DNA, 1834 bp, Homo sapiens
ttaatcatgatctgcggcttattaatgatttactggctgtcgtttaacatagcttcatatgatgcccacaccagttatcctattgaaagaggggactgatagctcccaaggcatcccccagcttgtgagtaacatcagtgcctgccaggtgattgctgaggctgtaagaactaccctgggtccccgtggcatggacaagcttattgtagatggcagaggcaaagcaacaatttctaatgatggggccacaattctgaaacttcttgatgttgtccatcctgcagcaaagactttggtagacattgccaaatcccaagatgctgaggtgggtgatggcaccacctcagtgaccttgctggctgcagagtttctgaagcaggtgaaaccctatgtggaggaaggtttacacccccagatcatcattcgagctttccgcacagccacccagctggcagttaacaagatcaaagagattgctgtgaccgtgaagaaggcagataaagtggagcagaggaagctgctggaaaagtgtgccatgaccgctctgagctccaagctgatctcccagcagaaagctttctttgctaagatggtggtggatgcagtgatgatgctcgatgatttgctgcagcttaaaatgattggaatcaagaaggtacagggtggagccctcgaggattctcagctggtagctggtgttgcattcaagaagactttctcttacgctgggtttgaaatgcaacccaaaaagtaccacaatcccaagattgcccttttgaatgtcgagctcgagttgaaagctgagaaagacaatgctgagataagagtccacacagttgaggattatcaggcaattgttgatgctgagtggaacattctctatgacaagttagagaagatccatcattctggagccaaagttgtcttgtccaaactccccattggggatgtggccacccagtactttgctgacagggacatgttctgtgctggccgagtacctgaggaggatctgaagaggacaatgatggcctgtggaggctcaatccagaccagtgtgaatgctctgtcagcagatgtgctgggtcgatgccaggtgtttgaagagacccagattggaggcgagaggtacaatttttttactggctgccccaaggccaagacatgcaccttcattctccgtggcggcgccgagcagtttatggaggagacagagcggtccctgcatgatgccatcatgatcgtcaggagggccatcaagaatgattcagtggtggctggtggcggggccattgagatggaactctccaagtacctgcgggattactcaaggactattccaggaaaacagcagctgttgattggggcatatgccaaggccttggagattatcccacgccagctgtgtgacaatgctggctttgatgccacaaacattctcaacaagctgcgggctcggcatgcccaggggggtacatggtatggagtagacatcaacaacgaggacattgctgacaactttgaagctttcgtgtgggagccagctatggtgcggatcaatgcgctgacagcagcctctgaggctgcgtgcctgatcgtgtctgtagatgaaaccatcaagaacccccgctcgactgtggatgctcccacagcagcaggccggggccgtggtcgtggccgcccccactgagaggcaccccacccatcacatggctggctggctgctgggtgcacttaccctccttggcttggttacttcattttacaaggaaggggtagtaattggcccactctcttcttactggaggctatttaaataaaatgtaagacttca

SEQ ID NO: 454009 - DNA, 1994 bp, Homo sapiens
  misc_feature (23)..(23): n is a, c, g, or t
  misc_feature (28)..(28): n is a, c, g, or t
aataacggcctaggtacgagctngggtnaatcggcacgagggagaagaggggagagtggcgggccgctgaataagcttccaaaatgatgaaggtgccaggactgggccagctgaagagccagaaagaatgctgggagtatagagaagccatttcttgccaccagacctgggacactccagcaaaaggaaggaattttcccttcagttgacgcctgatcccaaatcccacaccagttatcctattgaaagaggggactgatagctcccaaggcatcccccagcttgtgagtaacatcagtgcctgccaggtgattgctgaggctgtaagaactaccctgggtccccgtggcatggacaagcttattgtagatggcagaggcaaagcaacaatttctaatgatggggccacaattctgaaacttcttgatgttgtccatcctgcagcaaagactttggtagacattgccaaatcccaagatgctgaggtgggtgatggcaccacctcagtgaccttgctggctgcagagtttctgaagcaggtgaaaccctatgtggaggaaggtttacacccccagatcatcattcgagctttccgcacagccacccagctggcagttaacaagatcaaagagattgctgtgaccgtgaagaaggcagataaagtggagcagaggaagctgctggaaaagtgtgccatgaccgctctgagctccaagctgatctcccagcagaaagctttctttgctaagatggtggtggatgcagtgatgatgctcgatgatttgctgcagcttaaaatgattggaatcaagaaggtacagggtggagccctcgaggattctcagctggtagctggtgttgcattcaagaagactttctcttacgctgggtttgaaatgcaacccaaaaagtaccacaatcccaagattgcccttttgaatgtcgagctcgagttgaaagctgagaaagacaatgctgagataagagtccacacagttgaggattatcaggcaattgttgatgctgagtggaacattctctatgacaagttagagaagatccatcattctggagccaaagttgtcttgtccaaactccccattggggatgtggccacccagtactttgctgacagggacatgttctgtgctggccgagtacctgaggaggatctgaagaggacaatgatggcctgtggaggctcaatccagaccagtgtgaatgctctgtcagcagatgtgctgggtcgatgccaggtgtttgaagagacccagattggaggcgagaggtacaatttttttactggctgccccaaggccaagacatgcaccttcattctccgtggcggcgccgagcagtttatggaggagacagagcggtccctgcatgatgccatcatgatcgtcaggagggccatcaagaatgattcagtggtggctggtggcggggccattgagatggaactctccaagtacctgcgggattactcaaggactattccaggaaaacagcagctgttgattggggcatatgccaaggccttggagattatcccacgccagctgtgtgacaatgctggctttgatgccacaaacattctcaacaagctgcgggctcggcatgcccaggggggtacatggtatggagtagacatcaacaacgaggacattgctgacaactttgaagctttcgtgtgggagccagctatggtgcggatcaatgcgctgacagcagcctctgaggctgcgtgcctgatcgtgtctgtagatgaaaccatcaagaacccccgctcgactgtggatgctcccacagcagcaggccggggccgtggtcgtggccgcccccactgagaggcaccccacccatcacatggctggctggctgctgggtgcacttaccctccttggcttggttacttcattttacaaggaaggggtagtaattggcccactctcttcttactggaggctatttaaataaaatgtaagacttca

SEQ ID NO: 454010 - DNA, 1852 bp, Homo sapiens
gggtgtgttgctggtctccctgatcgtgagtcgtgattgatacagattaagcgacggtaaactagccttccatgaatcagtgcccacaccagttatcctattgaaagaggggactgatagctcccaaggcatcccccagcttgtgagtaacatcagtgcctgccaggtgattgctgaggctgtaagaactaccctgggtccccgtggcatggacaagcttattgtagatggcagaggcaaagcaacaatttctaatgatggggccacaattctgaaacttcttgatgttgtccatcctgcagcaaagactttggtagacattgccaaatcccaagatgctgaggtgggtgatggcaccacctcagtgaccttgctggctgcagagtttctgaagcaggtgaaaccctatgtggaggaaggtttacacccccagatcatcattcgagctttccgcacagccacccagctggcagttaacaagatcaaagagattgctgtgaccgtgaagaaggcagataaagtggagcagaggaagctgctggaaaagtgtgccatgaccgctctgagctccaagctgatctcccagcagaaagctttctttgctaagatggtggtggatgcagtgatgatgctcgatgatttgctgcagcttaaaatgattggaatcaagaaggtacagggtggagccctcgaggattctcagctggtagctggtgttgcattcaagaagactttctcttacgctgggtttgaaatgcaacccaaaaagtaccacaatcccaagattgcccttttgaatgtcgagctcgagttgaaagctgagaaagacaatgctgagataagagtccacacagttgaggattatcaggcaattgttgatgctgagtggaacattctctatgacaagttagagaagatccatcattctggagccaaagttgtcttgtccaaactccccattggggatgtggccacccagtactttgctgacagggacatgttctgtgctggccgagtacctgaggaggatctgaagaggacaatgatggcctgtggaggctcaatccagaccagtgtgaatgctctgtcagcagatgtgctgggtcgatgccaggtgtttgaagagacccagattggaggcgagaggtacaatttttttactggctgccccaaggccaagacatgcaccttcattctccgtggcggcgccgagcagtttatggaggagacagagcggtccctgcatgatgccatcatgatcgtcaggagggccatcaagaatgattcagtggtggctggtggcggggccattgagatggaactctccaagtacctgcgggattactcaaggactattccaggaaaacagcagctgttgattggggcatatgccaaggccttggagattatcccacgccagctgtgtgacaatgctggctttgatgccacaaacattctcaacaagctgcgggctcggcatgcccaggggggtacatggtatggagtagacatcaacaacgaggacattgctgacaactttgaagctttcgtgtgggagccagctatggtgcggatcaatgcgctgacagcagcctctgaggctgcgtgcctgatcgtgtctgtagatgaaaccatcaagaacccccgctcgactgtggatgctcccacagcagcaggccggggccgtggtcgtggccgcccccactgagaggcaccccacccatcacatggctggctggctgctgggtgcacttaccctccttggcttggttacttcattttacaaggaaggggtagtaattggcccactctcttcttactggaggctatttaaataaaatgtaagacttca

SEQ ID NO: 454011 - DNA, 1877 bp, Homo sapiens
aaaaaatataaaaaaaaataaacgtttccgcgaagaccggtgtagacgcttctgctgccgaggcctgtcccgcgcggagtggggagtggtggtcttccaaaatgatgcccacaccagttatcctattgaaagaggggactgatagctcccaaggcatcccccagcttgtgagtaacatcagtgcctgccaggtgattgctgaggctgtaagaactaccctgggtccccgtggcatggacaagcttattgtagatggcagaggcaaagcaacaatttctaatgatggggccacaattctgaaacttcttgatgttgtccatcctgcagcaaagactttggtagacattgccaaatcccaagatgctgaggtgggtgatggcaccacctcagtgaccttgctggctgcagagtttctgaagcaggtgaaaccctatgtggaggaaggtttacacccccagatcatcattcgagctttccgcacagccacccagctggcagttaacaagatcaaagagattgctgtgaccgtgaagaaggcagataaagtggagcagaggaagctgctggaaaagtgtgccatgaccgctctgagctccaagctgatctcccagcagaaagctttctttgctaagatggtggtggatgcagtgatgatgctcgatgatttgctgcagcttaaaatgattggaatcaagaaggtacagggtggagccctcgaggattctcagctggtagctggtgttgcattcaagaagactttctcttacgctgggtttgaaatgcaacccaaaaagtaccacaatcccaagattgcccttttgaatgtcgagctcgagttgaaagctgagaaagacaatgctgagataagagtccacacagttgaggattatcaggcaattgttgatgctgagtggaacattctctatgacaagttagagaagatccatcattctggagccaaagttgtcttgtccaaactccccattggggatgtggccacccagtactttgctgacagggacatgttctgtgctggccgagtacctgaggaggatctgaagaggacaatgatggcctgtggaggctcaatccagaccagtgtgaatgctctgtcagcagatgtgctgggtcgatgccaggtgtttgaagagacccagattggaggcgagaggtacaatttttttactggctgccccaaggccaagacatgcaccttcattctccgtggcggcgccgagcagtttatggaggagacagagcggtccctgcatgatgccatcatgatcgtcaggagggccatcaagaatgattcagtggtggctggtggcggggccattgagatggaactctccaagtacctgcgggattactcaaggactattccaggaaaacagcagctgttgattggggcatatgccaaggccttggagattatcccacgccagctgtgtgacaatgctggctttgatgccacaaacattctcaacaagctgcgggctcggcatgcccaggggggtacatggtatggagtagacatcaacaacgaggacattgctgacaactttgaagctttcgtgtgggagccagctatggtgcggatcaatgcgctgacagcagcctctgaggctgcgtgcctgatcgtgtctgtagatgaaaccatcaagaacccccgctcgactgtggatgctcccacagcagcaggccggggccgtggtcgtggccgcccccactgagaggcaccccacccatcacatggctggctggctgctgggtgcacttaccctccttggcttggttacttcattttacaaggaaggggtagtaattggcccactctcttcttactggaggctatttaaataaaatgtaagacttca

SEQ ID NO: 454012 - DNA, 1629 bp, Homo sapiens
  misc_feature (23)..(23): n is a, c, g, or t
  misc_feature (28)..(28): n is a, c, g, or t
aataacggcctaggtacgagctngggtnaatcggcacgagggagaagaggggagagtggcgggccgctgaataagcttccaaaatgatgaaaacgtgtatttcctgtcatcatcttccaggtgggtgatggcaccacctcagtgaccttgctggctgcagagtttctgaagcaggtgaaaccctatgtggaggaaggtttacacccccagatcatcattcgagctttccgcacagccacccagctggcagttaacaagatcaaagagattgctgtgaccgtgaagaaggcagataaagtggagcagaggaagctgctggaaaagtgtgccatgaccgctctgagctccaagctgatctcccagcagaaagctttctttgctaagatggtggtggatgcagtgatgatgctcgatgatttgctgcagcttaaaatgattggaatcaagaaggtacagggtggagccctcgaggattctcagctggtagctggtgttgcattcaagaagactttctcttacgctgggtttgaaatgcaacccaaaaagtaccacaatcccaagattgcccttttgaatgtcgagctcgagttgaaagctgagaaagacaatgctgagataagagtccacacagttgaggattatcaggcaattgttgatgctgagtggaacattctctatgacaagttagagaagatccatcattctggagccaaagttgtcttgtccaaactccccattggggatgtggccacccagtactttgctgacagggacatgttctgtgctggccgagtacctgaggaggatctgaagaggacaatgatggcctgtggaggctcaatccagaccagtgtgaatgctctgtcagcagatgtgctgggtcgatgccaggtgtttgaagagacccagattggaggcgagaggtacaatttttttactggctgccccaaggccaagacatgcaccttcattctccgtggcggcgccgagcagtttatggaggagacagagcggtccctgcatgatgccatcatgatcgtcaggagggccatcaagaatgattcagtggtggctggtggcggggccattgagatggaactctccaagtacctgcgggattactcaaggactattccaggaaaacagcagctgttgattggggcatatgccaaggccttggagattatcccacgccagctgtgtgacaatgctggctttgatgccacaaacattctcaacaagctgcgggctcggcatgcccaggggggtacatggtatggagtagacatcaacaacgaggacattgctgacaactttgaagctttcgtgtgggagccagctatggtgcggatcaatgcgctgacagcagcctctgaggctgcgtgcctgatcgtgtctgtagatgaaaccatcaagaacccccgctcgactgtggatgctcccacagcagcaggccggggccgtggtcgtggccgcccccactgagaggcaccccacccatcacatggctggctggctgctgggtgcacttaccctccttggcttggttacttcattttacaaggaaggggtagtaattggcccactctcttcttactggaggctatttaaataaaatgtaagacttca

SEQ ID NO: 454013 - DNA, 1598 bp, Homo sapiens
  misc_feature (23)..(23): n is a, c, g, or t
  misc_feature (28)..(28): n is a, c, g, or t
aataacggcctaggtacgagctngggtnaatcggcacgagggagaagaggggagagtggcgggccgctgaataagcttccaaaatgatggtgggtgatggcaccacctcagtgaccttgctggctgcagagtttctgaagcaggtgaaaccctatgtggaggaaggtttacacccccagatcatcattcgagctttccgcacagccacccagctggcagttaacaagatcaaagagattgctgtgaccgtgaagaaggcagataaagtggagcagaggaagctgctggaaaagtgtgccatgaccgctctgagctccaagctgatctcccagcagaaagctttctttgctaagatggtggtggatgcagtgatgatgctcgatgatttgctgcagcttaaaatgattggaatcaagaaggtacagggtggagccctcgaggattctcagctggtagctggtgttgcattcaagaagactttctcttacgctgggtttgaaatgcaacccaaaaagtaccacaatcccaagattgcccttttgaatgtcgagctcgagttgaaagctgagaaagacaatgctgagataagagtccacacagttgaggattatcaggcaattgttgatgctgagtggaacattctctatgacaagttagagaagatccatcattctggagccaaagttgtcttgtccaaactccccattggggatgtggccacccagtactttgctgacagggacatgttctgtgctggccgagtacctgaggaggatctgaagaggacaatgatggcctgtggaggctcaatccagaccagtgtgaatgctctgtcagcagatgtgctgggtcgatgccaggtgtttgaagagacccagattggaggcgagaggtacaatttttttactggctgccccaaggccaagacatgcaccttcattctccgtggcggcgccgagcagtttatggaggagacagagcggtccctgcatgatgccatcatgatcgtcaggagggccatcaagaatgattcagtggtggctggtggcggggccattgagatggaactctccaagtacctgcgggattactcaaggactattccaggaaaacagcagctgttgattggggcatatgccaaggccttggagattatcccacgccagctgtgtgacaatgctggctttgatgccacaaacattctcaacaagctgcgggctcggcatgcccaggggggtacatggtatggagtagacatcaacaacgaggacattgctgacaactttgaagctttcgtgtgggagccagctatggtgcggatcaatgcgctgacagcagcctctgaggctgcgtgcctgatcgtgtctgtagatgaaaccatcaagaacccccgctcgactgtggatgctcccacagcagcaggccggggccgtggtcgtggccgcccccactgagaggcaccccacccatcacatggctggctggctgctgggtgcacttaccctccttggcttggttacttcattttacaaggaaggggtagtaattggcccactctcttcttactggaggctatttaaataaaatgtaagacttca

SEQ ID NO: 454014 - DNA, 1533 bp, Homo sapiens
agttacaagacctagaagtgttttttcagctgtagagtagaaatgcttaggatttgggagtgaacagactcaggactattgagagattgaggtccacttcagcagtttgtctttagcatgagagactcattcaacttctgttcttggcaggcagttaacaagatcaaagagattgctgtgaccgtgaagaaggcagataaagtggagcagaggaagctgctggaaaagtgtgccatgaccgctctgagctccaagctgatctcccagcagaaagctttctttgctaagatggtggtggatgcagtgatgatgctcgatgatttgctgcagcttaaaatgattggaatcaagaaggtacagggtggagccctcgaggattctcagctggtagctggtgttgcattcaagaagactttctcttacgctgggtttgaaatgcaacccaaaaagtaccacaatcccaagattgcccttttgaatgtcgagctcgagttgaaagctgagaaagacaatgctgagataagagtccacacagttgaggattatcaggcaattgttgatgctgagtggaacattctctatgacaagttagagaagatccatcattctggagccaaagttgtcttgtccaaactccccattggggatgtggccacccagtactttgctgacagggacatgttctgtgctggccgagtacctgaggaggatctgaagaggacaatgatggcctgtggaggctcaatccagaccagtgtgaatgctctgtcagcagatgtgctgggtcgatgccaggtgtttgaagagacccagattggaggcgagaggtacaatttttttactggctgccccaaggccaagacatgcaccttcattctccgtggcggcgccgagcagtttatggaggagacagagcggtccctgcatgatgccatcatgatcgtcaggagggccatcaagaatgattcagtggtggctggtggcggggccattgagatggaactctccaagtacctgcgggattactcaaggactattccaggaaaacagcagctgttgattggggcatatgccaaggccttggagattatcccacgccagctgtgtgacaatgctggctttgatgccacaaacattctcaacaagctgcgggctcggcatgcccaggggggtacatggtatggagtagacatcaacaacgaggacattgctgacaactttgaagctttcgtgtgggagccagctatggtgcggatcaatgcgctgacagcagcctctgaggctgcgtgcctgatcgtgtctgtagatgaaaccatcaagaacccccgctcgactgtggatgctcccacagcagcaggccggggccgtggtcgtggccgcccccactgagaggcaccccacccatcacatggctggctggctgctgggtgcacttaccctccttggcttggttacttcattttacaaggaaggggtagtaattggcccactctcttcttactggaggctatttaaataaaatgtaagacttca

SEQ ID NO: 454015 - DNA, 1266 bp, Homo sapiens
  misc_feature (28)..(28): n is a, c, g, or t
cggacgcgtgggtcgacccacgcgtccntggatgcagtgatgatgctcgatgatttgctgcagcttaaaatgattggaatcaagaaggtacagggtggagccctcgaggattctcagctggtagctggtgttgcattcaagaagactttctcttacgctgggtttgaaatgcaacccaaaaagtaccacaatcccaagattgcccttttgaatgtcgagctcgagttgaaagctgagaaagacaatgctgagataagagtccacacagttgaggattatcaggcaattgttgatgctgagtggaacattctctatgacaagttagagaagatccatcattctggagccaaagttgtcttgtccaaactccccattggggatgtggccacccagtactttgctgacagggacatgttctgtgctggccgagtacctgaggaggatctgaagaggacaatgatggcctgtggaggctcaatccagaccagtgtgaatgctctgtcagcagatgtgctgggtcgatgccaggtgtttgaagagacccagattggaggcgagaggtacaatttttttactggctgccccaaggccaagacatgcaccttcattctccgtggcggcgccgagcagtttatggaggagacagagcggtccctgcatgatgccatcatgatcgtcaggagggccatcaagaatgattcagtggtggctggtggcggggccattgagatggaactctccaagtacctgcgggattactcaaggactattccaggaaaacagcagctgttgattggggcatatgccaaggccttggagattatcccacgccagctgtgtgacaatgctggctttgatgccacaaacattctcaacaagctgcgggctcggcatgcccaggggggtacatggtatggagtagacatcaacaacgaggacattgctgacaactttgaagctttcgtgtgggagccagctatggtgcggatcaatgcgctgacagcagcctctgaggctgcgtgcctgatcgtgtctgtagatgaaaccatcaagaacccccgctcgactgtggatgctcccacagcagcaggccggggccgtggtcgtggccgcccccactgagaggcaccccacccatcacatggctggctggctgctgggtgcacttaccctccttggcttggttacttcattttacaaggaaggggtagtaattggcccactctcttcttactggaggctatttaaataaaatgtaagacttca

SEQ ID NO: 454016 - DNA, 1279 bp, Homo sapiens
tggcgaattcggcacgagggcagaacccaggagctccaagaaaggccacccatagagctcatcctctgtggaatcactgccggttagaacactgaggtcaagccagtcctcccatggtcatgccacccaccagggaagcatgcctgatctcttctttactgccagccttgaggagagcagaagcctccatttttaaagacaaagaagtacccttggagttttgaatgtcgagctcgagttgaaagctgagaaagacaatgctgagataagagtccacacagttgaggattatcaggcaattgttgatgctgagtggaacattctctatgacaagttagagaagatccatcattctggagccaaagttgtcttgtccaaactccccattggggatgtggccacccagtactttgctgacagggacatgttctgtgctggccgagtacctgaggaggatctgaagaggacaatgatggcctgtggaggctcaatccagaccagtgtgaatgctctgtcagcagatgtgctgggtcgatgccaggtgtttgaagagacccagattggaggcgagaggtacaatttttttactggctgccccaaggccaagacatgcaccttcattctccgtggcggcgccgagcagtttatggaggagacagagcggtccctgcatgatgccatcatgatcgtcaggagggccatcaagaatgattcagtggtggctggtggcggggccattgagatggaactctccaagtacctgcgggattactcaaggactattccaggaaaacagcagctgttgattggggcatatgccaaggccttggagattatcccacgccagctgtgtgacaatgctggctttgatgccacaaacattctcaacaagctgcgggctcggcatgcccaggggggtacatggtatggagtagacatcaacaacgaggacattgctgacaactttgaagctttcgtgtgggagccagctatggtgcggatcaatgcgctgacagcagcctctgaggctgcgtgcctgatcgtgtctgtagatgaaaccatcaagaacccccgctcgactgtggatgctcccacagcagcaggccggggccgtggtcgtggccgcccccactgagaggcaccccacccatcacatggctggctggctgctgggtgcacttaccctccttggcttggttacttcattttacaaggaaggggtagtaattggcccactctcttcttactggaggctatttaaataaaatgtaagacttca

SEQ ID NO: 454017 - DNA, 1030 bp, Homo sapiens
tgggtgtgaatcggcaccgagggtccacacagttgaggattatcaggcaattgttgatgctgagtggaacattctctatgacaagttagagaagatccatcattctggagccaaagttgtcttgtccaaactccccattggggatgtggccacccagtactttgctgacagggacatgttctgtgctggccgagtacctgaggaggatctgaagaggacaatgatggcctgtggaggctcaatccagaccagtgtgaatgctctgtcagcagatgtgctgggtcgatgccaggtgtttgaagagacccagattggaggcgagaggtacaatttttttactggctgccccaaggccaagacatgcaccttcattctccgtggcggcgccgagcagtttatggaggagacagagcggtccctgcatgatgccatcatgatcgtcaggagggccatcaagaatgattcagtggtggctggtggcggggccattgagatggaactctccaagtacctgcgggattactcaaggactattccaggaaaacagcagctgttgattggggcatatgccaaggccttggagattatcccacgccagctgtgtgacaatgctggctttgatgccacaaacattctcaacaagctgcgggctcggcatgcccaggggggtacatggtatggagtagacatcaacaacgaggacattgctgacaactttgaagctttcgtgtgggagccagctatggtgcggatcaatgcgctgacagcagcctctgaggctgcgtgcctgatcgtgtctgtagatgaaaccatcaagaacccccgctcgactgtggatgctcccacagcagcaggccggggccgtggtcgtggccgcccccactgagaggcaccccacccatcacatggctggctggctgctgggtgcacttaccctccttggcttggttacttcattttacaaggaaggggtagtaattggcccactctcttcttactggaggctatttaaataaaatgtaagacttca

SEQ ID NO: 454018 - DNA, 1086 bp, Homo sapiens
cggtccccatgcacagttcggtccccatgcacagttcggtccccatgcacagttcggtccccatgcacagttcggtccccatgcacagttgaggattatcaggcaattgttgatgctgagtggaacattctctatgacaagttagagaagatccatcattctggagccaaagttgtcttgtccaaactccccattggggatgtggccacccagtactttgctgacagggacatgttctgtgctggccgagtacctgaggaggatctgaagaggacaatgatggcctgtggaggctcaatccagaccagtgtgaatgctctgtcagcagatgtgctgggtcgatgccaggtgtttgaagagacccagattggaggcgagaggtacaatttttttactggctgccccaaggccaagacatgcaccttcattctccgtggcggcgccgagcagtttatggaggagacagagcggtccctgcatgatgccatcatgatcgtcaggagggccatcaagaatgattcagtggtggctggtggcggggccattgagatggaactctccaagtacctgcgggattactcaaggactattccaggaaaacagcagctgttgattggggcatatgccaaggccttggagattatcccacgccagctgtgtgacaatgctggctttgatgccacaaacattctcaacaagctgcgggctcggcatgcccaggggggtacatggtatggagtagacatcaacaacgaggacattgctgacaactttgaagctttcgtgtgggagccagctatggtgcggatcaatgcgctgacagcagcctctgaggctgcgtgcctgatcgtgtctgtagatgaaaccatcaagaacccccgctcgactgtggatgctcccacagcagcaggccggggccgtggtcgtggccgcccccactgagaggcaccccacccatcacatggctggctggctgctgggtgcacttaccctccttggcttggttacttcattttacaaggaaggggtagtaattggcccactctcttcttactggaggctatttaaataaaatgtaagacttca

SEQ ID NO: 454019 - DNA, 866 bp, Homo sapiens
tcccaggcgtcgagcttctgggtatttctattgcgcgaggcattgtgggttgctgggcggcccggtctcggagaagaggggagagtggcgggccgctgaataagcttccaaaatgatgcccacaccagttatcctattgaaagaggggactgatagctcccaaggcatcccccagcttgtgagtaacatcagtgcctgccaggtgattgctgaggctgtaagaactaccctgggtccccgtggcatggacaagcttattgtagatggcagaggcaaagcaacaatttctaatgatggggccacaattctgaaacttcttgatgttgtccatcctgcagcaaagactttggtagacattgccaaatcccaagatgctgaggtgggtgatggcaccacctcagtgaccttgctggctgcagagtttctgaagcaggtgaaaccctatgtggaggaaggtttacacccccagatcatcattcgagctttccgcacagccacccagctggcagttaacaagatcaaagagattgctgtgaccgtgaagaaggcagataaagtggagcagaggaagctgctggaaaagtgtgccatgaccgctctgagctccaagctgatctcccagcagaaagctttctttgctaagatggtggtggatgcagtgatgatgctcgatgatttgctgcagcttaaaatgattggaatcaagaaggtacagggtggagccctcgagatctcagtggaaccgggtgtgctccaaaaattctctaaccgggttgaatgacccccaatttcccaatcccaaatggcgcttgaagtggcagcccgtttataccggacaaccgccgccaaagccccccggagtctcc

SEQ ID NO: 454020 - DNA, 926 bp, Homo sapiens
  misc_feature (486)..(486): n is a, c, g, or t
tcccaggcgtcgagcttctgggtatttctattgcgcgaggcattgtgggttgctgggcggcccggtctcggagaagaggggagagtggcgggccgctgaataagcttccaaaatgatgcccacaccagttatcctattgaaagaggggactgatagctcccaaggcatcccccagcttgtgagtaacatcagtgcctgccaggtgattgctgaggctgtaagaactaccctgggtccccgtggcatggacaagcttattgtagatggcagaggcaaagcaacaatttctaatgatggggccacaattctgaaacttcttgatgttgtccatcctgcagcaaagactttggtagacattgccaaatcccaagatgctgaggtgggtgatggcaccacctcagtgaccttgctggctgcagagtttctgaagcaggtgaaaccctatgtggaggaaggtttacacccccagatcatcattcgagcttnttcgcgcacaggccaacctccagctggacatacaatcagaatggtgacggaagcatagtgagcagagagcggaagtgtgcatgacgtctggctcagctgatctcagaagctctgctagatgggatgcggatgatgctcatgatgctgttaagatgatcaagtcgggagctcgagatctcgtgtactgtgtgtcaagatttctacgcgggtgaatgcaccaaagtaccacaatcccaagatgcctttgtgtcgagctcgagtgaaagctgaaaagacagctgagatgagtccaaagttgagtatcgcatgtgagcgaggaaatctcatcaagtaaaaaccacatcgaccagtgtctgtcaatccatgggatgggcacagtattgctgacggaatgtcgcgggatactgaggatcgagagaatgaggctggaggtcaacaac

SEQ ID NO: 454021 - DNA, 779 bp, Homo sapiens
ccaccaagttcagagagtctgcgggttcctagcagtgtcttttggagtaccagtttacaagaggaaagttgaaagtagttccatattacctcctttcttttcctactcttttaggggggtacatggtatggagtagacatcaacaacgaggacattgctgacaactttgaagctttcgtgtgggagccagctatggtgcggatcaatgcgctgacagcagcctctgaggctgcgtgcctgatcgtgtctgtagatgaaaccatcaagaacccccgctcgactgtggatgctcccacagcagcaggccggggccgtggtcgtggccgcccccactgagaggcaccccacccatcacatggctggctggctgctgggtgcacttaccctccttggcttggttacttcattttacaaggaaggggtagtaattggcccactctcttcttactggaggctatttaaataaaatgtaagacttcaaaaaaaaaaaaaaaaaactcgagactagtttctctccagaaatcctgggcccccagaagaccttttgcccacacacactcctttcccccttgtccctggggcactcccccaggtttgtcgcactagtcagagtgtcccttttggcaggggactgggcccaggggtcctcggccattctgtccatcctcctctccatgcaagtgctgttggggcaggagtccccatgccgggtgtgacttcggcaaccacgtacaaggccacccagctgctgcatctgtgcctgtccgagaactgatctc

SEQ ID NO: 454022 - DNA, 1043 bp, Homo sapiens
  misc_feature (23)..(23): n is a, c, g, or t
  misc_feature (28)..(28): n is a, c, g, or t
  misc_feature (885)..(885): n is a, c, g, or t
aataacggcctaggtacgagctngggtnaatcggcacgagggagaagaggggagagtggcgggccgctgaataagcttccaaaatgatgcccacaccagttatcctattgaaagaggggactgatagctcccaaggcatcccccagcttgtgagtaacatcagtgcctgccaggtgattgctgaggctgtaagaactaccctgggtccccgtggcatggacaagcttattgtagatggcagaggcaaagcaacaatttctaatgatggggccacaattctgaaacttcttgatgttgtccatcctgcagcaaagactttggtagacattgccaaatcccaagatgctgaggtgggtgatggcaccacctcagtgaccttgctggctgcagagtttctgaagcaggtgaaaccctatgtggaggaaggtttacacccccagatcatcattcgagctttccgcacagccacccagctggcagttaacaagatcaaagagattgctgtgaccgtgaagaaggcagataaagtggagcagaggaagctgctggaaaagtgtgccatgaccgctctgagctccaagctgatctcccagcagaaagctttctttgctaagatggtggtggatgcagtgatgatgctcgatgatttgctgcagcttaaaatgattggaatcaagaaggtacagggtggagccctcgaggattctcagctggtagctggtgttgcattcaagaagactttctcttacgctgggtttgaaatgcaacccaaaaagtaccacaatcccaagattgcccttttgaatgtcgagctcgagttgaaagctgagaaagacaatgctgagataagagtccacacagttgagacccgggaggattcagcantgtgtgctgggggaacttcttgcagttaggaaaacccatcgggcagggtggcaatccagggggcccgaatggaaagacgcggcggcgaacgggccgaaggaagggcgggcaccaggaagtcaagggtccgcggaaccggggccgggcggaacacgggg

SEQ ID NO: 454023 - DNA, 995 bp, Homo sapiens
  misc_feature (886)..(886): n is a, c, g, or t
  misc_feature (893)..(893): n is a, c, g, or t
  misc_feature (902)..(902): n is a, c, g, or t
  misc_feature (907)..(907): n is a, c, g, or t
  misc_feature (911)..(911): n is a, c, g, or t
  misc_feature (915)..(915): n is a, c, g, or t
  misc_feature (918)..(918): n is a, c, g, or t
  misc_feature (920)..(921): n is a, c, g, or t
aaaaaatataaaaaaaaataaacgtttccgcgaagaccggtgtagacgcttctgctgccgaggcctgtcccgcgcggagtggggagtggtggtcttccaaaatgatgcccacaccagttatcctattgaaagaggggactgatagctcccaaggcatcccccagcttgtgagtaacatcagtgcctgccaggtgattgctgaggctgtaagaactaccctgggtccccgtggcatggacaagcttattgtagatggcagaggcaaagcaacaatttctaatgatggggccacaattctgaaacttcttgatgttgtccatcctgcagcaaagactttggtagacattgccaaatcccaagatgctgaggtgggtgatggcaccacctcagtgaccttgctggctgcagagtttctgaagcaggtgaaaccctatgtggaggaaggtttacacccccagatcatcattcgagctttccgcacagccacccagctggcagttaacaagatcaaagagattgctgtgaccgtgaagaaggcagataaagtggagcagaggaagctgctggaaaagtgtgccatgaccgctctgagctccaagctgatctcccagcagaaagctttctttgctaagatggtggtggatgcagtgatgatgctcgatgatttgctgcagcttaaaatgattggaatcaagaaggtacagggtggagccctcgaggattctcagctggtagctggtgttgcattcaagaagactttctcttacgctgggtttgaaatgcaacccaaaaagtaccacaatcccaagattgcccttttgaatgtcgagctcgagttgaaagctgagaaagacaatgctgagataagagtccacacagttgaggnttagggntccccccgntgggngttntccngcntnntggtgctgggggggacttctctttgaccggttggggaggtcctcttcggggcccggtgttggtccccccctggg

SEQ ID NO: 454024 - DNA, 424 bp, Homo sapiens
tactactacattcgcggccggtcgacttctcaacaagctgcgggctcggcatgcccaggggggtacatggtatggagtagacatcaacaacgaggacattgctgacaactttgaagctttcgtgtgggagccagctatggtgcggatcaatgcgctgacagcagcctctgaggctgcgtgcctgatcgtgtctgtagatgaaaccatcaagaacccccgctcgactgtggatgctcccacagcagcaggccggggccgtggtcgtggccgcccccactgagaggcaccccacccatcacatggctggctggctgctgggtgcacttaccctccttggcttggttacttcattttacaaggaaggggtagtaattggcccactctcttcttactggaggctatttaaataaaatgtaagacttca

SEQ ID NO: 454025 - DNA, 1888 bp, Homo sapiens
tcccaggcgtcgagcttctgggtatttctattgcgcgaggcattgtgggttgctgggcggcccggtctcggagaagaggggagagtggcgggccgctgaataagcttccaaaatgatgcccacaccagttatcctattgaaagaggggactgatagctcccaaggcatcccccagcttgtgagtaacatcagtgcctgccaggtgattgctgaggctgtaagaactaccctgggtccccgtggcatggacaagcttattgtagatggcagaggcaaagcaacaatttctaatgatggggccacaattctgaaacttcttgatgttgtccatcctgcagcaaagactttggtagacattgccaaatcccaagatgctgaggtgggtgatggcaccacctcagtgaccttgctggctgcagagtttctgaagcaggtgaaaccctatgtggaggaaggtttacacccccagatcatcattcgagctttccgcacagccacccagctggcagttaacaagatcaaagagattgctgtgaccgtgaagaaggcagataaagtggagcagaggaagctgctggaaaagtgtgccatgaccgctctgagctccaagctgatctcccagcagaaagctttctttgctaagatggtggtggatgcagtgatgatgctcgatgatttgctgcagcttaaaatgattggaatcaagaaggtacagggtggagccctcgaggattctcagctggtagctggtgttgcattcaagaagactttctcttacgctgggtttgaaatgcaacccaaaaagtaccacaatcccaagattgcccttttgaatgtcgagctcgagttgaaagctgagaaagacaatgctgagataagagtccacacagttgaggattatcaggcaattgttgatgctgagtggaacattctctatgacaagttagagaagatccatcattctggagccaaagttgtcttgtccaaactccccattggggatgtggccacccagtactttgctgacagggacatgttctgtgctggccgagtacctgaggaggatctgaagaggacaatgatggcctgtggaggctcaatccagaccagtgtgaatgctctgtcagcagatgtgctgggtcgatgccaggtgtttgaagagacccagattggaggcgagaggtacaatttttttactggctgccccaaggccaagacatgcaccttcattctccgtggcggcgccgagcagtttatggaggagacagagcggtccctgcatgatgccatcatgatcgtcaggagggccatcaagaatgattcagtggtggctggtggcggggccattgagatggaactctccaagtacctgcgggattactcaaggactattccaggaaaacagcagctgttgattggggcatatgccaaggccttggagattatcccacgccagctgtgtgacaatgctggctttgatgccacaaacattctcaacaagctgcgggctcggcatgcccaggggggtacatggtatggagtagacatcaacaacgaggacattgctgacaactttgaagctttcgtgtgggagccagctatggtgcggatcaatgcgctgacagcagcctctgaggctgcgtgcctgatcgtgtctgtagatgaaaccatcaagaacccccgctcgactgtggatgctcccacagcagcaggccggggccgtggtcgtggccgcccccactgagaggcaccccacccatcacatggctggctggctgctgggtgcacttaccctccttggcttggttacttcattttacaaggaaggggtagtaattggcccactctcttcttactggaggctatttaaataaaatgtaagacttca

SEQ ID NO: 454026 - DNA, 2033 bp, Homo sapiens
  misc_feature (1910)..(1910): n is a, c, g, or t
tcccaggcgtcgagcttctgggtatttctattgcgcgaggcattgtgggttgctgggcggcccggtctcggagaagaggggagagtggcgggccgctgaataagcttccaaaatgatgcccacaccagttatcctattgaaagaggggactgatagctcccaaggcatcccccagcttgtgagtaacatcagtgcctgccaggtgattgctgaggctgtaagaactaccctgggtccccgtggcatggacaagcttattgtagatggcagaggcaaagcaacaatttctaatgatggggccacaattctgaaacttcttgatgttgtccatcctgcagcaaagactttggtagacattgccaaatcccaagatgctgaggtgggtgatggcaccacctcagtgaccttgctggctgcagagtttctgaagcaggtgaaaccctatgtggaggaaggtttacacccccagatcatcattcgagctttccgcacagccacccagctggcagttaacaagatcaaagagattgctgtgaccgtgaagaaggcagataaagtggagcagaggaagctgctggaaaagtgtgccatgaccgctctgagctccaagctgatctcccagcagaaagctttctttgctaagatggtggtggatgcagtgatgatgctcgatgatttgctgcagcttaaaatgattggaatcaagaaggtacagggtggagccctcgaggattctcagctggtagctggtgttgcattcaagaagactttctcttacgctgggtttgaaatgcaacccaaaaagtaccacaatcccaagattgcccttttgaatgtcgagctcgagttgaaagctgagaaagacaatgctgagataagagtccacacagttgaggattatcaggcaattgttgatgctgagtggaacattctctatgacaagttagagaagatccatcattctggagccaaagttgtcttgtccaaactccccattggggatgtggccacccagtactttgctgacagggacatgttctgtgctggccgagtacctgaggaggatctgaagaggacaatgatggcctgtggaggctcaatccagaccagtgtgaatgctctgtcagcagatgtgctgggtcgatgccaggtgtttgaagagacccagattggaggcgagaggtacaatttttttactggctgccccaaggccaagacatgcaccttcattctccgtggcggcgccgagcagtttatggaggagacagagcggtccctgcatgatgccatcatgatcgtcaggagggccatcaagaatgattcagtggtggctggtggcggggccattgagatggaactctccaagtacctgcgggattactcaaggactattccaggaaaacagcagctgttgattggggcatatgccaaggccttggagattatcccacgccagctgtgtgacaatgctggctttgatgccacaaacattctcaacaagctgcgggctcggcatgcccaggggggtacatggtatggagtagacatcaacaacgaggacattgctgacaactttgaagctttcgtgtgggagccagctatggtgcggatcaatgcgctgacagcagcctctgaggctgcgtgcctgatcgtgtctgtagatgaaaccatcaagaacccccgctcgactgtggatgctcccacagcagcaggccggggccgtggtcgtggccgcccccactgagaggcaccccacccatcacatggctggctggctgctgggtgcacttaccctccttggcttggttacttcattttacaaggaaggggtagtaattggcccactctcttcttactggaggctatttaaataaaatgtaagacttcaaaaaaaaaaaacaaaacaacancaccccgggcaccaaagacgggccggaaacagggtacgaagggccgtgccaaacggaacggacccatttcggtccagggcaacgggggccccatgggcgataaccaagccgtcgtccacccca

SEQ ID NO: 454027 - DNA, 2203 bp, Homo sapiens
tcccaggcgtcgagcttctgggtatttctattgcgcgaggcattgtgggttgctgggcggcccggtctcggagaagaggggagagtggcgggccgctgaataagcttccaaaatgatgcccacaccagttatcctattgaaagaggggactgatagctcccaaggcatcccccagcttgtgagtaacatcagtgcctgccaggtgattgctgaggctgtaagaactaccctgggtccccgtggcatggacaagcttattgtagatggcagaggcaaagcaacaatttctaatgatggggccacaattctgaaacttcttgatgttgtccatcctgcagcaaagactttggtagacattgccaaatcccaagatgctgaggtgggtgatggcaccacctcagtgaccttgctggctgcagagtttctgaagcaggtgaaaccctatgtggaggaaggtttacacccccagatcatcattcgagctttccgcacagccacccagctggcagttaacaagatcaaagagattgctgtgaccgtgaagaaggcagataaagtggagcagaggaagctgctggaaaagtgtgccatgaccgctctgagctccaagctgatctcccagcagaaagctttctttgctaagatggtggtggatgcagtgatgatgctcgatgatttgctgcagcttaaaatgattggaatcaagaaggtacagggtggagccctcgaggattctcagctggtagctggtgttgcattcaagaagactttctcttacgctgggtttgaaatgcaacccaaaaagtaccacaatcccaagattgcccttttgaatgtcgagctcgagttgaaagctgagaaagacaatgctgagataagagtccacacagttgaggattatcaggcaattgttgatgctgagtggaacattctctatgacaagttagagaagatccatcattctggagccaaagttgtcttgtccaaactccccattggggatgtggccacccagtactttgctgacagggacatgttctgtgctggccgagtacctgaggaggatctgaagaggacaatgatggcctgtggaggctcaatccagaccagtgtgaatgctctgtcagcagatgtgctgggtcgatgccaggtgtttgaagagacccagattggaggcgagaggtacaatttttttactggctgccccaaggccaagacatgcaccttcattctccgtggcggcgccgagcagtttatggaggagacagagcggtccctgcatgatgccatcatgatcgtcaggagggccatcaagaatgattcagtggtggctggtggcggggccattgagatggaactctccaagtacctgcgggattactcaaggactattccaggaaaacagcagctgttgattggggcatatgccaaggccttggagattatcccacgccagctgtgtgacaatgctggctttgatgccacaaacattctcaacaagctgcgggctcggcatgcccaggggggtacatggtatggagtagacatcaacaacgaggacattgctgacaactttgaagctttcgtgtgggagccagctatggtgcggatcaatgcgctgacagcagcctctgaggctgcgtgcctgatcgtgtctgtagatgaaaccatcaagaacccccgctcgactgtggatgctcccacagcagcaggccggggccgtggtcgtggccgcccccactgagaggcaccccacccatcacatggctggctggctgctgggtgcacttaccctccttggcttggttacttcattttacaaggaaggggtagtaattggcccactctcttcttactggaggctatttaaataaaatgtaagacttcaaaaaaaaaaaaaaaaaaaaaaaaaaaaaaatttggggggcgccgcggccctaaaaagttttaaacacataccggtggggcgcggccggcgggcgcccaagtagggtaagtcggaggacacatgtggggccaaacgctgggtgcccaaagggaaacccgggcgcacgaacatagcggcgggggtttctccccacttaaaaaaacgcggcggggggggacccggacgcgttctggaaacaaacccagaaggggggtcagaagcggcaaggggtctacaacagggagcccaaggaaggcaaaaataaaatagcgcggg

SEQ ID NO: 454028 - DNA, 2255 bp, Homo sapiens
tcccaggcgtcgagcttctgggtatttctattgcgcgaggcattgtgggttgctgggcggcccggtctcggagaagaggggagagtggcgggccgctgaataagcttccaaaatgatgcccacaccagttatcctattgaaagaggggactgatagctcccaaggcatcccccagcttgtgagtaacatcagtgcctgccaggtgattgctgaggctgtaagaactaccctgggtccccgtggcatggacaagcttattgtagatggcagaggcaaagcaacaatttctaatgatggggccacaattctgaaacttcttgatgttgtccatcctgcagcaaagactttggtagacattgccaaatcccaagatgctgaggtgggtgatggcaccacctcagtgaccttgctggctgcagagtttctgaagcaggtgaaaccctatgtggaggaaggtttacacccccagatcatcattcgagctttccgcacagccacccagctggcagttaacaagatcaaagagattgctgtgaccgtgaagaaggcagataaagtggagcagaggaagctgctggaaaagtgtgccatgaccgctctgagctccaagctgatctcccagcagaaagctttctttgctaagatggtggtggatgcagtgatgatgctcgatgatttgctgcagcttaaaatgattggaatcaagaaggtacagggtggagccctcgaggattctcagctggtagctggtgttgcattcaagaagactttctcttacgctgggtttgaaatgcaacccaaaaagtaccacaatcccaagattgcccttttgaatgtcgagctcgagttgaaagctgagaaagacaatgctgagataagagtccacacagttgaggattatcaggcaattgttgatgctgagtggaacattctctatgacaagttagagaagatccatcattctggagccaaagttgtcttgtccaaactccccattggggatgtggccacccagtactttgctgacagggacatgttctgtgctggccgagtacctgaggaggatctgaagaggacaatgatggcctgtggaggctcaatccagaccagtgtgaatgctctgtcagcagatgtgctgggtcgatgccaggtgtttgaagagacccagattggaggcgagaggtacaatttttttactggctgccccaaggccaagacatgcaccttcattctccgtggcggcgccgagcagtttatggaggagacagagcggtccctgcatgatgccatcatgatcgtcaggagggccatcaagaatgattcagtggtggctggtggcggggccattgagatggaactctccaagtacctgcgggattactcaaggactattccaggaaaacagcagctgttgattggggcatatgccaaggccttggagattatcccacgccagctgtgtgacaatgctggctttgatgccacaaacattctcaacaagctgcgggctcggcatgcccaggggggtacatggtatggagtagacatcaacaacgaggacattgctgacaactttgaagctttcgtgtgggagccagctatggtgcggatcaatgcgctgacagcagcctctgaggctgcgtgcctgatcgtgtctgtagatgaaaccatcaagaacccccgctcgactgtggatgctcccacagcagcaggccggggccgtggtcgtggccgcccccactgagaggcaccccacccatcacatggctggctggctgctgggtgcacttaccctccttggcttggttacttcattttacaaggaaggggtagtaattggcccactctcttcttactggaggctatttaaataaaatgtaagacttcaccaataatggacaaccccctcgctttcacaagtccctcgcaataggtagtcttctgatgtcacccatgccagccctaggatgaggggaccctgacatgtgtcttcctacccaccaaggtgcctgaaccccgaggcccagcaagaccatcccgtggtggtccgccctactttcattaagatcgcagccttgggtctcctgtagtgatgttaccaccgcatgtcttgttgtgagcccagcccggagttctcgtggcaagacagctacgcctcaagcgagatcggcctccttcccgctaatttgcatggacaatgctagaaggccggtgagtgtgaggattggccccggacttgttggcccacggaaact

SEQ ID NO: 454029 - DNA, 1887 bp, Homo sapiens
  misc_feature (1824)..(1824): n is a, c, g, or t
  misc_feature (1827)..(1827): n is a, c, g, or t
tcccaggcgtcgagcttctgggtatttctattgcgcgaggcattgtgggttgctgggcggcccggtctcggagaagaggggagagtggcgggccgctgaataagcttccaaaatgatgcccacaccagttatcctattgaaagaggggactgatagctcccaaggcatcccccagcttgtgagtaacatcagtgcctgccaggtgattgctgaggctgtaagaactaccctgggtccccgtggcatggacaagcttattgtagatggcagaggcaaagcaacaatttctaatgatggggccacaattctgaaacttcttgatgttgtccatcctgcagcaaagactttggtagacattgccaaatcccaagatgctgaggtgggtgatggcaccacctcagtgaccttgctggctgcagagtttctgaagcaggtgaaaccctatgtggaggaaggtttacacccccagatcatcattcgagctttccgcacagccacccagctggcagttaacaagatcaaagagattgctgtgaccgtgaagaaggcagataaagtggagcagaggaagctgctggaaaagtgtgccatgaccgctctgagctccaagctgatctcccagcagaaagctttctttgctaagatggtggtggatgcagtgatgatgctcgatgatttgctgcagcttaaaatgattggaatcaagaaggtacagggtggagccctcgaggattctcagctggtagctggtgttgcattcaagaagactttctcttacgctgggtttgaaatgcaacccaaaaagtaccacaatcccaagattgcccttttgaatgtcgagctcgagttgaaagctgagaaagacaatgctgagataagagtccacacagttgaggattatcaggcaattgttgatgctgagtggaacattctctatgacaagttagagaagatccatcattctggagccaaagttgtcttgtccaaactccccattggggatgtggccacccagtactttgctgacagggacatgttctgtgctggccgagtacctgaggaggatctgaagaggacaatgatggcctgtggaggctcaatccagaccagtgtgaatgctctgtcagcagatgtgctgggtcgatgccaggtgtttgaagagacccagattggaggcgagaggtacaatttttttactggctgccccaaggccaagacatgcaccttcattctccgtggcggcgccgagcagtttatggaggagacagagcggtccctgcatgatgccatcatgatcgtcaggagggccatcaagaatgattcagtggtggctggtggcggggccattgagatggaactctccaagtacctgcgggattactcaaggactattccaggaaaacagcagctgttgattggggcatatgccaaggccttggagattatcccacgccagctgtgtgacaatgctggctttgatgccacaaacattctcaacaagctgcgggctcggcatgcccaggggggtacatggtatggagtagacatcaacaacgaggacattgctgacaactttgaagctttcgtgtgggagccagctatggtgcggatcaatgcgctgacagcagcctctgaggctgcgtgcctgatcgtgtctgtagatgaaaccatcaagaacccccgctcgactgtggatgctcccacagcagcaggccggggccgtggtcgtggccgcccccactgagaggcaccccacccatcacatggctggctggctgctgggtgcacttaccctccttggcttggttacttcattttacaagnatngggcccccttttacgggggtttataatgtgttgaaaaaaaaaaccggctttggggaaata

SEQ ID NO: 454030 - DNA, 1874 bp, Homo sapiens
  misc_feature (1743)..(1743): n is a, c, g, or t
  misc_feature (1874)..(1874): n is a, c, g, or t
tcccaggcgtcgagcttctgggtatttctattgcgcgaggcattgtgggttgctgggcggcccggtctcggagaagaggggagagtggcgggccgctgaataagcttccaaaatgatgcccacaccagttatcctattgaaagaggggactgatagctcccaaggcatcccccagcttgtgagtaacatcagtgcctgccaggtgattgctgaggctgtaagaactaccctgggtccccgtggcatggacaagcttattgtagatggcagaggcaaagcaacaatttctaatgatggggccacaattctgaaacttcttgatgttgtccatcctgcagcaaagactttggtagacattgccaaatcccaagatgctgaggtgggtgatggcaccacctcagtgaccttgctggctgcagagtttctgaagcaggtgaaaccctatgtggaggaaggtttacacccccagatcatcattcgagctttccgcacagccacccagctggcagttaacaagatcaaagagattgctgtgaccgtgaagaaggcagataaagtggagcagaggaagctgctggaaaagtgtgccatgaccgctctgagctccaagctgatctcccagcagaaagctttctttgctaagatggtggtggatgcagtgatgatgctcgatgatttgctgcagcttaaaatgattggaatcaagaaggtacagggtggagccctcgaggattctcagctggtagctggtgttgcattcaagaagactttctcttacgctgggtttgaaatgcaacccaaaaagtaccacaatcccaagattgcccttttgaatgtcgagctcgagttgaaagctgagaaagacaatgctgagataagagtccacacagttgaggattatcaggcaattgttgatgctgagtggaacattctctatgacaagttagagaagatccatcattctggagccaaagttgtcttgtccaaactccccattggggatgtggccacccagtactttgctgacagggacatgttctgtgctggccgagtacctgaggaggatctgaagaggacaatgatggcctgtggaggctcaatccagaccagtgtgaatgctctgtcagcagatgtgctgggtcgatgccaggtgtttgaagagacccagattggaggcgagaggtacaatttttttactggctgccccaaggccaagacatgcaccttcattctccgtggcggcgccgagcagtttatggaggagacagagcggtccctgcatgatgccatcatgatcgtcaggagggccatcaagaatgattcagtggtggctggtggcggggccattgagatggaactctccaagtacctgcgggattactcaaggactattccaggaaaacagcagctgttgattggggcatatgccaaggccttggagattatcccacgccagctgtgtgacaatgctggctttgatgccacaaacattctcaacaagctgcgggctcggcatgcccaggggggtacatggtatggagtagacatcaacaacgaggacattgctgacaactttgaagctttcgtgtgggagccagctatggtgcggatcaatgcgctgacagcagcctctgaggctgcgtgcctgatcgtgtctgtagatgaaaccatcaagaacccccgctcgactgtggatgctcccacagcagcaggccggggccgtggtcgtggccgccccagganagggaccaccataatggttggtgctgtggtgcttcctcctggctggttctcctttcaagcaggggtgatggcctttttggggttaaagggatcaaacacacaaaaacggtttttggcaagaaggcggtcgn

SEQ ID NO: 454031 - DNA, 1831 bp, Homo sapiens
tcccaggcgtcgagcttctgggtatttctattgcgcgaggcattgtgggttgctgggcggcccggtctcggagaagaggggagagtggcgggccgctgaataagcttccaaaatgatgcccacaccagttatcctattgaaagaggggactgatagctcccaaggcatcccccagcttgtgagtaacatcagtgcctgccaggtgattgctgaggctgtaagaactaccctgggtccccgtggcatggacaagcttattgtagatggcagaggcaaagcaacaatttctaatgatggggccacaattctgaaacttcttgatgttgtccatcctgcagcaaagactttggtagacattgccaaatcccaagatgctgaggtgggtgatggcaccacctcagtgaccttgctggctgcagagtttctgaagcaggtgaaaccctatgtggaggaaggtttacacccccagatcatcattcgagctttccgcacagccacccagctggcagttaacaagatcaaagagattgctgtgaccgtgaagaaggcagataaagtggagcagaggaagctgctggaaaagtgtgccatgaccgctctgagctccaagctgatctcccagcagaaagctttctttgctaagatggtggtggatgcagtgatgatgctcgatgatttgctgcagcttaaaatgattggaatcaagaaggtacagggtggagccctcgaggattctcagctggtagctggtgttgcattcaagaagactttctcttacgctgggtttgaaatgcaacccaaaaagtaccacaatcccaagattgcccttttgaatgtcgagctcgagttgaaagctgagaaagacaatgctgagataagagtccacacagttgagatccatcattctggagccaaagttgtcttgtccaaactccccattggggatgtggccacccagtactttgctgacagggacatgttctgtgctggccgagtacctgaggaggatctgaagaggacaatgatggcctgtggaggctcaatccagaccagtgtgaatgctctgtcagcagatgtgctgggtcgatgccaggtgtttgaagagacccagattggaggcgagaggtacaatttttttactggctgccccaaggccaagacatgcaccttcattctccgtggcggcgccgagcagtttatggaggagacagagcggtccctgcatgatgccatcatgatcgtcaggagggccatcaagaatgattcagtggtggctggtggcggggccattgagatggaactctccaagtacctgcgggattactcaaggactattccaggaaaacagcagctgttgattggggcatatgccaaggccttggagattatcccacgccagctgtgtgacaatgctggctttgatgccacaaacattctcaacaagctgcgggctcggcatgcccaggggggtacatggtatggagtagacatcaacaacgaggacattgctgacaactttgaagctttcgtgtgggagccagctatggtgcggatcaatgcgctgacagcagcctctgaggctgcgtgcctgatcgtgtctgtagatgaaaccatcaagaacccccgctcgactgtggatgctcccacagcagcaggccggggccgtggtcgtggccgcccccactgagaggcaccccacccatcacatggctggctggctgctgggtgcacttaccctccttggcttggttacttcattttacaaggaaggggtagtaattggcccactctcttcttactggaggctatttaaataaaatgtaagacttca

SEQ ID NO: 454032 - DNA, 1476 bp, Homo sapiens
tcccaggcgtcgagcttctgggtatttctattgcgcgaggcattgtgggttgctgggcggcccggtctcggagaagaggggagagtggcgggccgctgaataagcttccaaaatgatgcccacaccagttatcctattgaaagaggggactgatagctcccaaggcatcccccagcttgtgagtaacatcagtgcctgccaggtgattgctgaggctgtaagaactaccctgggtccccgtggcatggacaagcttattgtagatggcagaggcaaagcaacaatttctaatgatggggccacaattctgaaacttcttgatgttgtccatcctgcagcaaagactttggtagacattgccaaatcccaagatgctgaggtgggtgatggcaccacctcagtgaccttgctggctgcagagtttctgaagcaggtgaaaccctatgtggaggaaggtttacacccccagatcatcattcgagctttccgcacagccacccagctggcagttaacaagatcaaagagattgctgtgaccgtgaagaaggcagataaagtggagcagaggaagctgctggaaaagtgtgccatgaccgctctgagctccaagctgatctcccagcagaaagctttctttgctaagatggtggtggatgcagtgatgatgctcgatgatttgctgcagcttaaaatgattggaatcaagaaggtacagggtggagccctcgaggattctcagctggtagctggtgttgcattcaagaagactttctcttacgctgggtttgaaatgcaacccaaaaagtaccacaatcccaagattgcccttttgaatgtcgagctcgagttgaaagctgagaaagacaatgctgagataagagtccacacagttgaggattatcaggcaattgttgatgctgagtggaacattctctatgacaagttagagaagatccatcattctggagccaaagttgtcttgtccaaactccccattggggatgtggccacccagtactttgctgacagggacatgttctgtgctggccgagtacctgaggaggatctgaagaggacaatgatggcctgtggaggctcaatccagaccagtgtgaatgctctgtcagcagatgtgctgggtcgatgccaggtgtttgaagagacccagattggaggcgagagccagctatggtgcggatcaatgcgctgacagcagcctctgaggctgcgtgcctgatcgtgtctgtagatgaaaccatcaagaacccccgctcgactgtggatgctcccacagcagcaggccggggccgtggtcgtggccgcccccactgagaggcaccccacccatcacatggctggctggctgctgggtgcacttaccctccttggcttggttacttcattttacaaggaaggggtagtaattggcccactctcttcttactggaggctatttaaataaaatgtaagacttca

SEQ ID NO: 454033 - DNA, 1859 bp, Homo sapiens
  misc_feature (23)..(23): n is a, c, g, or t
  misc_feature (28)..(28): n is a, c, g, or t
aataacggcctaggtacgagctngggtnaatcggcacgagggagaagaggggagagtggcgggccgctgaataagcttccaaaatgatgcccacaccagttatcctattgaaagaggggactgatagctcccaaggcatcccccagcttgtgagtaacatcagtgcctgccaggtgattgctgaggctgtaagaactaccctgggtccccgtggcatggacaagcttattgtagatggcagaggcaaagcaacaatttctaatgatggggccacaattctgaaacttcttgatgttgtccatcctgcagcaaagactttggtagacattgccaaatcccaagatgctgaggtgggtgatggcaccacctcagtgaccttgctggctgcagagtttctgaagcaggtgaaaccctatgtggaggaaggtttacacccccagatcatcattcgagctttccgcacagccacccagctggcagttaacaagatcaaagagattgctgtgaccgtgaagaaggcagataaagtggagcagaggaagctgctggaaaagtgtgccatgaccgctctgagctccaagctgatctcccagcagaaagctttctttgctaagatggtggtggatgcagtgatgatgctcgatgatttgctgcagcttaaaatgattggaatcaagaaggtacagggtggagccctcgaggattctcagctggtagctggtgttgcattcaagaagactttctcttacgctgggtttgaaatgcaacccaaaaagtaccacaatcccaagattgcccttttgaatgtcgagctcgagttgaaagctgagaaagacaatgctgagataagagtccacacagttgaggattatcaggcaattgttgatgctgagtggaacattctctatgacaagttagagaagatccatcattctggagccaaagttgtcttgtccaaactccccattggggatgtggccacccagtactttgctgacagggacatgttctgtgctggccgagtacctgaggaggatctgaagaggacaatgatggcctgtggaggctcaatccagaccagtgtgaatgctctgtcagcagatgtgctgggtcgatgccaggtgtttgaagagacccagattggaggcgagaggtacaatttttttactggctgccccaaggccaagacatgcaccttcattctccgtggcggcgccgagcagtttatggaggagacagagcggtccctgcatgatgccatcatgatcgtcaggagggccatcaagaatgattcagtggtggctggtggcggggccattgagatggaactctccaagtacctgcgggattactcaaggactattccaggaaaacagcagctgttgattggggcatatgccaaggccttggagattatcccacgccagctgtgtgacaatgctggctttgatgccacaaacattctcaacaagctgcgggctcggcatgcccaggggggtacatggtatggagtagacatcaacaacgaggacattgctgacaactttgaagctttcgtgtgggagccagctatggtgcggatcaatgcgctgacagcagcctctgaggctgcgtgcctgatcgtgtctgtagatgaaaccatcaagaacccccgctcgactgtggatgctcccacagcagcaggccggggccgtggtcgtggccgcccccactgagaggcaccccacccatcacatggctggctggctgctgggtgcacttaccctccttggcttggttacttcattttacaaggaaggggtagtaattggcccactctcttcttactggaggctatttaaataaaatgtaagacttca

SEQ ID NO: 454034 - DNA, 1044 bp, Homo sapiens
  misc_feature (897)..(897): n is a, c, g, or t
  misc_feature (924)..(924): n is a, c, g, or t
  misc_feature (928)..(928): n is a, c, g, or t
  misc_feature (938)..(938): n is a, c, g, or t
  misc_feature (942)..(943): n is a, c, g, or t
  misc_feature (954)..(955): n is a, c, g, or t
tcccaggcgtcgagcttctgggtatttctattgcgcgaggcattgtgggttgctgggcggcccggtctcggagaagaggggagagtggcgggccgctgaataagcttccaaaatgatgcccacaccagttatcctattgaaagaggggactgatagctcccaaggcatcccccagcttgtgagtaacatcagtgcctgccaggtgattgctgaggctgtaagaactaccctgggtccccgtggcatggacaagcttattgtagatggcagaggcaaagcaacaatttctaatgatggggccacaattctgaaacttcttgatgttgtccatcctgcagcaaagactttggtagacattgccaaatcccaagatgctgaggtgggtgatggcaccacctcagtgaccttgctggctgcagagtttctgaagcaggtgaaaccctatgtggaggaaggtttacacccccagatcatcattcgagctttccgcacagccacccagctggcagttaacaagatcaaagagattgctgtgaccgtgaagaaggcagataaagtggagcagaggaagctgctggaaaagtgtgccatgaccgctctgagctccaagctgatctcccagcagaaagctttctttgctaagatggtggtggatgcagtgatgatgctcgatgatttgctgcagcttaaaatgattggaatcaagaaggtacagggtggagccctcgaggattctcagctggtagctggtgttgcattcaagaagactttctcttacgctgggtttgaaatgcaacccaaaaagtaccacaatcccaagattgcccttttgaatgtcgagctcgagttgaaagctgagaaagacaatgctgagataagagtccacacagttgaggntatcagcactggtgatgctggtggaanttcncttgacagtnaganntcctctctggnncagtggtcggcccatcccttggggggtgcccgattgtggcggaatttcggcgccccgggccaagaagggggggcccccggggtgtggcc

SEQ ID NO: 454035 - DNA, 1868 bp, Homo sapiens
  misc_feature (63)..(63): n is a, c, g, or t
  misc_feature (68)..(68): n is a, c, g, or t
catgatatgaagtgcgtactcgtttcaatttcatcacaggcggcctgtcttggaattatgganagtgncgggccgctgaataagcttccaaaatgatgcccacaccagttatcctattgaaagaggggactgatagctcccaaggcatcccccagcttgtgagtaacatcagtgcctgccaggtgattgctgaggctgtaagaactaccctgggtccccgtggcatggacaagcttattgtagatggcagaggcaaagcaacaatttctaatgatggggccacaattctgaaacttcttgatgttgtccatcctgcagcaaagactttggtagacattgccaaatcccaagatgctgaggtgggtgatggcaccacctcagtgaccttgctggctgcagagtttctgaagcaggtgaaaccctatgtggaggaaggtttacacccccagatcatcattcgagctttccgcacagccacccagctggcagttaacaagatcaaagagattgctgtgaccgtgaagaaggcagataaagtggagcagaggaagctgctggaaaagtgtgccatgaccgctctgagctccaagctgatctcccagcagaaagctttctttgctaagatggtggtggatgcagtgatgatgctcgatgatttgctgcagcttaaaatgattggaatcaagaaggtacagggtggagccctcgaggattctcagctggtagctggtgttgcattcaagaagactttctcttacgctgggtttgaaatgcaacccaaaaagtaccacaatcccaagattgcccttttgaatgtcgagctcgagttgaaagctgagaaagacaatgctgagataagagtccacacagttgaggattatcaggcaattgttgatgctgagtggaacattctctatgacaagttagagaagatccatcattctggagccaaagttgtcttgtccaaactccccattggggatgtggccacccagtactttgctgacagggacatgttctgtgctggccgagtacctgaggaggatctgaagaggacaatgatggcctgtggaggctcaatccagaccagtgtgaatgctctgtcagcagatgtgctgggtcgatgccaggtgtttgaagagacccagattggaggcgagaggtacaatttttttactggctgccccaaggccaagacatgcaccttcattctccgtggcggcgccgagcagtttatggaggagacagagcggtccctgcatgatgccatcatgatcgtcaggagggccatcaagaatgattcagtggtggctggtggcggggccattgagatggaactctccaagtacctgcgggattactcaaggactattccaggaaaacagcagctgttgattggggcatatgccaaggccttggagattatcccacgccagctgtgtgacaatgctggctttgatgccacaaacattctcaacaagctgcgggctcggcatgcccaggggggtacatggtatggagtagacatcaacaacgaggacattgctgacaactttgaagctttcgtgtgggagccagctatggtgcggatcaatgcgctgacagcagcctctgaggctgcgtgcctgatcgtgtctgtagatgaaaccatcaagaacccccgctcgactgtggatgctcccacagcagcaggccggggccgtggtcgtggccgcccccactgagaggcaccccacccatcacatggctggctggctgctgggtgcacttaccctccttggcttggttacttcattttacaaggaaggggtagtaattggcccactctcttcttactggaggctatttaaataaaatgtaagacttca

SEQ ID NO: 454036 - DNA, 1972 bp, Homo sapiens
aacttaggctaggtacgaggccgggtggtgttgtgggttgctgggcggcccggtctcggagaagaggggagagtggcgggccgctgaataagcttccaaaatgatgcattgctcattcttgaagtcgtcttcatcttctgtgcagaggcagcatagtacagcagttgagagtaaggcctctggagctacactgaatgcctagcccacaccagttatcctattgaaagaggggactgatagctcccaaggcatcccccagcttgtgagtaacatcagtgcctgccaggtgattgctgaggctgtaagaactaccctgggtccccgtggcatggacaagcttattgtagatggcagaggcaaagcaacaatttctaatgatggggccacaattctgaaacttcttgatgttgtccatcctgcagcaaagactttggtagacattgccaaatcccaagatgctgaggtgggtgatggcaccacctcagtgaccttgctggctgcagagtttctgaagcaggtgaaaccctatgtggaggaaggtttacacccccagatcatcattcgagctttccgcacagccacccagctggcagttaacaagatcaaagagattgctgtgaccgtgaagaaggcagataaagtggagcagaggaagctgctggaaaagtgtgccatgaccgctctgagctccaagctgatctcccagcagaaagctttctttgctaagatggtggtggatgcagtgatgatgctcgatgatttgctgcagcttaaaatgattggaatcaagaaggtacagggtggagccctcgaggattctcagctggtagctggtgttgcattcaagaagactttctcttacgctgggtttgaaatgcaacccaaaaagtaccacaatcccaagattgcccttttgaatgtcgagctcgagttgaaagctgagaaagacaatgctgagataagagtccacacagttgaggattatcaggcaattgttgatgctgagtggaacattctctatgacaagttagagaagatccatcattctggagccaaagttgtcttgtccaaactccccattggggatgtggccacccagtactttgctgacagggacatgttctgtgctggccgagtacctgaggaggatctgaagaggacaatgatggcctgtggaggctcaatccagaccagtgtgaatgctctgtcagcagatgtgctgggtcgatgccaggtgtttgaagagacccagattggaggcgagaggtacaatttttttactggctgccccaaggccaagacatgcaccttcattctccgtggcggcgccgagcagtttatggaggagacagagcggtccctgcatgatgccatcatgatcgtcaggagggccatcaagaatgattcagtggtggctggtggcggggccattgagatggaactctccaagtacctgcgggattactcaaggactattccaggaaaacagcagctgttgattggggcatatgccaaggccttggagattatcccacgccagctgtgtgacaatgctggctttgatgccacaaacattctcaacaagctgcgggctcggcatgcccaggggggtacatggtatggagtagacatcaacaacgaggacattgctgacaactttgaagctttcgtgtgggagccagctatggtgcggatcaatgcgctgacagcagcctctgaggctgcgtgcctgatcgtgtctgtagatgaaaccatcaagaacccccgctcgactgtggatgctcccacagcagcaggccggggccgtggtcgtggccgcccccactgagaggcaccccacccatcacatggctggctggctgctgggtgcacttaccctccttggcttggttacttcattttacaaggaaggggtagtaattggcccactctcttcttactggaggctatttaaataaaatgtaagacttca

SEQ ID NO: 454037 - DNA, 2029 bp, Homo sapiens
cagcagccccaggtcgggagaggcgagcaggccgtcggggggtgccgcgctgggggcgccgtcggcgcgcaggggggtaggaggcggcgcggccgcaggcttgagcgctgccgccacctgctcactcaggctcagcgtcagcgcgtccttcttcatcatgctgccggccgcggccgtcgggggcgccccggggaacaagcggcccggggacgcgaagctgccgccgctgccactggcgccggcaccgagcaaaatgatgcccacaccagttatcctattgaaagaggggactgatagctcccaaggcatcccccagcttgtgagtaacatcagtgcctgccaggtgattgctgaggctgtaagaactaccctgggtccccgtggcatggacaagcttattgtagatggcagaggcaaagcaacaatttctaatgatggggccacaattctgaaacttcttgatgttgtccatcctgcagcaaagactttggtagacattgccaaatcccaagatgctgaggtgggtgatggcaccacctcagtgaccttgctggctgcagagtttctgaagcaggtgaaaccctatgtggaggaaggtttacacccccagatcatcattcgagctttccgcacagccacccagctggcagttaacaagatcaaagagattgctgtgaccgtgaagaaggcagataaagtggagcagaggaagctgctggaaaagtgtgccatgaccgctctgagctccaagctgatctcccagcagaaagctttctttgctaagatggtggtggatgcagtgatgatgctcgatgatttgctgcagcttaaaatgattggaatcaagaaggtacagggtggagccctcgaggattctcagctggtagctggtgttgcattcaagaagactttctcttacgctgggtttgaaatgcaacccaaaaagtaccacaatcccaagattgcccttttgaatgtcgagctcgagttgaaagctgagaaagacaatgctgagataagagtccacacagttgaggattatcaggcaattgttgatgctgagtggaacattctctatgacaagttagagaagatccatcattctggagccaaagttgtcttgtccaaactccccattggggatgtggccacccagtactttgctgacagggacatgttctgtgctggccgagtacctgaggaggatctgaagaggacaatgatggcctgtggaggctcaatccagaccagtgtgaatgctctgtcagcagatgtgctgggtcgatgccaggtgtttgaagagacccagattggaggcgagaggtacaatttttttactggctgccccaaggccaagacatgcaccttcattctccgtggcggcgccgagcagtttatggaggagacagagcggtccctgcatgatgccatcatgatcgtcaggagggccatcaagaatgattcagtggtggctggtggcggggccattgagatggaactctccaagtacctgcgggattactcaaggactattccaggaaaacagcagctgttgattggggcatatgccaaggccttggagattatcccacgccagctgtgtgacaatgctggctttgatgccacaaacattctcaacaagctgcgggctcggcatgcccaggggggtacatggtatggagtagacatcaacaacgaggacattgctgacaactttgaagctttcgtgtgggagccagctatggtgcggatcaatgcgctgacagcagcctctgaggctgcgtgcctgatcgtgtctgtagatgaaaccatcaagaacccccgctcgactgtggatgctcccacagcagcaggccggggccgtggtcgtggccgcccccactgagaggcaccccacccatcacatggctggctggctgctgggtgcacttaccctccttggcttggttacttcattttacaaggaaggggtagtaattggcccactctcttcttactggaggctatttaaataaaatgtaagacttca

SEQ ID NO: 454038 - DNA, 1798 bp, Homo sapiens
  misc_feature (28)..(28): n is a, c, g, or t
cggacgcgtgggtcgacccacgcgtccncccacaccagttatcctattgaaagaggggactgatagctcccaaggcatcccccagcttgtgagtaacatcagtgcctgccaggtgattgctgaggctgtaagaactaccctgggtccccgtggcatggacaagcttattgtagatggcagaggcaaagcaacaatttctaatgatggggccacaattctgaaacttcttgatgttgtccatcctgcagcaaagactttggtagacattgccaaatcccaagatgctgaggtgggtgatggcaccacctcagtgaccttgctggctgcagagtttctgaagcaggtgaaaccctatgtggaggaaggtttacacccccagatcatcattcgagctttccgcacagccacccagctggcagttaacaagatcaaagagattgctgtgaccgtgaagaaggcagataaagtggagcagaggaagctgctggaaaagtgtgccatgaccgctctgagctccaagctgatctcccagcagaaagctttctttgctaagatggtggtggatgcagtgatgatgctcgatgatttgctgcagcttaaaatgattggaatcaagaaggtacagggtggagccctcgaggattctcagctggtagctggtgttgcattcaagaagactttctcttacgctgggtttgaaatgcaacccaaaaagtaccacaatcccaagattgcccttttgaatgtcgagctcgagttgaaagctgagaaagacaatgctgagataagagtccacacagttgaggattatcaggcaattgttgatgctgagtggaacattctctatgacaagttagagaagatccatcattctggagccaaagttgtcttgtccaaactccccattggggatgtggccacccagtactttgctgacagggacatgttctgtgctggccgagtacctgaggaggatctgaagaggacaatgatggcctgtggaggctcaatccagaccagtgtgaatgctctgtcagcagatgtgctgggtcgatgccaggtgtttgaagagacccagattggaggcgagaggtacaatttttttactggctgccccaaggccaagacatgcaccttcattctccgtggcggcgccgagcagtttatggaggagacagagcggtccctgcatgatgccatcatgatcgtcaggagggccatcaagaatgattcagtggtggctggtggcggggccattgagatggaactctccaagtacctgcgggattactcaaggactattccaggaaaacagcagctgttgattggggcatatgccaaggccttggagattatcccacgccagctgtgtgacaatgctggctttgatgccacaaacattctcaacaagctgcgggctcggcatgcccaggggggtacatggtatggagtagacatcaacaacgaggacattgctgacaactttgaagctttcgtgtgggagccagctatggtgcggatcaatgcgctgacagcagcctctgaggctgcgtgcctgatcgtgtctgtagatgaaaccatcaagaacccccgctcgactgtggatgctcccacagcagcaggccggggccgtggtcgtggccgcccccactgagaggcaccccacccatcacatggctggctggctgctgggtgcacttaccctccttggcttggttacttcattttacaaggaaggggtagtaattggcccactctcttcttactggaggctatttaaataaaatgtaagacttca

SEQ ID NO: 454039 - DNA, 2281 bp, Homo sapiens
ttttttttgttttttaagcattgatttaaaagatgcacggaaagttatcttacagcaaactgtagtttgcctccaagacaccattgtctccctttaatcttctcttttgtatacatttgttacccatggtgttctttgttccttttcataagctaataccactgtagggattttgttttgaacgcatattgacagcacgctttacttagtagccggttcccatttgccatacaatgtaggttctgcttaatgtaacttcttttttgcttaagcattgcatgactattagtgcttcaaagtcaatttttaaaaatgcacaagttataaatacagaagaaagagcaacccaccaaacctaacaaggacccccgaacactttcatactaagactgtaagtagatctcagttctgcgtttattgtaagttgataaaaacatctggaagaaaatgactaaaactgtttgcatctttgtatgtatttattacttgatgtaattaaagcttattttcattaacaaaaaaaaaaaaagagaagaggggagagtggcgggccgctgaataagcttccaaaatgatgcccacaccagttatcctattgaaagaggggactgatagctcccaaggcatcccccagcttgtgagtaacatcagtgcctgccaggtgattgctgaggctgtaagaactaccctgggtccccgtggcatggacaagcttattgtagatggcagagcaaagactttggtagacattgccaaatcccaagatgctgaggtgggtgatggcaccacctcagtgaccttgctggctgcagagtttctgaagcaggtgaaaccctatgtggaggaaggtttacacccccagatcatcattcgagctttccgcacagccacccagctggcagttaacaagatcaaagagattgctgtgaccgtgaagaaggcagataaagtggagcagaggaagctgctggaaaagtgtgccatgaccgctctgagctccaagctgatctcccagcagaaagctttctttgctaagatggtggtggatgcagtgatgatgctcgatgatttgctgcagcttaaaatgattggaatcaagaaggtacagggtggagccctcgaggattctcagctggtagctggtgttgcattcaagaagactttctcttacgctgggtttgaaatgcaacccaaaaagtaccacaatcccaagattgcccttttgaatgtcgagctcgagttgaaagctgagaaagacaatgctgagataagagtccacacagttgaggattatcaggcaattgttgatgctgagtggaacattctctatgacaagttagagaagatccatcattctggagccaaagttgtcttgtccaaactccccattggggatgtggccacccagtactttgctgacagggacatgttctgtgctggccgagtacctgaggaggatctgaagaggacaatgatggcctgtggaggctcaatccagaccagtgtgaatgctctgtcagcagatgtgctgggtcgatgccaggtgtttgaagagacccagattggaggcgagaggtacaatttttttactggctgccccaaggccaagacatgcaccttcattctccgtggcggcgccgagcagtttatggaggagacagagcggtccctgcatgatgccatcatgatcgtcaggagggccatcaagaatgattcagtggtggctggtggcggggccattgagatggaactctccaagtacctgcgggattactcaaggactattccaggaaaacagcagctgttgattggggcatatgccaaggccttggagattatcccacgccagctgtgtgacaatgctggctttgatgccacaaacattctcaacaagctgcgggctcggcatgcccaggggggtacatggtatggagtagacatcaacaacgaggacattgctgacaactttgaagctttcgtgtgggagccagctatggtgcggatcaatgcgctgacagcagcctctgaggctgcgtgcctgatcgtgtctgtagatgaaaccatcaagaacccccgctcgactgtggatgctcccacagcagcaggccggggccgtggtcgtggccgcccccactgagaggcaccccacccatcacatggctggctggctgctgggtgcacttaccctccttggcttggttacttcattttacaaggaaggggtagtaattggcccactctcttcttactggaggctatttaaataaaatgtaagacttca

SEQ ID NO: 454040 - DNA, 1553 bp, Homo sapiens
agagctcctcagtctaagccaagtggtgtgtcatagtcccctggccccattaatggattctgggatagacatgaagaccaagccaggtgggatgggtgagtgtggcttctggaggaagcggggacacaggacagcattctttcctgctggaccgcacagccacccagctggcagttaacaagatcaaagagattgctgtgaccgtgaagaaggcagataaagtggagcagaggaagctgctggaaaagtgtgccatgaccgctctgagctccaagctgatctcccagcagaaagctttctttgctaagatggtggtggatgcagtgatgatgctcgatgatttgctgcagcttaaaatgattggaatcaagaaggtacagggtggagccctcgaggattctcagctggtagctggtgttgcattcaagaagactttctcttacgctgggtttgaaatgcaacccaaaaagtaccacaatcccaagattgcccttttgaatgtcgagctcgagttgaaagctgagaaagacaatgctgagataagagtccacacagttgaggattatcaggcaattgttgatgctgagtggaacattctctatgacaagttagagaagatccatcattctggagccaaagttgtcttgtccaaactccccattggggatgtggccacccagtactttgctgacagggacatgttctgtgctggccgagtacctgaggaggatctgaagaggacaatgatggcctgtggaggctcaatccagaccagtgtgaatgctctgtcagcagatgtgctgggtcgatgccaggtgtttgaagagacccagattggaggcgagaggtacaatttttttactggctgccccaaggccaagacatgcaccttcattctccgtggcggcgccgagcagtttatggaggagacagagcggtccctgcatgatgccatcatgatcgtcaggagggccatcaagaatgattcagtggtggctggtggcggggccattgagatggaactctccaagtacctgcgggattactcaaggactattccaggaaaacagcagctgttgattggggcatatgccaaggccttggagattatcccacgccagctgtgtgacaatgctggctttgatgccacaaacattctcaacaagctgcgggctcggcatgcccaggggggtacatggtatggagtagacatcaacaacgaggacattgctgacaactttgaagctttcgtgtgggagccagctatggtgcggatcaatgcgctgacagcagcctctgaggctgcgtgcctgatcgtgtctgtagatgaaaccatcaagaacccccgctcgactgtggatgctcccacagcagcaggccggggccgtggtcgtggccgcccccactgagaggcaccccacccatcacatggctggctggctgctgggtgcacttaccctccttggcttggttacttcattttacaaggaaggggtagtaattggcccactctcttcttactggaggctatttaaataaaatgtaagacttca

SEQ ID NO: 454041 - DNA, 1264 bp, Homo sapiens
aacttaggctaggtacgaggccgggtggtgttgtgggttgctgggcggcccggtctcggagaagaggggagagtggcgggccgctgaataagcttccaaaatgatggattctcagctggtagctggtgttgcattcaagaagactttctcttacgctgggtttgaaatgcaacccaaaaagtaccacaatcccaagattgcccttttgaatgtcgagctcgagttgaaagctgagaaagacaatgctgagataagagtccacacagttgaggattatcaggcaattgttgatgctgagtggaacattctctatgacaagttagagaagatccatcattctggagccaaagttgtcttgtccaaactccccattggggatgtggccacccagtactttgctgacagggacatgttctgtgctggccgagtacctgaggaggatctgaagaggacaatgatggcctgtggaggctcaatccagaccagtgtgaatgctctgtcagcagatgtgctgggtcgatgccaggtgtttgaagagacccagattggaggcgagaggtacaatttttttactggctgccccaaggccaagacatgcaccttcattctccgtggcggcgccgagcagtttatggaggagacagagcggtccctgcatgatgccatcatgatcgtcaggagggccatcaagaatgattcagtggtggctggtggcggggccattgagatggaactctccaagtacctgcgggattactcaaggactattccaggaaaacagcagctgttgattggggcatatgccaaggccttggagattatcccacgccagctgtgtgacaatgctggctttgatgccacaaacattctcaacaagctgcgggctcggcatgcccaggggggtacatggtatggagtagacatcaacaacgaggacattgctgacaactttgaagctttcgtgtgggagccagctatggtgcggatcaatgcgctgacagcagcctctgaggctgcgtgcctgatcgtgtctgtagatgaaaccatcaagaacccccgctcgactgtggatgctcccacagcagcaggccggggccgtggtcgtggccgcccccactgagaggcaccccacccatcacatggctggctggctgctgggtgcacttaccctccttggcttggttacttcattttacaaggaaggggtagtaattggcccactctcttcttactggaggctatttaaataaaatgtaagacttca

SEQ ID NO: 454042 - DNA, 1121 bp, Homo sapiens
tggcttacaatgggggcggcacgaccacggcccggtctgctgactgtgggagcatccacattttgaatgtcgagctcgagttgaaagctgagaaagacaatgctgagataagagtccacacagttgaggattatcaggcaattgttgatgctgagtggaacattctctatgacaagttagagaagatccatcattctggagccaaagttgtcttgtccaaactccccattggggatgtggccacccagtactttgctgacagggacatgttctgtgctggccgagtacctgaggaggatctgaagaggacaatgatggcctgtggaggctcaatccagaccagtgtgaatgctctgtcagcagatgtgctgggtcgatgccaggtgtttgaagagacccagattggaggcgagaggtacaatttttttactggctgccccaaggccaagacatgcaccttcattctccgtggcggcgccgagcagtttatggaggagacagagcggtccctgcatgatgccatcatgatcgtcaggagggccatcaagaatgattcagtggtggctggtggcggggccattgagatggaactctccaagtacctgcgggattactcaaggactattccaggaaaacagcagctgttgattggggcatatgccaaggccttggagattatcccacgccagctgtgtgacaatgctggctttgatgccacaaacattctcaacaagctgcgggctcggcatgcccaggggggtacatggtatggagtagacatcaacaacgaggacattgctgacaactttgaagctttcgtgtgggagccagctatggtgcggatcaatgcgctgacagcagcctctgaggctgcgtgcctgatcgtgtctgtagatgaaaccatcaagaacccccgctcgactgtggatgctcccacagcagcaggccggggccgtggtcgtggccgcccccactgagaggcaccccacccatcacatggctggctggctgctgggtgcacttaccctccttggcttggttacttcattttacaaggaaggggtagtaattggcccactctcttcttactggaggctatttaaataaaatgtaagacttca

SEQ ID NO: 454043 - DNA, 1059 bp, Homo sapiens
gagaaagactatgctagagtatacagagtcgcttacacgaagttggacggattggtcaggcaaattgtctgcatggcgtgagatgtgaagatgcctctactgcacaatgctttagcactacagatccatcattctggagccaaagttgtcttgtccaaactccccattggggatgtggccacccagtactttgctgacagggacatgttctgtgctggccgagtacctgaggaggatctgaagaggacaatgatggcctgtggaggctcaatccagaccagtgtgaatgctctgtcagcagatgtgctgggtcgatgccaggtgtttgaagagacccagattggaggcgagaggtacaatttttttactggctgccccaaggccaagacatgcaccttcattctccgtggcggcgccgagcagtttatggaggagacagagcggtccctgcatgatgccatcatgatcgtcaggagggccatcaagaatgattcagtggtggctggtggcggggccattgagatggaactctccaagtacctgcgggattactcaaggactattccaggaaaacagcagctgttgattggggcatatgccaaggccttggagattatcccacgccagctgtgtgacaatgctggctttgatgccacaaacattctcaacaagctgcgggctcggcatgcccaggggggtacatggtatggagtagacatcaacaacgaggacattgctgacaactttgaagctttcgtgtgggagccagctatggtgcggatcaatgcgctgacagcagcctctgaggctgcgtgcctgatcgtgtctgtagatgaaaccatcaagaacccccgctcgactgtggatgctcccacagcagcaggccggggccgtggtcgtggccgcccccactgagaggcaccccacccatcacatggctggctggctgctgggtgcacttaccctccttggcttggttacttcattttacaaggaaggggtagtaattggcccactctcttcttactggaggctatttaaataaaatgtaagacttca

SEQ ID NO: 454044 - DNA, 1217 bp, Homo sapiens
  misc_feature (23)..(23): n is a, c, g, or t
  misc_feature (28)..(28): n is a, c, g, or t
aataacggcctaggtacgagctngggtnaatcggcacgagggagaagaggggagagtggcgggccgctgaataagcttccaaaatgatgaaaacgtgtatttcctgtcatcatcttccaggtgggtgatggcaccacctcagtgaccttgctggctgcagagtttctgaagcaggtgaaaccctatgtggaggaaggtttacacccccagatcatcattcgagctttccgcacagccacccagctggcagttaacaagatcaaagagattgctgtgaccgtgaagaaggcagataaagtggagcagaggaagctgctggaaaagtgtgccatgaccgctctgagctccaagctgatctcccagcagaaagctttctttgctaagatggtggtggatgcagtgatgatgctcgatgatttgctgcagcttaaaatgattggaatcaagaaggtacagggtggagccctcgaggattctcagctggtagctggtgttgcattcaagaagactttctcttacgctgggtttgaaatgcaacccaaaaagtaccacaatcccaagattgcccttttgaatgtcgagctcgagttgaaagctgagaaagacaatgctgagataagagtccacacagttgaggattatcaggcaattgttgatgctgagtggaacattctctatgacaagttagagaagatccatcattctggagccaaagttgtcttgtccaaactccccattggggatgtggccacccagtactttgctgacagggacatgttctgtgctggccgagtacctgaggaggatctgaagaggacaatgatggcctgtggaggctcaatccagaccagtgtgaatgctctgtcagcagatgtgctgggtcgatgccaggtgtttgaagagacccagattggaggcgagagccagctatggtgcggatcaatgcgctgacagcagcctctgaggctgcgtgcctgatcgtgtctgtagatgaaaccatcaagaacccccgctcgactgtggatgctcccacagcagcaggccggggccgtggtcgtggccgcccccactgagaggcaccccacccatcacatggctggctggctgctgggtgcacttaccctccttggcttggttacttcattttacaaggaaggggtagtaattggcccactctcttcttactggaggctatttaaataaaatgtaagacttca

SEQ ID NO: 454045 - DNA, 442 bp, Homo sapiens
tttgcgtcccacacttttgcctttattgcattccttggtctggcgtccggggatggaggagggtggaattaagttagtaggtgatgcgggccgagcaaagaccctccgtgctctaagaagcacgaccgaaatgcggcgacccctctttaatgaacgcccctcactagagagtccccgaagcccagcctcaggtccttctagccgcaccgagtcggtggtaacgaaccatagagtagcggaagtggtccgttctcttcctctcccaggcgtcgagcttctgggtatttctattgcgcgaggcattgtgggttgctgggcggcccggtctcggagaagaggggagagtggcgggccgctgaataagcttccaaaatgatggtgagtggcgtctcgcgcatccgtcgccatcagctgccatctggccggtggccggcgccgctcg

SEQ ID NO: 454046 - DNA, 6307 bp, Homo sapiens
gaaaataagaagcaaacccaagagttaaaagcaagagggcttgagaagagagaagaatcagtgaaataatctcttgactggaagactgaagaggagctgttggaggacaggaagatggtctgcagcattgtgtctcccacccaacctggcacagcctttggcaggatttcagtttttctgactgttacatgaaaggatgattgctcacaaacagaaaaagacaaagaaaaaacgtgcttgggcatcaggtcaactctctactgatattacaacttctgaaatggggctcaagtccttaagttccaactctatttttgatccggattacatcaaggagttggtgaatgatatcaggaagttctcccacatgttactatatttgaaagaagccatattttcagactgttttaaagaagttattcatatacgtctagaggaactgctccgtgttttaaagtctataatgaataaacatcagaacctcaattctgttgatcttcaaaatgctgcagaaatgctcactgcaaaagtgaaagctgtgaacttcacagaagttaatgaagaaaacaaaaacgatctcttccaggaagtgttttcttctattgaaactttggcatttacctttggaaatatccttacaaacttccttatgggagatgtaggcaatgattcattattgcgactgcctgtttctcgagaaactaagtcgtttgaaaatgtttctgtggaatcagtggactcatccagtgaaaaaggaaatttttcccctttagaactagacaacgtgctgttaaagaacactgactctatcgagctggctttgtcatatgctaaaacttggtcaaaatatactaagaacatagtttcatgggttgaaaaaaagcttaacttggaattggagtccactagaaatatggtcaagttggcagaggcaactagaactaacattggaattcaggagttcatgccactgcagtctctgtttactaatgctcttcttaatgatatagaaagcagtcaccttttacaacaaacaattgcagctctccaggctaacaaatttgtgcagcctctacttggaaggaaaaatgaaatggaaaaacaaaggaaagaaataaaagagctttggaaacaggagcaaaataaaatgcttgaagcagagaatgctctcaaaaaggcaaaattattatgcatgcaacgtcaagatgaatatgagaaagcaaagtcttccatgtttcgtgcagaagaggagcatctgtcttcaagtggcggattagcaaaaaatctcaacaagcaactagaaaaaaagcgaaggttggaagaggaggctctccaaaaagtagaagaagcaaatgaactttacaaagtttgtgtgacaaatgttgaagaaagaagaaatgatctagaaaataccaaaagagaaattttagcacaactccggacacttgttttccagtgtgatcttacccttaaagctgtaacagttaacctcttccacatgcagcatctgcaggctgcttcccttgcagacagtttacagtctctctgtgatagtgccaaactctatgacccaggccaagagtacagtgaatttgtcaaggccacaaattcaactgaagaagaaaaagttgatggaaatgtaaataaacatttaaatagttcccaaccttcaggatttggacctgccaactctttagaggatgttgtacgccttcctgacagttctaataaaattgaagaggacagatgctctaacagtgcagatataacaggtccttcctttataagatcatggacatttgggatgtttagtgattctgagagcactggagggagcagcgaatctagatctctggattcagaatctataagtccaggagactttcatcgaaaacttccacgaacaccatccagtggaactatgtcctctgcagatgatctagatgaaagagagccaccttccccttcagaaactggacccaattcccttggaacatttaagaaaacattgatgtcaaaggcagctctcacacacaagtttcgcaaattgagatcccccacgaaatgtagggattgtgaaggcattgtagtgttccaaggtgttgaatgtgaagagtgtctccttgtttgtcatcgaaagtgtttggaaaatttagtcattatttgtggtcatcagaaacttccaggaaaaatacacttatttggagcagaattcacactagttgcaaaaaaggaaccagatggtatcccttttatactcaaaatatgtgcctcagagattgaaaatagagctttgtgtctacagggaatttatcgtgtgtgtggaaacaaaataaaaactgaaaaattgtgtcaagctttggaaaatggaatgcacttggtagatatttcagaatttagttcacatgatatctgtgacgtcttgaaattataccttcggcagctcccagaaccatttattttatttcgattgtacaaggaatttatagaccttgcaaaagagatccaacatgtaaatgaagaacaagagacaaaaaagaatagtcttgaagacaaaaaatggccaaatatgtgtatagaaataaaccgaattcttctaaaaagcaaagaccttctaagacaattgccagcatcaaattttaacagtcttcatttccttatagtacatctaaagcgggtagtagatcatgcagaagaaaacaagatgaactccaaaaacttgggggtgatatttggaccaagtctcattaggccaaggccacaactgctcctatcaccatctcctcccttgcagagtattcaaatcaagcacgcttggtagagtttctcattacttactcacagaagatcttcgatgggtccctacaaccacaagatgttatgtgtagcataggtgttgttgatcaaggctgttttccaaagcctctgttatcaccagaagaaagagacattgaacgttccatgaagtcactatttttttcttcaaaggaagatatccatacttcagagagtgaaagcaaaatttttgaacgagctacatcatttgaggaatcagaacgcaagcaaaatgcgttaggaaaatgtgatgcatgtctcagtgacaaagcacagttgcttctagaccaagaggctgaatcagcatcccaaaagatagaagatggtaaaacccctaagccactttctctgaaatctgataggtcaacaaacaatgtggagaggcatactccaaggaccaagattagacctgtaagtttgcctgtagatagactacttcttgcaagtcctcctaatgagagaaatggcagaaatatgggaaatgtaaatttagacaagttttgcaagaatcctgcctttgaaggagttaatagaaaagacgctgctactactgtttgttccaaatttaatggctttgaccagcaaactctacagaaaattcaggacaaacagtatgaacaaaacagcctaactgccaagactacaatgatcatgcccagtgcactccaggaaaaaggagtgacaacaagcctccagattagtggggaccattctatcaatgccactcaacccagtaagccatatgcagagccagtcaggtcagtgagagaggcatctgagagacggtcttcagattcctaccctctcgctcctgtcagagcacccagaacactgcagcctcaacattggacaacattttataaaccacatgctcccatcatcagtatcagggggaatgaggagaagccagcttcaccctcagcagcagtgcctcctggcacagatcacgatccccacggtctcgtggtgaagtcaatgccagacccagacaaagcatcagcttgtcctgggcaagcaactggtcaacctaaagaagactctgaggagcttggcttgcctgatgtgaatccaatgtgtcagagaccaaggctaaaacgaatgcaacagtttgaagacctcgaagatgaaattccacaatttgtgtagggatgtcaaatttcagggtttttttgttgttgttgtgttattttgtggtattgtgcttgttttgtgaaagaatgttttgacagggccccttttgtataggactgccaaatcatgggttttgccttttgttgttgtatttatcctctgttggtaatactgaatggtagaatgttttgatagggtcacatttgtgcctcactggaattatctttaaattctgtatttttaaagttgtgaataagataggtggattcgtattttttaaagttcagttgactttccccaccaaatggtccatttgaatgcatccctaatatatgatatagtctcaactaataggtgcaatttgggaaaatcaggtttattttttggagtggaactgttataagtgcttatttataaaaggaatgtttctgaatgcaagtgcctaaaaagatctttgttggtatgcatatgttttgtcacacaattttatagtgcatctttcaccatttgtgcttttttaagatacgtatgtaagctcttatttttcaattggcaattcagttaatttttaaatgtttacataatggccagaaggcttgcaaatctgtatttaattgcattttaattaattgccagtttttacatgtgatagtcagttgtacaaagaaaatgcacttaaacctgtttctaaattatatattcagttatattatatttggctttagatggttttaatacatttgatagtttttcaccccttggctttattttatataaacttttgtttttcagcagttctgaactttttagtattttataaatggtccaaaaaatgcctgtttcagaagtttttgaattcagtgcatttcctcttgatttgtctgggttaaaaccattccttttgtatgaaatgttttgacttaggaatcattttatgtacttgttctacctggattgtcaacaactgaaagtacatatttcatccaaatcaagctaaaatttatttaagttgattctgagagtacaggtcagtaagcctcattatttggaatttgagagaaggtataggtgatcggatctgtttcatttataaaaggtccagtttttaggactagtacattcctgttattttctgggttttatcattttgcctaaaataggatataaaagggacaaaaaataagtagactgtttttatgtgtgaattatatttctactaaatgtttttgtatgactgtgttatacttgataatatatatatatatatatatatcaacttgttaaattatttcatgttcccgtggcttcttttcagttgttgcctattacagtatgagagtttaaggttattaaccattggcttagaagtcaacacctaggatcatacatccgttgactacaatgtggaatgaattttatggaaacctgttttatagttctatgtgatgtaaaggtctagggagcaataaccagcccttttttttctgaaggcttgtttttagtcctcattgtacaaaatataaaataatcatattgctatgaatacctaaaaagaaaattagagcccatgtgtattgagccttctctgtgtgccaggaactttgccaaggtgctacatagattattttatttcaagttcacagcaacctataatgggtgggtaagcatgttattatttctgtgttacagataaggaaactaaggcttagttaaatgacttgcttcagtgttccacaggtgtaacaggtggagtcaaatctcaaacatagggctgtcagattttgatggttagtgctcttaatgactgtgattactaaataatatctggtagtttttaacaatagaaaatgcaactttaaaaaatttttattgtggtaaaatacacataacatttaccatttttaagtatattgtttgaaccatttttaagcatatagttcagtggcattaagtatattcacattgttttgcaaccatgagcacctattcatctccagaacattatcatcatcctatactaaaacttagaaaatgtacttttaaacttcttcagttctcttttaatatatggagcccacccaaaggttatatcatgtaataaactcatttctctgttttccctcacagcttaaaaatgagaatttcacttttgggtcctttctgcctttagggctccctggcactttgtccagcgtagagccttaagcctctagatgctttctagtttcctggggccctgaggcaagtatctcttgagaagaggttgctatttctagaggatccacagtgtgcactgtgttgtgctatctaatagtgtggtggaaatcatttatccagaagt

SEQ ID NO: 454047 - DNA, 3508 bp, Homo sapiens
agcctgtagcctgcgagggttctctgacttggataaacccttccaaagatcttcgatgggtccctacaaccacaagatgttatgtgtagcataggtgttgttgatcaaggctgttttccaaagcctctgttatcaccagaagaaagagacattgaacgttccatgaagtcactatttttttcttcaaaggaagatatccatacttcagagagtgaaagcaaaatttttgaacgagctacatcatttgaggaatcagaacgcaagcaaaatgcgttaggaaaatgtgatgcatgtctcagtgacaaagcacagttgcttctagaccaagaggctgaatcagcatcccaaaagatagaagatggtaaaacccctaagccactttctctgaaatctgataggtcaacaaacaatgtggagaggcatactccaaggaccaagattagacctgtaagtttgcctgtagatagactacttcttgcaagtcctcctaatgagagaaatggcagaaatatgggaaatgtaaatttagacaagttttgcaagaatcctgcctttgaaggagttaatagaaaagacgctgctactactgtttgttccaaatttaatggctttgaccagcaaactctacagaaaattcaggacaaacagtatgaacaaaacagcctaactgccaagactacaatgatcatgcccagtgcactccaggaaaaaggagtgacaacaagcctccagattagtggggaccattctatcaatgccactcaacccagtaagccatatgcagagccagtcaggtcagtgagagaggcatctgagagacggtcttcagattcctaccctctcgctcctgtcagagcacccagaacactgcagcctcaacattggacaacattttataaaccacatgctcccatcatcagtatcagggggaatgaggagaagccagcttcaccctcagcagcagtgcctcctggcacagatcacgatccccacggtctcgtggtgaagtcaatgccagacccagacaaagcatcagcttgtcctgggcaagcaactggtcaacctaaagaagactctgaggagcttggcttgcctgatgtgaatccaatgtgtcagagaccaaggctaaaacgaatgcaacagtttgaagacctcgaagatgaaattccacaatttgtgtagggatgtcaaatttcagggtttttttgttgttgttgtgttattttgtggtattgtgcttgttttgtgaaagaatgttttgacagggccccttttgtataggactgccaaatcatgggttttgccttttgttgttgtatttatcctctgttggtaatactgaatggtagaatgttttgatagggtcacatttgtgcctcactggaattatctttaaattctgtatttttaaagttgtgaataagataggtggattcgtattttttaaagttcagttgactttccccaccaaatggtccatttgaatgcatccctaatatatgatatagtctcaactaataggtgcaatttgggaaaatcaggtttattttttggagtggaactgttataagtgcttatttataaaaggaatgtttctgaatgcaagtgcctaaaaagatctttgttggtatgcatatgttttgtcacacaattttatagtgcatctttcaccatttgtgcttttttaagatacgtatgtaagctcttatttttcaattggcaattcagttaatttttaaatgtttacataatggccagaaggcttgcaaatctgtatttaattgcattttaattaattgccagtttttacatgtgatagtcagttgtacaaagaaaatgcacttaaacctgtttctaaattatatattcagttatattatatttggctttagatggttttaatacatttgatagtttttcaccccttggctttattttatataaacttttgtttttcagcagttctgaactttttagtattttataaatggtccaaaaaatgcctgtttcagaagtttttgaattcagtgcatttcctcttgatttgtctgggttaaaaccattccttttgtatgaaatgttttgacttaggaatcattttatgtacttgttctacctggattgtcaacaactgaaagtacatatttcatccaaatcaagctaaaatttatttaagttgattctgagagtacaggtcagtaagcctcattatttggaatttgagagaaggtataggtgatcggatctgtttcatttataaaaggtccagtttttaggactagtacattcctgttattttctgggttttatcattttgcctaaaataggatataaaagggacaaaaaataagtagactgtttttatgtgtgaattatatttctactaaatgtttttgtatgactgtgttatacttgataatatatatatatatatatatatcaacttgttaaattatttcatgttcccgtggcttcttttcagttgttgcctattacagtatgagagtttaaggttattaaccattggcttagaagtcaacacctaggatcatacatccgttgactacaatgtggaatgaattttatggaaacctgttttatagttctatgtgatgtaaaggtctagggagcaataaccagcccttttttttctgaaggcttgtttttagtcctcattgtacaaaatataaaataatcatattgctatgaatacctaaaaagaaaattagagcccatgtgtattgagccttctctgtgtgccaggaactttgccaaggtgctacatagattattttatttcaagttcacagcaacctataatgggtgggtaagcatgttattatttctgtgttacagataaggaaactaaggcttagttaaatgacttgcttcagtgttccacaggtgtaacaggtggagtcaaatctcaaacatagggctgtcagattttgatggttagtgctcttaatgactgtgattactaaataatatctggtagtttttaacaatagaaaatgcaactttaaaaaatttttattgtggtaaaatacacataacatttaccatttttaagtatattgtttgaaccatttttaagcatatagttcagtggcattaagtatattcacattgttttgcaaccatgagcacctattcatctccagaacattatcatcatcctatactaaaacttagaaaatgtacttttaaacttcttcagttctcttttaatatatggagcccacccaaaggttatatcatgtaataaactcatttctctgttttccctcacagcttaaaaatgagaatttcacttttgggtcctttctgcctttagggctccctggcactttgtccagcgtagagccttaagcctctagatgctttctagtttcctggggccctgaggcaagtatctcttgagaagaggttgctatttctagaggatccacagtgtgcactgtgttgtgctatctaatagtgtggtggaaatcatttatccagaagt

SEQ ID NO: 454048 - DNA, 3436 bp, Homo sapiens
gtagctgttcatgttgatttaaatgagtaaaaaatttgaacttttaaattcaatatacacctttaatactgtgcaaatgtttaactcctccacataggtaactgagaatattattttggaaaaaatatgtaagactcatattgtcttgatagagtgttcatctctaactcattcaaactctcttattaaccatgtgccacaaacttaaatagatttctttcattttcagacaaagcacagttgcttctagaccaagaggctgaatcagcatcccaaaagatagaagatggtaaaacccctaagccactttctctgaaatctgataggtcaacaaacaatgtggagaggcatactccaaggaccaagattagacctgtaagtttgcctgtagatagactacttcttgcaagtcctcctaatgagagaaatggcagaaatatgggaaatgtaaatttagacaagttttgcaagaatcctgcctttgaaggagttaatagaaaagacgctgctactactgtttgttccaaatttaatggctttgaccagcaaactctacagaaaattcaggacaaacagtatgaacaaaacagcctaactgccaagactacaatgatcatgcccagtgcactccaggaaaaaggagtgacaacaagcctccagattagtggggaccattctatcaatgccactcaacccagtaagccatatgcagagccagtcaggtcagtgagagaggcatctgagagacggtcttcagattcctaccctctcgctcctgtcagagcacccagaacactgcagcctcaacattggacaacattttataaaccacatgctcccatcatcagtatcagggggaatgaggagaagccagcttcaccctcagcagcagtgcctcctggcacagatcacgatccccacggtctcgtggtgaagtcaatgccagacccagacaaagcatcagcttgtcctgggcaagcaactggtcaacctaaagaagactctgaggagcttggcttgcctgatgtgaatccaatgtgtcagagaccaaggctaaaacgaatgcaacagtttgaagacctcgaagatgaaattccacaatttgtgtagggatgtcaaatttcagggtttttttgttgttgttgtgttattttgtggtattgtgcttgttttgtgaaagaatgttttgacagggccccttttgtataggactgccaaatcatgggttttgccttttgttgttgtatttatcctctgttggtaatactgaatggtagaatgttttgatagggtcacatttgtgcctcactggaattatctttaaattctgtatttttaaagttgtgaataagataggtggattcgtattttttaaagttcagttgactttccccaccaaatggtccatttgaatgcatccctaatatatgatatagtctcaactaataggtgcaatttgggaaaatcaggtttattttttggagtggaactgttataagtgcttatttataaaaggaatgtttctgaatgcaagtgcctaaaaagatctttgttggtatgcatatgttttgtcacacaattttatagtgcatctttcaccatttgtgcttttttaagatacgtatgtaagctcttatttttcaattggcaattcagttaatttttaaatgtttacataatggccagaaggcttgcaaatctgtatttaattgcattttaattaattgccagtttttacatgtgatagtcagttgtacaaagaaaatgcacttaaacctgtttctaaattatatattcagttatattatatttggctttagatggttttaatacatttgatagtttttcaccccttggctttattttatataaacttttgtttttcagcagttctgaactttttagtattttataaatggtccaaaaaatgcctgtttcagaagtttttgaattcagtgcatttcctcttgatttgtctgggttaaaaccattccttttgtatgaaatgttttgacttaggaatcattttatgtacttgttctacctggattgtcaacaactgaaagtacatatttcatccaaatcaagctaaaatttatttaagttgattctgagagtacaggtcagtaagcctcattatttggaatttgagagaaggtataggtgatcggatctgtttcatttataaaaggtccagtttttaggactagtacattcctgttattttctgggttttatcattttgcctaaaataggatataaaagggacaaaaaataagtagactgtttttatgtgtgaattatatttctactaaatgtttttgtatgactgtgttatacttgataatatatatatatatatatatatcaacttgttaaattatttcatgttcccgtggcttcttttcagttgttgcctattacagtatgagagtttaaggttattaaccattggcttagaagtcaacacctaggatcatacatccgttgactacaatgtggaatgaattttatggaaacctgttttatagttctatgtgatgtaaaggtctagggagcaataaccagcccttttttttctgaaggcttgtttttagtcctcattgtacaaaatataaaataatcatattgctatgaatacctaaaaagaaaattagagcccatgtgtattgagccttctctgtgtgccaggaactttgccaaggtgctacatagattattttatttcaagttcacagcaacctataatgggtgggtaagcatgttattatttctgtgttacagataaggaaactaaggcttagttaaatgacttgcttcagtgttccacaggtgtaacaggtggagtcaaatctcaaacatagggctgtcagattttgatggttagtgctcttaatgactgtgattactaaataatatctggtagtttttaacaatagaaaatgcaactttaaaaaatttttattgtggtaaaatacacataacatttaccatttttaagtatattgtttgaaccatttttaagcatatagttcagtggcattaagtatattcacattgttttgcaaccatgagcacctattcatctccagaacattatcatcatcctatactaaaacttagaaaatgtacttttaaacttcttcagttctcttttaatatatggagcccacccaaaggttatatcatgtaataaactcatttctctgttttccctcacagcttaaaaatgagaatttcacttttgggtcctttctgcctttagggctccctggcactttgtccagcgtagagccttaagcctctagatgctttctagtttcctggggccctgaggcaagtatctcttgagaagaggttgctatttctagaggatccacagtgtgcactgtgttgtgctatctaatagtgtggtggaaatcatttatccagaagt

SEQ ID NO: 454049 - DNA, 6481 bp, Homo sapiens
agcggactggcggtcgctgttctagcgcgcgagctagttgcctcccgtacctgccgcggtcgccggccccgcccccgggagcgcgggccaatgggctgggctccaggggcggggctggcgggcgggcggtgcggccgtggcggtagctgcaggggcggtggcggctgcagtggtggtggtgcctgtggctgtggctgcggctgcggctgcggctgagatttggccgggcgtccgcaggccgtgggggatgggggcagcgagctccagccctcggcggtggcggcggccgtaggtgtggggcgggcgtccgcgtccggcacgcgagatggagcgccgtggatttcagtttttctgactgttacatgaaaggatgattgctcacaaacagaaaaagacaaagaaaaaacgtgcttgggcatcaggtcaactctctactgatattacaacttctgaaatggggctcaagtccttaagttccaactctatttttgatccggattacatcaaggagttggtgaatgatatcaggaagttctcccacatgttactatatttgaaagaagccatattttcagactgttttaaagaagttattcatatacgtctagaggaactgctccgtgttttaaagtctataatgaataaacatcagaacctcaattctgttgatcttcaaaatgctgcagaaatgctcactgcaaaagtgaaagctgtgaacttcacagaagttaatgaagaaaacaaaaacgatctcttccaggaagtgttttcttctattgaaactttggcatttacctttggaaatatccttacaaacttccttatgggagatgtaggcaatgattcattattgcgactgcctgtttctcgagaaactaagtcgtttgaaaatgtttctgtggaatcagtggactcatccagtgaaaaaggaaatttttcccctttagaactagacaacgtgctgttaaagaacactgactctatcgagctggctttgtcatatgctaaaacttggtcaaaatatactaagaacatagtttcatgggttgaaaaaaagcttaacttggaattggagtccactagaaatatggtcaagttggcagaggcaactagaactaacattggaattcaggagttcatgccactgcagtctctgtttactaatgctcttcttaatgatatagaaagcagtcaccttttacaacaaacaattgcagctctccaggctaacaaatttgtgcagcctctacttggaaggaaaaatgaaatggaaaaacaaaggaaagaaataaaagagctttggaaacaggagcaaaataaaatgcttgaagcagagaatgctctcaaaaaggcaaaattattatgcatgcaacgtcaagatgaatatgagaaagcaaagtcttccatgtttcgtgcagaagaggagcatctgtcttcaagtggcggattagcaaaaaatctcaacaagcaactagaaaaaaagcgaaggttggaagaggaggctctccaaaaagtagaagaagcaaatgaactttacaaagtttgtgtgacaaatgttgaagaaagaagaaatgatctagaaaataccaaaagagaaattttagcacaactccggacacttgttttccagtgtgatcttacccttaaagctgtaacagttaacctcttccacatgcagcatctgcaggctgcttcccttgcagacagtttacagtctctctgtgatagtgccaaactctatgacccaggccaagagtacagtgaatttgtcaaggccacaaattcaactgaagaagaaaaagttgatggaaatgtaaataaacatttaaatagttcccaaccttcaggatttggacctgccaactctttagaggatgttgtacgccttcctgacagttctaataaaattgaagaggacagatgctctaacagtgcagatataacaggtccttcctttataagatcatggacatttgggatgtttagtgattctgagagcactggagggagcagcgaatctagatctctggattcagaatctataagtccaggagactttcatcgaaaacttccacgaacaccatccagtggaactatgtcctctgcagatgatctagatgaaagagagccaccttccccttcagaaactggacccaattcccttggaacatttaagaaaacattgatgtcaaaggcagctctcacacacaagtttcgcaaattgagatcccccacgaaatgtagggattgtgaaggcattgtagtgttccaaggtgttgaatgtgaagagtgtctccttgtttgtcatcgaaagtgtttggaaaatttagtcattatttgtggtcatcagaaacttccaggaaaaatacacttatttggagcagaattcacactagttgcaaaaaaggaaccagatggtatcccttttatactcaaaatatgtgcctcagagattgaaaatagagctttgtgtctacagggaatttatcgtgtgtgtggaaacaaaataaaaactgaaaaattgtgtcaagctttggaaaatggaatgcacttggtagatatttcagaatttagttcacatgatatctgtgacgtcttgaaattataccttcggcagctcccagaaccatttattttatttcgattgtacaaggaatttatagaccttgcaaaagagatccaacatgtaaatgaagaacaagagacaaaaaagaatagtcttgaagacaaaaaatggccaaatatgtgtatagaaataaaccgaattcttctaaaaagcaaagaccttctaagacaattgccagcatcaaattttaacagtcttcatttccttatagtacatctaaagcgggtagtagatcatgcagaagaaaacaagatgaactccaaaaacttgggggtgatatttggaccaagtctcattaggccaaggccacaactgctcctatcaccatctcctcccttgcagagtattcaaatcaagcacgcttggtagagtttctcattacttactcacagaagatcttcgatgggtccctacaaccacaagatgttatgtgtagcataggtgttgttgatcaaggctgttttccaaagcctctgttatcaccagaagaaagagacattgaacgttccatgaagtcactatttttttcttcaaaggaagatatccatacttcagagagtgaaagcaaaatttttgaacgagctacatcatttgaggaatcagaacgcaagcaaaatgcgttaggaaaatgtgatgcatgtctcagtgacaaagcacagttgcttctagaccaagaggctgaatcagcatcccaaaagatagaagatggtaaaacccctaagccactttctctgaaatctgataggtcaacaaacaatgtggagaggcatactccaaggaccaagattagacctgtaagtttgcctgtagatagactacttcttgcaagtcctcctaatgagagaaatggcagaaatatgggaaatgtaaatttagacaagttttgcaagaatcctgcctttgaaggagttaatagaaaagacgctgctactactgtttgttccaaatttaatggctttgaccagcaaactctacagaaaattcaggacaaacagtatgaacaaaacagcctaactgccaagactacaatgatcatgcccagtgcactccaggaaaaaggagtgacaacaagcctccagattagtggggaccattctatcaatgccactcaacccagtaagccatatgcagagccagtcaggtcagtgagagaggcatctgagagacggtcttcagattcctaccctctcgctcctgtcagagcacccagaacactgcagcctcaacattggacaacattttataaaccacatgctcccatcatcagtatcagggggaatgaggagaagccagcttcaccctcagcagcagtgcctcctggcacagatcacgatccccacggtctcgtggtgaagtcaatgccagacccagacaaagcatcagcttgtcctgggcaagcaactggtcaacctaaagaagactctgaggagcttggcttgcctgatgtgaatccaatgtgtcagagaccaaggctaaaacgaatgcaacagtttgaagacctcgaagatgaaattccacaatttgtgtagggatgtcaaatttcagggtttttttgttgttgttgtgttattttgtggtattgtgcttgttttgtgaaagaatgttttgacagggccccttttgtataggactgccaaatcatgggttttgccttttgttgttgtatttatcctctgttggtaatactgaatggtagaatgttttgatagggtcacatttgtgcctcactggaattatctttaaattctgtatttttaaagttgtgaataagataggtggattcgtattttttaaagttcagttgactttccccaccaaatggtccatttgaatgcatccctaatatatgatatagtctcaactaataggtgcaatttgggaaaatcaggtttattttttggagtggaactgttataagtgcttatttataaaaggaatgtttctgaatgcaagtgcctaaaaagatctttgttggtatgcatatgttttgtcacacaattttatagtgcatctttcaccatttgtgcttttttaagatacgtatgtaagctcttatttttcaattggcaattcagttaatttttaaatgtttacataatggccagaaggcttgcaaatctgtatttaattgcattttaattaattgccagtttttacatgtgatagtcagttgtacaaagaaaatgcacttaaacctgtttctaaattatatattcagttatattatatttggctttagatggttttaatacatttgatagtttttcaccccttggctttattttatataaacttttgtttttcagcagttctgaactttttagtattttataaatggtccaaaaaatgcctgtttcagaagtttttgaattcagtgcatttcctcttgatttgtctgggttaaaaccattccttttgtatgaaatgttttgacttaggaatcattttatgtacttgttctacctggattgtcaacaactgaaagtacatatttcatccaaatcaagctaaaatttatttaagttgattctgagagtacaggtcagtaagcctcattatttggaatttgagagaaggtataggtgatcggatctgtttcatttataaaaggtccagtttttaggactagtacattcctgttattttctgggttttatcattttgcctaaaataggatataaaagggacaaaaaataagtagactgtttttatgtgtgaattatatttctactaaatgtttttgtatgactgtgttatacttgataatatatatatatatatatatatcaacttgttaaattatttcatgttcccgtggcttcttttcagttgttgcctattacagtatgagagtttaaggttattaaccattggcttagaagtcaacacctaggatcatacatccgttgactacaatgtggaatgaattttatggaaacctgttttatagttctatgtgatgtaaaggtctagggagcaataaccagcccttttttttctgaaggcttgtttttagtcctcattgtacaaaatataaaataatcatattgctatgaatacctaaaaagaaaattagagcccatgtgtattgagccttctctgtgtgccaggaactttgccaaggtgctacatagattattttatttcaagttcacagcaacctataatgggtgggtaagcatgttattatttctgtgttacagataaggaaactaaggcttagttaaatgacttgcttcagtgttccacaggtgtaacaggtggagtcaaatctcaaacatagggctgtcagattttgatggttagtgctcttaatgactgtgattactaaataatatctggtagtttttaacaatagaaaatgcaactttaaaaaatttttattgtggtaaaatacacataacatttaccatttttaagtatattgtttgaaccatttttaagcatatagttcagtggcattaagtatattcacattgttttgcaaccatgagcacctattcatctccagaacattatcatcatcctatactaaaacttagaaaatgtacttttaaacttcttcagttctcttttaatatatggagcccacccaaaggttatatcatgtaataaactcatttctctgttttccctcacagcttaaaaatgagaatttcacttttgggtcctttctgcctttagggctccctggcactttgtccagcgtagagccttaagcctctagatgctttctagtttcctggggccctgaggcaagtatctcttgagaagaggttgctatttctagaggatccacagtgtgcactgtgttgtgctatctaatagtgtggtggaaatcatttatccagaagt

SEQ ID NO: 454050 - DNA, 6244 bp, Homo sapiens
agcggactggcggtcgctgttctagcgcgcgagctagttgcctcccgtacctgccgcggtcgccggccccgcccccgggagcgcgggccaatgggctgggctccaggggcggggctggcgggcgggcggtgcggccgtggcggtagctgcaggggcggtggcggctgcagtggtggtggtgcctgtggctgtggctgcggctgcggctgcggctgagatttggccgggcgtccgcaggccgtgggggatgggggcagcgagctccagccctcggcggtggcggcggccgtaggtgtggggcgggcgtccgcgtccggcacgcgagatggagcgccgtgactgttttaaagaagttattcatatacgtctagaggaactgctccgtgttttaaagtctataatgaataaacatcagaacctcaattctgttgatcttcaaaatgctgcagaaatgctcactgcaaaagtgaaagctgtgaacttcacagaagttaatgaagaaaacaaaaacgatctcttccaggaagtgttttcttctattgaaactttggcatttacctttggaaatatccttacaaacttccttatgggagatgtaggcaatgattcattattgcgactgcctgtttctcgagaaactaagtcgtttgaaaatgtttctgtggaatcagtggactcatccagtgaaaaaggaaatttttcccctttagaactagacaacgtgctgttaaagaacactgactctatcgagctggctttgtcatatgctaaaacttggtcaaaatatactaagaacatagtttcatgggttgaaaaaaagcttaacttggaattggagtccactagaaatatggtcaagttggcagaggcaactagaactaacattggaattcaggagttcatgccactgcagtctctgtttactaatgctcttcttaatgatatagaaagcagtcaccttttacaacaaacaattgcagctctccaggctaacaaatttgtgcagcctctacttggaaggaaaaatgaaatggaaaaacaaaggaaagaaataaaagagctttggaaacaggagcaaaataaaatgcttgaagcagagaatgctctcaaaaaggcaaaattattatgcatgcaacgtcaagatgaatatgagaaagcaaagtcttccatgtttcgtgcagaagaggagcatctgtcttcaagtggcggattagcaaaaaatctcaacaagcaactagaaaaaaagcgaaggttggaagaggaggctctccaaaaagtagaagaagcaaatgaactttacaaagtttgtgtgacaaatgttgaagaaagaagaaatgatctagaaaataccaaaagagaaattttagcacaactccggacacttgttttccagtgtgatcttacccttaaagctgtaacagttaacctcttccacatgcagcatctgcaggctgcttcccttgcagacagtttacagtctctctgtgatagtgccaaactctatgacccaggccaagagtacagtgaatttgtcaaggccacaaattcaactgaagaagaaaaagttgatggaaatgtaaataaacatttaaatagttcccaaccttcaggatttggacctgccaactctttagaggatgttgtacgccttcctgacagttctaataaaattgaagaggacagatgctctaacagtgcagatataacaggtccttcctttataagatcatggacatttgggatgtttagtgattctgagagcactggagggagcagcgaatctagatctctggattcagaatctataagtccaggagactttcatcgaaaacttccacgaacaccatccagtggaactatgtcctctgcagatgatctagatgaaagagagccaccttccccttcagaaactggacccaattcccttggaacatttaagaaaacattgatgtcaaaggcagctctcacacacaagtttcgcaaattgagatcccccacgaaatgtagggattgtgaaggcattgtagtgttccaaggtgttgaatgtgaagagtgtctccttgtttgtcatcgaaagtgtttggaaaatttagtcattatttgtggtcatcagaaacttccaggaaaaatacacttatttggagcagaattcacactagttgcaaaaaaggaaccagatggtatcccttttatactcaaaatatgtgcctcagagattgaaaatagagctttgtgtctacagggaatttatcgtgtgtgtggaaacaaaataaaaactgaaaaattgtgtcaagctttggaaaatggaatgcacttggtagatatttcagaatttagttcacatgatatctgtgacgtcttgaaattataccttcggcagctcccagaaccatttattttatttcgattgtacaaggaatttatagaccttgcaaaagagatccaacatgtaaatgaagaacaagagacaaaaaagaatagtcttgaagacaaaaaatggccaaatatgtgtatagaaataaaccgaattcttctaaaaagcaaagaccttctaagacaattgccagcatcaaattttaacagtcttcatttccttatagtacatctaaagcgggtagtagatcatgcagaagaaaacaagatgaactccaaaaacttgggggtgatatttggaccaagtctcattaggccaaggccacaactgctcctatcaccatctcctcccttgcagagtattcaaatcaagcacgcttggtagagtttctcattacttactcacagaagatcttcgatgggtccctacaaccacaagatgttatgtgtagcataggtgttgttgatcaaggctgttttccaaagcctctgttatcaccagaagaaagagacattgaacgttccatgaagtcactatttttttcttcaaaggaagatatccatacttcagagagtgaaagcaaaatttttgaacgagctacatcatttgaggaatcagaacgcaagcaaaatgcgttaggaaaatgtgatgcatgtctcagtgacaaagcacagttgcttctagaccaagaggctgaatcagcatcccaaaagatagaagatggtaaaacccctaagccactttctctgaaatctgataggtcaacaaacaatgtggagaggcatactccaaggaccaagattagacctgtaagtttgcctgtagatagactacttcttgcaagtcctcctaatgagagaaatggcagaaatatgggaaatgtaaatttagacaagttttgcaagaatcctgcctttgaaggagttaatagaaaagacgctgctactactgtttgttccaaatttaatggctttgaccagcaaactctacagaaaattcaggacaaacagtatgaacaaaacagcctaactgccaagactacaatgatcatgcccagtgcactccaggaaaaaggagtgacaacaagcctccagattagtggggaccattctatcaatgccactcaacccagtaagccatatgcagagccagtcaggtcagtgagagaggcatctgagagacggtcttcagattcctaccctctcgctcctgtcagagcacccagaacactgcagcctcaacattggacaacattttataaaccacatgctcccatcatcagtatcagggggaatgaggagaagccagcttcaccctcagcagcagtgcctcctggcacagatcacgatccccacggtctcgtggtgaagtcaatgccagacccagacaaagcatcagcttgtcctgggcaagcaactggtcaacctaaagaagactctgaggagcttggcttgcctgatgtgaatccaatgtgtcagagaccaaggctaaaacgaatgcaacagtttgaagacctcgaagatgaaattccacaatttgtgtagggatgtcaaatttcagggtttttttgttgttgttgtgttattttgtggtattgtgcttgttttgtgaaagaatgttttgacagggccccttttgtataggactgccaaatcatgggttttgccttttgttgttgtatttatcctctgttggtaatactgaatggtagaatgttttgatagggtcacatttgtgcctcactggaattatctttaaattctgtatttttaaagttgtgaataagataggtggattcgtattttttaaagttcagttgactttccccaccaaatggtccatttgaatgcatccctaatatatgatatagtctcaactaataggtgcaatttgggaaaatcaggtttattttttggagtggaactgttataagtgcttatttataaaaggaatgtttctgaatgcaagtgcctaaaaagatctttgttggtatgcatatgttttgtcacacaattttatagtgcatctttcaccatttgtgcttttttaagatacgtatgtaagctcttatttttcaattggcaattcagttaatttttaaatgtttacataatggccagaaggcttgcaaatctgtatttaattgcattttaattaattgccagtttttacatgtgatagtcagttgtacaaagaaaatgcacttaaacctgtttctaaattatatattcagttatattatatttggctttagatggttttaatacatttgatagtttttcaccccttggctttattttatataaacttttgtttttcagcagttctgaactttttagtattttataaatggtccaaaaaatgcctgtttcagaagtttttgaattcagtgcatttcctcttgatttgtctgggttaaaaccattccttttgtatgaaatgttttgacttaggaatcattttatgtacttgttctacctggattgtcaacaactgaaagtacatatttcatccaaatcaagctaaaatttatttaagttgattctgagagtacaggtcagtaagcctcattatttggaatttgagagaaggtataggtgatcggatctgtttcatttataaaaggtccagtttttaggactagtacattcctgttattttctgggttttatcattttgcctaaaataggatataaaagggacaaaaaataagtagactgtttttatgtgtgaattatatttctactaaatgtttttgtatgactgtgttatacttgataatatatatatatatatatatatcaacttgttaaattatttcatgttcccgtggcttcttttcagttgttgcctattacagtatgagagtttaaggttattaaccattggcttagaagtcaacacctaggatcatacatccgttgactacaatgtggaatgaattttatggaaacctgttttatagttctatgtgatgtaaaggtctagggagcaataaccagcccttttttttctgaaggcttgtttttagtcctcattgtacaaaatataaaataatcatattgctatgaatacctaaaaagaaaattagagcccatgtgtattgagccttctctgtgtgccaggaactttgccaaggtgctacatagattattttatttcaagttcacagcaacctataatgggtgggtaagcatgttattatttctgtgttacagataaggaaactaaggcttagttaaatgacttgcttcagtgttccacaggtgtaacaggtggagtcaaatctcaaacatagggctgtcagattttgatggttagtgctcttaatgactgtgattactaaataatatctggtagtttttaacaatagaaaatgcaactttaaaaaatttttattgtggtaaaatacacataacatttaccatttttaagtatattgtttgaaccatttttaagcatatagttcagtggcattaagtatattcacattgttttgcaaccatgagcacctattcatctccagaacattatcatcatcctatactaaaacttagaaaatgtacttttaaacttcttcagttctcttttaatatatggagcccacccaaaggttatatcatgtaataaactcatttctctgttttccctcacagcttaaaaatgagaatttcacttttgggtcctttctgcctttagggctccctggcactttgtccagcgtagagccttaagcctctagatgctttctagtttcctggggccctgaggcaagtatctcttgagaagaggttgctatttctagaggatccacagtgtgcactgtgttgtgctatctaatagtgtggtggaaatcatttatccagaagt

SEQ ID NO: 454051 - DNA, 3551 bp, Homo sapiens
agcccactgcctcagaagactccctttcatctgttcctactgagctggtcccagccagcagttcagagctgccctctcctgggcagctgcctcccctcctctgcaaggaacccacgcagatgttatgtgtagcataggtgttgttgatcaaggctgttttccaaagcctctgttatcaccagaagaaagagacattgaacgttccatgaagtcactatttttttcttcaaaggaagatatccatacttcagagagtgaaagcaaaatttttgaacgagctacatcatttgaggaatcagaacgcaagcaaaatgcgttaggaaaatgtgatgcatgtctcagtgacaaagcacagttgcttctagaccaagaggctgaatcagcatcccaaaagatagaagatggtaaaacccctaagccactttctctgaaatctgataggtcaacaaacaatgtggagaggcatactccaaggaccaagattagacctgtaagtttgcctgtagatagactacttcttgcaagtcctcctaatgagagaaatggcagaaatatgggaaatgtaaatttagacaagttttgcaagaatcctgcctttgaaggagttaatagaaaagacgctgctactactgtttgttccaaatttaatggctttgaccagcaaactctacagaaaattcaggacaaacagtatgaacaaaacagcctaactgccaagactacaatgatcatgcccagtgcactccaggaaaaaggagtgacaacaagcctccagattagtggggaccattctatcaatgccactcaacccagtaagccatatgcagagccagtcaggtcagtgagagaggcatctgagagacggtcttcagattcctaccctctcgctcctgtcagagcacccagaacactgcagcctcaacattggacaacattttataaaccacatgctcccatcatcagtatcagggggaatgaggagaagccagcttcaccctcagcagcagtgcctcctggcacagatcacgatccccacggtctcgtggtgaagtcaatgccagacccagacaaagcatcagcttgtcctgggcaagcaactggtcaacctaaagaagactctgaggagcttggcttgcctgatgtgaatccaatgtgtcagagaccaaggctaaaacgaatgcaacagtttgaagacctcgaagatgaaattccacaatttgtgtagggatgtcaaatttcagggtttttttgttgttgttgtgttattttgtggtattgtgcttgttttgtgaaagaatgttttgacagggccccttttgtataggactgccaaatcatgggttttgccttttgttgttgtatttatcctctgttggtaatactgaatggtagaatgttttgatagggtcacatttgtgcctcactggaattatctttaaattctgtatttttaaagttgtgaataagataggtggattcgtattttttaaagttcagttgactttccccaccaaatggtccatttgaatgcatccctaatatatgatatagtctcaactaataggtgcaatttgggaaaatcaggtttattttttggagtggaactgttataagtgcttatttataaaaggaatgtttctgaatgcaagtgcctaaaaagatctttgttggtatgcatatgttttgtcacacaattttatagtgcatctttcaccatttgtgcttttttaagatacgtatgtaagctcttatttttcaattggcaattcagttaatttttaaatgtttacataatggccagaaggcttgcaaatctgtatttaattgcattttaattaattgccagtttttacatgtgatagtcagttgtacaaagaaaatgcacttaaacctgtttctaaattatatattcagttatattatatttggctttagatggttttaatacatttgatagtttttcaccccttggctttattttatataaacttttgtttttcagcagttctgaactttttagtattttataaatggtccaaaaaatgcctgtttcagaagtttttgaattcagtgcatttcctcttgatttgtctgggttaaaaccattccttttgtatgaaatgttttgacttaggaatcattttatgtacttgttctacctggattgtcaacaactgaaagtacatatttcatccaaatcaagctaaaatttatttaagttgattctgagagtacaggtcagtaagcctcattatttggaatttgagagaaggtataggtgatcggatctgtttcatttataaaaggtccagtttttaggactagtacattcctgttattttctgggttttatcattttgcctaaaataggatataaaagggacaaaaaataagtagactgtttttatgtgtgaattatatttctactaaatgtttttgtatgactgtgttatacttgataatatatatatatatatatatatcaacttgttaaattatttcatgttcccgtggcttcttttcagttgttgcctattacagtatgagagtttaaggttattaaccattggcttagaagtcaacacctaggatcatacatccgttgactacaatgtggaatgaattttatggaaacctgttttatagttctatgtgatgtaaaggtctagggagcaataaccagcccttttttttctgaaggcttgtttttagtcctcattgtacaaaatataaaataatcatattgctatgaatacctaaaaagaaaattagagcccatgtgtattgagccttctctgtgtgccaggaactttgccaaggtgctacatagattattttatttcaagttcacagcaacctataatgggtgggtaagcatgttattatttctgtgttacagataaggaaactaaggcttagttaaatgacttgcttcagtgttccacaggtgtaacaggtggagtcaaatctcaaacatagggctgtcagattttgatggttagtgctcttaatgactgtgattactaaataatatctggtagtttttaacaatagaaaatgcaactttaaaaaatttttattgtggtaaaatacacataacatttaccatttttaagtatattgtttgaaccatttttaagcatatagttcagtggcattaagtatattcacattgttttgcaaccatgagcacctattcatctccagaacattatcatcatcctatactaaaacttagaaaatgtacttttaaacttcttcagttctcttttaatatatggagcccacccaaaggttatatcatgtaataaactcatttctctgttttccctcacagcttaaaaatgagaatttcacttttgggtcctttctgcctttagggctccctggcactttgtccagcgtagagccttaagcctctagatgctttctagtttcctggggccctgaggcaagtatctcttgagaagaggttgctatttctagaggatccacagtgtgcactgtgttgtgctatctaatagtgtggtggaaatcatttatccagaagt

SEQ ID NO: 454052 - DNA, 1351 bp, Homo sapiens
aggagtgatagcccccaaaccccagtcccaccaggccctgagggcccctttgtcactggatctgataagaaacaccacccctgcagccccctcccctcacctgaccaatggccacagcctggctgggcccagctccctgtatataaggggaccctgggggctgagcactaccaaggccagtcctgagcaggcccaactccagtgcagctgcccaccctgccgccatgtctctgaccaagactgagaggaccatcattgtgtccatgtgggccaagatctccacgcaggccgacaccatcggcaccgagactctggagaggctcttcctcagccacccgcagaccaagacctacttcccgcacttcgacctgcacccggggtccgcgcagttgcgcgcgcacggctccaaggtggtggccgccgtgggcgacgcggtgaagagcatcgacgacatcggcggcgccctgtccaagctgagcgagctgcacgcctacatcctgcgcgtggacccggtcaacttcaagctcctgtcccactgcctgctggtcaccctggccgcgcgcttccccgccgacttcacgccgaggcccacgccgcctgggacaagttctatcggtcgtatcctctgtcctgaccgagaagtaccgctgagcgccgctccgggacccccaggacaggctgcggcccctcccccgtcctggaggttccccagccccacttaccgcgtaatgcgccaataaaccaatgaacgaaaaatatatattcaatatcatatctcgtattcactaccaaatcggtggggtcccctttctaagtaatgatatctccctcggaaggtgcgccccatgttagcgcggtatacccgcactatttttctgttacaccaagggtggcgccccattatagagtcgcgctagcttatataataagaccgccgagctgccctcgttgccccactctagtattttcatccaagcaccccgtgcgtgcgaacaagttgcgcgaacagacgggctatacatctgatggcagcacccttgttgcgtgacagcagcgaccccctaaacatcatcggttgggtgggtggttgcacccatcaatctgtgggacacaccaattttccccattccacggaatgatactttctacagcagctccatcaatcggcccacaacacttctaacgaccttctgcaaacgcctgtaacaatcagcggctggtcgaaacaacactctcgcgcgccaatttagtactgctgcatcgactctggagaacacaactcatgatcccctcacagagtgactactgtggttgctccgtgagacaactgtcttttataccacggatgacc

SEQ ID NO: 454053 - DNA, 914 bp, Homo sapiens
aggagtgatagcccccaaaccccagtcccaccaggccctgagggcccctttgtcactggatctgataagaaacaccacccctgcagccccctcccctcacctgaccaatggccacagcctggctgggcccagctccctgtatataaggggaccctgggggctgagcactaccaaggccagtcctgagcaggcccaactccagtgcagctgcccaccctgccgccatgtctctgaccaagactgagaggaccatcattgtgtccatgtgggccaagatctccacgcaggccgacaccatcggcaccgagactctggagaggctcttcctcagccacccgcagaccaagacctacttcccgcacttcgacctgcacccggggtccgcgcagttgcgcgcgcacggctccaaggtggtggccgccgtgggcgacgcggtgaagagcatcgacgacatcggcggcgccctgtccaagctgagcgagctgcacgcctacatcctgcgcgtggacccggtcaacttcaaggctcttcacggtgtaccccagcaccaaggtctacttcccgcacctgagcgcctgccaggacgcgacgcagctgctgagccacgggcagcgcatgctggcggctgtgggcgcggcggtgcagcacgtggacaacctgcgcgccgcgctgagcccgctggcggacctgcacgcgctcgtgctgcgcgtggacccagccaactttccgctgctaatccagtgtttccacgtcgtgctggcctcccacctgcaggacgagttcaccgtgcaaatgcaagcggcgtgggacaagttcctgactggtgtggccgtggtgctgaccgaaaaataccgctgagccctgtgctgcgcaggccttggtctgtgcctgtcaataaacagaggcccgaacca

SEQ ID NO: 454054 - DNA, 529 bp, Homo sapiens
catgtctctgaccaagacttaggggaccatcattgtgtccatgtgggccaagatctccacgcaggccgacaccatcggcaccgagactctggagaggctcttcctcagccacccgcagaccaagacctacttcccgcacttcgacctgcacccggggtccgcgcagttgcgcgcgcacggctccaaggtggtggccgccgtgggcgacgcggtgaagagcatcgacgacatcggcggcgccctgtccaagctgagcgagctgcacgcctacatcctgcgcgtggacccggtcaacttcaagctcctgtcccactgcctgctggtcaccctggccgcgcgcttccccgccgacttcacggccgaggcccacgccgcctgggccaagttcctatcggtcgtatcctctgtcctgaccgagaagtaccgctgagcgccgcctccgggacccccaggacaggctgcggcccctcccctgcccttcaccctcccacagttcctgccctgactccaataaatggatgaggacgga

SEQ ID NO: 454055 - DNA, 502 bp, Homo sapiens
agagcacgtcaggcggcgccatgctcagcgcccaggagcgcgcccaaatcgcgcaggtctgggacctgattgcgggccacgaggcgcaattcggggcggagctgctgctcaggctcttcacggtgtaccccagcaccaaggtctacttcccgcacctgagcgcctgccaggacgcgacgcagctgctgagccacgggcagcgcatgctggcggctgtgggcgcggcggtgcagcacgtggacaacctgcgcgccgcgctgagcccgctggcggacctgcacgcgctcgtgctgcgcgtggacccagccaactttccgctgctaatccagtgtttccacgtcgtgctggcctcccacctgcaggacgagttcaccgtgcaaatgcaagcggcgtgggacaagttcctgactggtgtggccgtggtgctgaccgaaaaataccgctgagccctgtgctgcgcaggccttggtctgtgcctgtcaataaacagaggcccgaacca

SEQ ID NO: 454056 - DNA, 443 bp, Homo sapiens
ggttcgggcctctgtttattgacaggcacagaccaaggcctgcgcagcacaaggctcttcacggtgtaccccagcaccaaggtctacttcccgcacctgagcgcctgccaggacgcgacgcagctgctgagccacgggcagcgcatgctggcggctgtgggcgcggcggtgcagcacgtggacaacctgcgcgccgcgctgagcccgctggcggacctgcacgcgctcgtgctgcgcgtggacccagccaactttccgctgctaatccagtgtttccacgtcgtgctggcctcccacctgcaggacgagttcaccgtgcaaatgcaagcggcgtgggacaagttcctgactggtgtggccgtggtgctgaccgaaaaataccgctgagccctgtgctgcgcaggccttggtctgtgcctgtcaataaacagaggcccgaacca

SEQ ID NO: 454057 - DNA, 683 bp, Homo sapiens
aactcctggtactctagcaccgatctgctttggagaacctgatcctgagactccagcaggatgtcttatcaacagcagcagtgcaagcagccctgccagccacctcctgtgtgccccacgccaaagtgcccagagccatgtccacccccgaagtgccctgagccctgcccatcaccaaagtgtccacagccctgcccacctcagcagtgccagcagaaatatcctcctgtgacaccttccccaccctgccagccaaagtgtccacccaagagcaagtaacagcttcaggattcatcaggagcatgagaggataaggataattggctcacctcgttccacagctccacttgcatcttctcaccaaagccttccatggatgcacagggagcttctttctccttaacctgtggcctgcctgtgatgatctgtgacagcaaaagattccctttctgaggctgccatactgccactgtccaggtggagctaagaaaaggaagtcctcagctgtgccagctcccagagcttcagcagaaagagcagcagctctctccctgggaaccatcagacaattctgttgatgtgttctgtgtctgtctgtcacctggtcatgagcttctaccacctttgcaattgtcatttatcgttcactccctgaataaagtatctatgcatatatatttgta

SEQ ID NO: 454058 - DNA, 737 bp, Homo sapiens
tcccatgttaaatgcttaaaccgttcagggtttttgacccacacagttttgcaacgcaagctcaagtaactctttttaattatccaccgctacagatcctgagactccagcaggatgtcttatcaacagcagcagtgcaagcagccctgccagccacctcctgtgtgccccacgccaaagtgcccagagccatgtccacccccgaagtgccctgagccctgcccatcaccaaagtgtccacagccctgcccacctcagcagtgccagcagaaatatcctcctgtgacaccttccccaccctgccagccaaagtgtccacccaagagcaagtaacagcttcaggattcatcaggagcatgagaggataaggataattggctcacctcgttccacagctccacttgcatcttctcaccaaagccttccatggatgcacagggagcttctttctccttaacctgtggcctgcctgtgatgatctgtgacagcaaaagattccctttctgaggctgccatactgccactgtccaggtggagctaagaaaaggaagtcctcagctgtgccagctcccagagcttcagcagaaagagcagcagctctctccctgggaaccatcagacaattctgttgatgtgttctgtgtctgtctgtcacctggtcatgagcttctaccacctttgcaattgtcatttatcgttcactccctgaataaagtatctatgcatatatatttgta

SEQ ID NO: 454059 - DNA, 918 bp, Homo sapiens
ttttataaataaaaaggctgtagtacacatccttgatggcaccaagtagcaaacgtgctgtggagactagatctcactctcaaatctgtcctgggatgcaagtgcctctacgaatgtggtgcagaagctacaaatgtggtgcagaagacagcttcaaagaggaaaggaatataggtaaaaatctgaggttttatctgagaaaaaggtggcaaagaaaatttcagtcttgaacagggtcagcagatagcacaatgtggtcagcctgcaaacccagagatcctgagactccagcaggatgtcttatcaacagcagcagtgcaagcagccctgccagccacctcctgtgtgccccacgccaaagtgcccagagccatgtccacccccgaagtgccctgagccctgcccatcaccaaagtgtccacagccctgcccacctcagcagtgccagcagaaatatcctcctgtgacaccttccccaccctgccagccaaagtgtccacccaagagcaagtaacagcttcaggattcatcaggagcatgagaggataaggataattggctcacctcgttccacagctccacttgcatcttctcaccaaagccttccatggatgcacagggagcttctttctccttaacctgtggcctgcctgtgatgatctgtgacagcaaaagattccctttctgaggctgccatactgccactgtccaggtggagctaagaaaaggaagtcctcagctgtgccagctcccagagcttcagcagaaagagcagcagctctctccctgggaaccatcagacaattctgttgatgtgttctgtgtctgtctgtcacctggtcatgagcttctaccacctttgcaattgtcatttatcgttcactccctgaataaagtatctatgcatatatatttgta

SEQ ID NO: 454060 - DNA, 816 bp, Homo sapiens
ttttataaataaaaaggctgtagtacacatccttgatggcaccaagtagcaaacgtgctgtggagactagatctcactctcaaatctgtcctgggatgcaagtgcctctacgaatgtggtgcagaagctacaaatgtggtgcagaagacagcttcaaagaggaaaggaatatagatcctgagactccagcaggatgtcttatcaacagcagcagtgcaagcagccctgccagccacctcctgtgtgccccacgccaaagtgcccagagccatgtccacccccgaagtgccctgagccctgcccatcaccaaagtgtccacagccctgcccacctcagcagtgccagcagaaatatcctcctgtgacaccttccccaccctgccagccaaagtgtccacccaagagcaagtaacagcttcaggattcatcaggagcatgagaggataaggataattggctcacctcgttccacagctccacttgcatcttctcaccaaagccttccatggatgcacagggagcttctttctccttaacctgtggcctgcctgtgatgatctgtgacagcaaaagattccctttctgaggctgccatactgccactgtccaggtggagctaagaaaaggaagtcctcagctgtgccagctcccagagcttcagcagaaagagcagcagctctctccctgggaaccatcagacaattctgttgatgtgttctgtgtctgtctgtcacctggtcatgagcttctaccacctttgcaattgtcatttatcgttcactccctgaataaagtatctatgcatatatatttgta

SEQ ID NO: 454061 - DNA, 774 bp, Homo sapiens
tcccatgttaaatgcttaaaccgttcagggtttttgacccacacagttttgcaacgcaagctcaagtaactctttttaattatccaccgctacagatcctgagactccagcaggatgtcttatcaacagcagcagtgcaagcagccctgccagccacctcctgtgtgccccacgccaaagtgcccagagccatgtccacccccgaagtgccctgagccctgcccatcaccaaagtgtccacagccctgcccacctcagcagtgccagcagaaatatcctcctgtgacaccttccccaccctgccagccaaagtgtccacccaagagcaagtaacagcttcaggattcatcaggagcatgagaggataaggataattggctcacctcgttccacagctccacttgcatcttctcaccaaagccttccatggatgcacagggagcttctttctccttaacctgtggcctgcctgtgatgatctgtgacagcaaaagattccctttctgaggctgccatactgccactgtccaggtggagctaagaaaaggaagtcctcagctgtgccagctcccagagcttcagcagaaagagcagcagctctctccctgggaaccatcagacaattctgttgatgtgttctgtgtctgtctgtcacctggtcatgagcttctaccacctttgcaattgtcatttatcgttcactccctgaataaagtgggactcgtgccgtctcgtcggctggcgcggggggtgcagcgcgattgtctctcgact

SEQ ID NO: 454062 - DNA, 778 bp, Homo sapiens
tcccatgttaaatgcttaaaccgttcagggtttttgacccacacagttttgcaacgcaagctcaagtaactctttttaattatccaccgctacagatcctgagactccagcaggatgtcttatcaacagcagcagtgcaagcagccctgccagccacctcctgtgtgccccacgccaaagtgcccagagccatgtccacccccgaagtgccctgagccctgcccatcaccaaagtgtccacagccctgcccacctcagcagtgccagcagaaatatcctcctgtgacaccttccccaccctgccagccaaagtgtccacccaagagcaagtaacagcttcaggattcatcaggagcatgagaggataaggataattggctcacctcgttccacagctccacttgcatcttctcaccaaagccttccatggatgcacagggagcttctttctccttaacctgtggcctgcctgtgatgatctgtgacagcaaaagattccctttctgaggctgccatactgccactgtccaggtggagctaagaaaaggaagtcctcagctgtgccagctcccagagcttcagcagaaagagcagcagctctctccctgggaaccatcagacaattctgttgatgtgttctgtgtctgtctgtcacctggtcatgagcttctaccacctttgcaattgtcatttatcgttcactccctgaataaagtcatgtacgcgtgccagctctcctctcccccatctttttattgtgcgagacggctgatagagt

SEQ ID NO: 454063 - DNA, 929 bp, Homo sapiens
ttttataaataaaaaggctgtagtacacatccttgatggcaccaagtagcaaacgtgctgtggagactagatctcactctcaaatctgtcctgggatgcaagtgcctctacgaatgtggtgcagaagctacaaatgtggtgcagaagacagcttcaaagaggaaaggaatataggtgccaagagcctgcaatccttcccaaacagccctttgttctgtgctcaagtcaacccactgggactttactacagataatgataagagaaatggcttgtgagattgctcatgatcctgagactccagcaggatgtcttatcaacagcagcagtgcaagcagccctgccagccacctcctgtgtgccccacgccaaagtgcccagagccatgtccacccccgaagtgccctgagccctgcccatcaccaaagtgtccacagccctgcccacctcagcagtgccagcagaaatatcctcctgtgacaccttccccaccctgccagccaaagtgtccacccaagagcaagtaacagcttcaggattcatcaggagcatgagaggataaggataattggctcacctcgttccacagctccacttgcatcttctcaccaaagccttccatggatgcacagggagcttctttctccttaacctgtggcctgcctgtgatgatctgtgacagcaaaagattccctttctgaggctgccatactgccactgtccaggtggagctaagaaaaggaagtcctcagctgtgccagctcccagagcttcagcagaaagagcagcagctctctccctgggaaccatcagacaattctgttgatgtgttctgtgtctgtctgtcacctggtcatgagcttctaccacctttgcaattgtcatttatcgttcactccctgaataaagtatctatgcatatatatttgta

SEQ ID NO: 454064 - DNA, 970 bp, Homo sapiens
ttttataaataaaaaggctgtagtacacatccttgatggcaccaagtagcaaacgtgctgtggagactagatctcactctcaaatctgtcctgggatgcaagtgcctctacgaatgtggtgcagaagctacaaatgtggtgcagaagacagcttcaaagaggaaaggaatataggtgccaagagcctgcaatccttcccaaacagccctttgttctgtgctcaagtcaacccactgggactttactacagataatgataagagaaatggcttgtgagattgctcatgatcctgagactccagcaggatgtcttatcaacagcagcagtgcaagcagccctgccagccacctcctgtgtgccccacgccaaagtgcccagagccatgtccacccccgaagtgccctgagccctgcccatcaccaaagtgtccacagccctgcccacctcagcagtgccagcagaaatatcctcctgtgacaccttccccaccctgccagccaaagtgtccacccaagagcaagtaacagcttcaggattcatcaggagcatgagaggataaggataattggctcacctcgttccacagctccacttgcatcttctcaccaaagccttccatggatgcacagggagcttctttctccttaacctgtggcctgcctgtgatgatctgtgacagcaaaagattccctttctgaggctgccatactgccactgtccaggtggagctaagaaaaggaagtcctcagctgtgccagctcccagagcttcagcagaaagagcagcagctctctccctgggaaccatcagacaattctgttgatgtgttctgtgtctgtctgtcacctggtcatgagcttctaccacctttgcaattgtcatttatcgttcactccctgaataaagtcatgtacgcgtgccagctctcctctcccccatctttttattgtgcgagacggctgatagagt

SEQ ID NO: 454065 - DNA, 6603 bp, Homo sapiens
ccttcttttaaggagtttgccgcgagcgcgtctccttcattcgcaggctgggcgcgttcgcagtcggctggcggcgaaggaaggcgctctcgggacctcgcgggcgcgcgtcttttggctcttgcccctgtccctgcggcttggggaaggcgtaacccggcggctaggcgcgggagaagtgcggaggagccatgggcgccgggagctccaccgagcagcgcagcccggagcagccgcccgaggggagctccacgccggctgagcccgagcccagcggcggcggcccctcggccgaggcggcgccagacaccaccgcggaccccgccatcgctgcctcggaccccgccaccaagctcctacagaagaatggtcagctgtccaccatcaatggcgtagctgagcaagatgagctcagcctccaggagggtgacctaaatggccagaaaggagccctgaacggtcaaggagccctaaacagccaggaggaagaagaagtcattgtcacagaggttggacagagagactctgaagatgtgagcgaaagagactccgataaagagatggctactaagtcagcggttgttcacgacatcacagatgatgggcaggaggagacacccgaaataatcgaacagattccttcttcagaaagcaatttagaagagctaacacaacccactgagtcccaggctaatgatattggatttaagaaggtgtttaagtttgttggctttaaattcactgtgaaaaaggataagacagagaagcctgacactgtccagctactcactgtgaagaaagatgaaggggagggagcagcaggggctggcgaccacaaggaccccagccttggggctggagaagcagcatccaaagaaagcgaacccaaacaatctacagagaaacccgaagagaccctgaagcgtgagcaaagccacgcagaaatttctcccccagccgaatctggccaagcagtggaggaatgcaaagaggaaggagaagagaaacaagaaaaagaacctagcaagtctgcagaatctccgactagtcccgtgaccagtgaaacaggatcaaccttcaaaaaattcttcactcaaggttgggccggctggcgcaaaaagaccagtttcaggaagccgaaggaggatgaagtggaagcttcagagaagaaaaaggaacaagagccagaaaaagtagacacagaagaagacggaaaggcagaggttgcctccgagaaactgaccgcctccgagcaagcccacccacaggagccggcagaaagtgcccacgagccccggttatcagctgaatatgagaaagttgagctgccctcagaggagcaagtcagtggctcgcagggaccttctgaagagaaacctgctccgttggcgacagaagtgtttgatgagaaaatagaagtccaccaagaagaggttgtggccgaagtccacgtcagcaccgtggaggagagaaccgaagagcagaaaacggaggtggaagaaacagcagggtctgtgccagctgaagaattggttgaaatggatgcagaacctcaggaagccgaacctgccaaggagctggtgaagctcaaagaaacgtgtgtttccggagaggaccctacacagggagctgacctcagtcctgatgagaaggtgctgtccaaaccccccgaaggcgttgtgagtgaggtggaaatgctgtcatcacaggagagaatgaaggtgcagggaagtccactaaagaagctttttaccagcactggcttaaaaaagctttctggaaagaaacagaaagggaaaagaggaggaggagacgaggaatcaggggagcacactcaggttccagccgattctccggacagccaggaggagcaaaagggcgagagctctgcctcatcccctgaggagcccgaggagatcacgtgtctggaaaagggcttagccgaggtgcagcaggatggggaagctgaagaaggagctacttccgatggagagaaaaaaagagaaggtgtcactccctgggcatcattcaaaaagatggtgacgcccaagaagcgtgttagacggccttcggaaagtgataaagaagatgagctggacaaggtcaagagcgctaccttgtcttccaccgagagcacagcctctgaaatgcaagaagaaatgaaagggagcgtggaagagccaaagccggaagaaccaaagcgcaaggtggatacctcagtatcttgggaagctttaatttgtgtgggatcatccaagaaaagagcaaggagagggtcctcttctgatgaggaagggggaccaaaagcaatgggaggagaccaccagaaagctgatgaggccggaaaagacaaagagacggggacagacgggatccttgctggttcccaagaacatgatccagggcagggaagttcctccccggagcaagctggaagccctaccgaaggggagggcgtttccacctgggagtcatttaaaaggttagtcacgccaagaaaaaaatcaaagtccaagctggaagagaaaagcgaagactccatagctgggtctggtgtagaacattccactccagacactgaacccggtaaagaagaatcctgggtctcaatcaagaagtttattcctggacgaaggaagaaaaggccagatgggaaacaagaacaagcccctgttgaagacgcagggccaacaggggccaacgaagatgactctgatgtcccggccgtggtccctctgtctgagtatgatgctgtagaaagggagaaaatggaggcacagcaagcccaaaaaagcgcagagcagcccgagcagaaggcagccactgaggtgtccaaggagctcagcgagagtcaggttcatatgatggcagcagctgtcgctgacgggacgagggcagctaccattattgaagaaaggtctccttcttggatatctgcttcagtgacagaacctcttgaacaagtagaagctgaagccgcactgttaactgaggaggtattggaaagagaagtaattgcagaagaagaaccccccacggttactgaacctctgccagagaacagagaggcccggggcgacacggtcgttagtgaggcggaattgacccccgaagctgtgacagctgcagaaactgcagggccattgggtgccgaagaaggaaccgaagcatctgctgctgaagagaccacagaaatggtgtcagcagtctcccagttaaccgactccccagacaccacagaggaggccactccggtgcaggaggtggaaggtggcgtacctgacatagaagagcaagagaggcggactcaagaggtcctccaggcagtggcagaaaaagtgaaagaggaatcccagctgcctggcaccggtgggccagaagatgtgcttcagcctgtgcagagagcagaggcagaaagaccagaagagcaggctgaagcgtcgggtctgaagaaagagacggatgtagtgttgaaagtagatgctcaggaggcaaaaactgagccttttacacaagggaaggtggtggggcagaccaccccagaaagctttgaaaaagctcctcaagtcacagagagcatagagtccagtgagcttgtaaccacttgtcaagccgaaaccttagctggggtaaaatcacaggagatggtgatggaacaggctatcccccctgactcggtggaaacccctacagacagtgagactgatggaagcacccccgtagccgactttgacgcaccaggcacaacccagaaagacgagattgtggaaatccatgaggagaatgaggtcgcatctggtacccagtcagggggcacagaagcagaggcagttcctgcacagaaagagaggcctccagcaccttccagttttgtgttccaggaagaaactaaagaacaatcaaagatggaagacactctagagcatacagataaagaggtgtcagtggaaactgtatccattctgtcaaagactgaggggactcaagaggctgaccagtatgctgatgagaaaaccaaagacgtaccatttttcgaaggacttgaggggtctatagacacaggcataacagtcagtcgggaaaaggtcactgaagttgcccttaaaggtgaagggacagaagaagctgaatgtaaaaaggatgatgctcttgaactgcagagtcacgctaagtctcctccatcccccgtggagagagagatggtagttcaagtcgaaagggagaaaacagaagcagagccaacccatgtgaatgaagagaagcttgagcacgaaacagctgttaccgtatctgaagaggtcagtaagcagctcctccagacagtgaatgtgcccatcatagatggggcaaaggaagtcagcagtttggaaggaagccctcctccctgcctaggtcaagaggaggcagtatgcaccaaaattcaagttcagagctctgaggcatcattcactctaacagcggctgcagaggaggaaaaggtcttaggagaaactgccaacattttagaaacaggtgaaacgttggagcctgcaggtgcacatttagttctggaagagaaatcctctgaaaaaaatgaagactttgccgctcatccaggggaagatgctgtgcccacagggcccgactgtcaggcaaaatcgacaccagtgatagtatctgctactaccaagaaaggcttaagttccgacctggaaggagagaaaaccacatcactgaagtggaagtcagatgaagtcgatgagcaggttgcttgccaggaggtcaaagtgagtgtagcaattgaggaggatttagagcctgaaaatgggattttggaacttgagaccaaaagcagtaaacttgtccaaaacatcatccagacagccgttgaccagtttgtacgtacagaagaaacagccaccgaaatgttgacgtctgagttacagacacaagctcacgtgataaaagctgacagccaggacgctggacaggaaacggagaaagaaggagaggaacctcaggcctctgcacaggatgaaacaccaattacttcagccaaagaggagtcagagtcaaccgcagtgggacaagcacattctgatatttccaaagacatgagtgaagcctcagaaaagaccatgactgttgaggtagaaggttccactgtaaatgatcagcagctggaagaggtcgtcctcccatctgaggaagagggaggtggagctggaacaaagtctgtgccagaagatgatggtcatgccttgttagcagaaagaatagagaagtcactagttgaaccgaaagaagatgaaaaaggtgatgatgttgatgaccctgaaaaccagaactcagccctggctgatactgatgcctcaggaggcttaaccaaagagtccccagatacaaatggaccaaaacaaaaagagaaggaggatgcccaggaagtagaattgcaggaaggaaaagtgcacagtgaatcagataaagcgatcacaccccaagcacaggaggagttacagaaacaagagagagaatctgcaaagtcagaacttacagaatcttaaaacatcatgcagttaaactcattgtctgtttggaagaccagaatgtgaagacaagtagtagaagaaaatgaatgctgctgctgagactgaagaccagtatttcagaactttgagaattggagagcaggcacatcaactgatctcatttctagagagcccctgacaatcctgaggcttcatcaggagctagagccatttaacatttcctctttccaagaccaacctacaattttcccttgataaccatataaattctgatttaaggtcctaaattcttaacctggaactggagttggcaatacctagttctgcttctgaaactggagtatcattctttacatatttatatgtatgttttaagtagtcctcctgtatctattgtatatttttttcttaatgtttaaggaaatgtgcaggatactacatgctttttgtatcacacagtatatgatggggcatgtgccatagtgcaggcttggggagctttaagcctcagttatataacccacgaaaaacagagcctcctagatgtaacattcctgatcaaggtacaattctttaaaattcactaatgattgaggtccatatttagtggtactctgaaattggtcactttcctattacacggagtgtgctaaaactaaaaagcattttgaaacatacagaatgttctattgtcattgggaaatttttctttctaacccagtggaggttagaaagaagttatattctggtagcaaattaactttacatcctttttcctacttgttatggttgtttggaccgataagtgtgcttaatcctgaggcaaagtagtgaatatgttttatatgttatgaagaaaagaattgttgtaagtttttgattctactcttatatgctggactgcattcacacatggcatgaaataagtcaggttctttacaaatggtattttgatagatactggattgtgtttgtgccatatttgtgccattcttttaagaacaatgttgcaacacattcatttggataagttgtgatttgacgactgatttaaataaaatatttgcttcactta

SEQ ID NO: 454066 - DNA, 1326 bp, Homo sapiens
ccttcttttaaggagtttgccgcgagcgcgtctccttcattcgcaggctgggcgcgttcgcagtcggctggcggcgaaggaaggcgctctcgggacctcgcgggcgcgcgtcttttggctcttgcccctgtccctgcggcttggggaaggcgtaacccggcggctaggcgcgggagaagtgcggaggagccatgggcgccgggagctccaccgagcagcgcagcccggagcagccgcccgaggggagctccacgccggctgagcccgagcccagcggcggcggcccctcggccgaggcggcgccagacaccaccgcggaccccgccatcgctgcctcggaccccgccaccaaggtacgggcgtgccgggccacctgcgccgggaggcgcgggtctttgggggtgggggtgggggtgggggggtccctccgatttccgccgagagaacttcccagcccatccagccgcatctgcaaactcaggagtgcgaacccctctttggaggcttttcagggtctttcgcgccggggcggggccagagcagcggcgagcgcggcggggggcttgcatctttgtcgcgggtctccaggggaggcgactgcgccatgcgcaataataaaacccgcgccctgcccacggcggctgagcctttctgcgcactcttccggtgggagccatgcagcccgaggcggaggagctgcgcggagggggatccgtggagaatggaccccgggccgggcctccggagctccgagatgcggaaagtcagctgtgaggccaggactcgtggtggagcccgccggggagcccagccaccctcgggttccccgtcgcgtaccgccctggatgccagcggtgcctggagcgagcgggtttggtacccagtcctcctgcggcagcggcccgagcaggcaccgccttcccgaggcagagaaagcctggggtgtagctcgctcagagccaggaaaaacctgggcaggcgctgcgtttccagaaggaatgacaggtttcgcaaaccagccagcgccctcgcgttcgctcagcgctttgcctgcagactcagttggccaaacacacgctagagtggctagaagttctcaaaggatggggtcagtgtaacgagcattccgggtactcttccctggacgcagtgctgaaacgactgcattttatcggcttcagtcttcaaggctggaatatttcttgtgggccaggacagccgccaagactgtggcttgttctggtcgtggtattttagatctattttccagcgcatgtgttcattagcaaggcttcactctactgattttgtgatacccttgtatca

SEQ ID NO: 454067 - DNA, 8383 bp, Homo sapiens
ccttcttttaaggagtttgccgcgagcgcgtctccttcattcgcaggctgggcgcgttcgcagtcggctggcggcgaaggaaggcgctctcgggacctcgcgggcgcgcgtcttttggctcttgcccctgtccctgcggcttggggaaggcgtaacccggcggctaggcgcgggagaagtgcggaggagccatgggcgccgggagctccaccgagcagcgcagcccggagcagccgcccgaggggagctccacgccggctgagcccgagcccagcggcggcggcccctcggccgaggcggcgccagacaccaccgcggaccccgccatcgctgcctcggaccccgccaccaagctcctacagaagaatggtcagctgtccaccatcaatggcgtagctgagcaagatgagctcagcctccaggagggtgacctaaatggccagaaaggagccctgaacggtcaaggagccctaaacagccaggaggaagaagaagtcattgtcacagaggttggacagagagactctgaagatgtgagcgaaagagactccgataaagagatggctactaagtcagcggttgttcacgacatcacagatgatgggcaggaggagacacccgaaataatcgaacagattccttcttcagaaagcaatttagaagagctaacacaacccactgagtcccaggctaatgatattggatttaagaaggtgtttaagtttgttggctttaaattcactgtgaaaaaggataagacagagaagcctgacactgtccagctactcactgtgaagaaagatgaaggggagggagcagcaggggctggcgaccacaaggaccccagccttggggctggagaagcagcatccaaagaaagcgaacccaaacaatctacagagaaacccgaagagaccctgaagcgtgagcaaagccacgcagaaatttctcccccagccgaatctggccaagcagtggaggaatgcaaagaggaaggagaagagaaacaagaaaaagaacctagcaagtctgcagaatctccgactagtcccgtgaccagtgaaacaggatcaaccttcaaaaaattcttcactcaaggttgggccggctggcgcaaaaagaccagtttcaggaagccgaaggaggatgaagtggaagcttcagagaagaaaaaggaacaagagccagaaaaagtagacacagaagaagacggaaaggcagaggttgcctccgagaaactgaccgcctccgagcaagcccacccacaggagccggcagaaagtgcccacgagccccggttatcagctgaatatgagaaagttgagctgccctcagaggagcaagtcagtggctcgcagggaccttctgaagagaaacctgctccgttggcgacagaagtgtttgatgagaaaatagaagtccaccaagaagaggttgtggccgaagtccacgtcagcaccgtggaggagagaaccgaagagcagaaaacggaggtggaagaaacagcagggtctgtgccagctgaagaattggttgaaatggatgcagaacctcaggaagccgaacctgccaaggagctggtgaagctcaaagaaacgtgtgtttccggagaggaccctacacagggagctgacctcagtcctgatgagaaggtgctgtccaaaccccccgaaggcgttgtgagtgaggtggaaatgctgtcatcacaggagagaatgaaggtgcagggaagtccactaaagaagctttttaccagcactggcttaaaaaagctttctggaaagaaacagaaagggaaaagaggaggaggagacgaggaatcaggggagcacactcaggttccagccgattctccggacagccaggaggagcaaaagggcgagagctctgcctcatcccctgaggagcccgaggagatcacgtgtctggaaaagggcttagccgaggtgcagcaggatggggaagctgaagaaggagctacttccgatggagagaaaaaaagagaaggtgtcactccctgggcatcattcaaaaagatggtgacgcccaagaagcgtgttagacggccttcggaaagtgataaagaagatgagctggacaaggtcaagagcgctaccttgtcttccaccgagagcacagcctctgaaatgcaagaagaaatgaaagggagcgtggaagagccaaagccggaagaaccaaagcgcaaggtggatacctcagtatcttgggaagctttaatttgtgtgggatcatccaagaaaagagcaaggagagggtcctcttctgatgaggaagggggaccaaaagcaatgggaggagaccaccagaaagctgatgaggccggaaaagacaaagagacggggacagacgggatccttgctggttcccaagaacatgatccagggcagggaagttcctccccggagcaagctggaagccctaccgaaggggagggcgtttccacctgggagtcatttaaaaggttagtcacgccaagaaaaaaatcaaagtccaagctggaagagaaaagcgaagactccatagctgggtctggtgtagaacattccactccagacactgaacccggtaaagaagaatcctgggtctcaatcaagaagtttattcctggacgaaggaagaaaaggccagatgggaaacaagaacaagcccctgttgaagacgcagggccaacaggggccaacgaagatgactctgatgtcccggccgtggtccctctgtctgagtatgatgctgtagaaagggagaaaatggaggcacagcaagcccaaaaaagcgcagagcagcccgagcagaaggcagccactgaggtgtccaaggagctcagcgagagtcaggttcatatgatggcagcagctgtcgctgacgggacgagggcagctaccattattgaagaaaggtctccttcttggatatctgcttcagtgacagaacctcttgaacaagtagaagctgaagccgcactgttaactgaggaggtattggaaagagaagtaattgcagaagaagaaccccccacggttactgaacctctgccagagaacagagaggcccggggcgacacggtcgttagtgaggcggaattgacccccgaagctgtgacagctgcagaaactgcagggccattgggtgccgaagaaggaaccgaagcatctgctgctgaagagaccacagaaatggtgtcagcagtctcccagttaaccgactccccagacaccacagaggaggccactccggtgcaggaggtggaaggtggcgtacctgacatagaagagcaagagaggcggactcaagaggtcctccaggcagtggcagaaaaagtgaaagaggaatcccagctgcctggcaccggtgggccagaagatgtgcttcagcctgtgcagagagcagaggcagaaagaccagaagagcaggctgaagcgtcgggtctgaagaaagagacggatgtagtgttgaaagtagatgctcaggaggcaaaaactgagccttttacacaagggaaggtggtggggcagaccaccccagaaagctttgaaaaagctcctcaagtcacagagagcatagagtccagtgagcttgtaaccacttgtcaagccgaaaccttagctggggtaaaatcacaggagatggtgatggaacaggctatcccccctgactcggtggaaacccctacagacagtgagactgatggaagcacccccgtagccgactttgacgcaccaggcacaacccagaaagacgagattgtggaaatccatgaggagaatgaggtcgcatctggtacccagtcagggggcacagaagcagaggcagttcctgcacagaaagagaggcctccagcaccttccagttttgtgttccaggaagaaactaaagaacaatcaaagatggaagacactctagagcatacagataaagaggtgtcagtggaaactgtatccattctgtcaaagactgaggggactcaagaggctgaccagtatgctgatgagaaaaccaaagacgtaccatttttcgaaggacttgaggggtctatagacacaggcataacagtcagtcgggaaaaggtcactgaagttgcccttaaaggtgaagggacagaagaagctgaatgtaaaaaggatgatgctcttgaactgcagagtcacgctaagtctcctccatcccccgtggagagagagatggtagttcaagtcgaaagggagaaaacagaagcagagccaacccatgtgaatgaagagaagcttgagcacgaaacagctgttaccgtatctgaagaggtcagtaagcagctcctccagacagtgaatgtgcccatcatagatggggcaaaggaagtcagcagtttggaaggaagccctcctccctgcctaggtcaagaggaggcagtatgcaccaaaattcaagttcagagctctgaggcatcattcactctaacagcggctgcagaggaggaaaaggtcttaggagaaactgccaacattttagaaacaggtgaaacgttggagcctgcaggtgcacatttagttctggaagagaaatcctctgaaaaaaatgaagactttgccgctcatccaggggaagatgctgtgcccacagggcccgactgtcaggcaaaatcgacaccagtgatagtatctgctactaccaagaaaggcttaagttccgacctggaaggagagaaaaccacatcactgaagtggaagtcagatgaagtcgatgagcaggttgcttgccaggaggtcaaagtgagtgtagcaattgaggaggatttagagcctgaaaatgggattttggaacttgagaccaaaagcagtaaacttgtccaaaacatcatccagacagccgttgaccagtttgtacgtacagaagaaacagccaccgaaatgttgacgtctgagttacagacacaagctcacgtgataaaagctgacagccaggacgctggacaggaaacggagaaagaaggagaggaacctcaggcctctgcacaggatgaaacaccaattacttcagccaaagaggagtcagagtcaaccgcagtgggacaagcacattctgatatttccaaagacatgagtgaagcctcagaaaagaccatgactgttgaggtagaaggttccactgtaaatgatcagcagctggaagaggtcgtcctcccatctgaggaagagggaggtggagctggaacaaagtctgtgccagaagatgatggtcatgccttgttagcagaaagaatagagaagtcactagttgaaccgaaagaagatgaaaaaggtgatgatgttgatgaccctgaaaaccagaactcagccctggctgatactgatgcctcaggaggcttaaccaaagagtccccagatacaaatggaccaaaacaaaaagagaaggaggatgcccaggaagtagaattgcaggaaggaaaagtgcacagtgaatcagataaagcgatcacaccccaagcacaggaggagttacagaaacaagagagagaatctgcaaagtcagaacttacagaatcttaaaacatcatgcagttaaactcattgtctgtttggaagaccagaatgtgaagacaagtagtagaagaaaatgaatgctgctgctgagactgaagaccagtatttcagaactttgagaattggagagcaggcacatcaactgatctcatttctagagagcccctgacaatcctgaggcttcatcaggagctagagccatttaacatttcctctttccaagaccaacctacaattttcccttgataaccatataaattctgatttaaggtcctaaattcttaacctggaactggagttggcaatacctagttctgcttctgaaactggagtatcattctttacatatttatatgtatgttttaagtagtcctcctgtatctattgtatatttttttcttaatgtttaaggaaatgtgcaggatactacatgctttttgtatcacacagtatatgatggggcatgtgccatagtgcaggcttggggagctttaagcctcagttatataacccacgaaaaacagagcctcctagatgtaacattcctgatcaaggtacaattctttaaaattcactaatgattgaggtccatatttagtggtactctgaaattggtcactttcctattacacggagtgtgctaaaactaaaaagcattttgaaacatacagaatgttctattgtcattgggaaatttttctttctaacccagtggaggttagaaagaagttatattctggtagcaaattaactttacatcctttttcctacttgttatggttgtttggaccgataagtgtgcttaatcctgaggcaaagtagtgaatatgttttatatgttatgaagaaaagaattgttgtaagtttttgattctactcttatatgctggactgcattcacacatggcatgaaataagtcaggttctttacaaatggtattttgatagatactggattgtgtttgtgccatatttgtgccattcttttaagaacaatgttgcaacacattcatttggataagttgtgatttgacgactgatttaaataaaatatttgcttcacttagatttgctggttttattagataccaggaagcctgggacatatgtgtaccacattagaattctaaagataatgattgataagctagaactttctgatgtagtcattacatgaaaccccttgtcactggtttgtgtgttcagaggaagccatggccgagatagctttcctgaaataaaccagtagcttttcagattgacgttcttgctacaattgtaccatctggtaattcctgaaaatgtcaatttttttgtgttaatatttttggtttcaaacaataacaaatgtctctagaaagaaattttaagaaagcttaattaatagtaaaaatgcctttcctgaaataatcttggaaaattttttaaatgtcaaaatgatgagtcatgctaatacattgagggtttgtttttttgtttgtttgtttgtttttgagacagagtttcgctcttgttgcccaggctggagtgcaatggcccgatctcagctcaccgcaacctccacctcccggattccagcgattctcctgcctcagcctacattaagggttttgtcagacaattgtcacacgaagaatagtgtcacttatctgctcttgacacacagaactggcctggcatatagctttccagattttactcaaacttggtactccagtttgaaaatttaaattttgactgctgattagctggaaagcctagttttaatggaaagaaagtttgcttttaaaactgaaagtagtttctttttgctaacaaatctaacttcatacataattggccatattagtaaaacacctcatgatagcagtgtatatatagtcttgtttgtagttggaagtcatcttttaggagttattctcaaatatatataatagctacccatgcatcattattaaaatccccaaattcaaaaaacctctgatatatatatataatttttttttttttttttgtttggccaactgagattgaaatccaagtgctggtttctagttctgaacatcaactaaagagttttggaaatgacagcaatttataacaagttcatattgacttcctctctatggcaggaagacattctgtgctgttttgaacagattaaagatttgtgtagtttgtgggaaattgacgtttttgtttaaattccacccgcgtttgtcttttcctaccacctgtggccaggtgctcgctggccatcacagttgcgattccatgagtagctgctttatgactgctttttgtactatctggatgtgcccagagttacttctgtacaagctctgtatctatgtccgttgagaacattattttaacaagaagaacaccaacagtagcatgaaatataatactgttttataattctaaagctgctgttaatttatgaagtacataataatctaatgtaaactgcagaagtcagagcaagtgcctacattttgttatttttggcattactacagagccatgtacaatagaaagcaatgcaagacttgtaaactctcaccacttcttgtaatatcaaatgttccccctcaggttattttgcttatggtacccatgagttgcctctctctgtacatagataaattgttccaatattttcctttgatgtttggaactacagatagtcaagggctggaaattttagttttcaatataagcttccagcttagcaattacctctagtccaagacaatatttgattcctagttctgtttggggcaaattttcatttatctaaataaaatgcaatctaattaaatgccatggattttctttctgta

SEQ ID NO: 454068 - DNA, 4168 bp, Homo sapiens
ccttcttttaaggagtttgccgcgagcgcgtctccttcattcgcaggctgggcgcgttcgcagtcggctggcggcgaaggaaggcgctctcgggacctcgcgggcgcgcgtcttttggctcttgcccctgtccctgcggcttggggaaggcgtaacccggcggctaggcgcgggagaagtgcggaggagccatgggcgccgggagctccaccgagcagcgcagcccggagcagccgcccgaggggagctccacgccggctgagcccgagcccagcggcggcggcccctcggccgaggcggcgccagacaccaccgcggaccccgccatcgctgcctcggaccccgccaccaagctcctacagaagaatggtcagctgtccaccatcaatggcgtagctgagcaagatgagctcagcctccaggagggtgacctaaatggccagaaaggagccctgaacggtcaaggagccctaaacagccaggaggaagaagaagtcattgtcacagaggttggacagagagactctgaagatgtgagcgaaagagactccgataaagagatggctactaagtcagcggttgttcacgacatcacagatgatgggcaggaggagacacccgaaataatcgaacagattccttcttcagaaagcaatttagaagagctaacacaacccactgagtcccaggctaatgatattggatttaagaaggtgtttaagtttgttggctttaaattcactgtgaaaaaggataagacagagaagcctgacactgtccagctactcactgtgaagaaagatgaaggggagggagcagcaggggctggcgaccacaaggaccccagccttggggctggagaagcagcatccaaagaaagcgaacccaaacaatctacagagaaacccgaagagaccctgaagcgtgagcaaagccacgcagaaatttctcccccagccgaatctggccaagcagtggaggaatgcaaagaggaaggagaagagaaacaagaaaaagaacctagcaagtctgcagaatctccgactagtcccgtgaccagtgaaacaggatcaaccttcaaaaaattcttcactcaaggttgggccggctggcgcaaaaagaccagtttcaggaagccgaaggaggatgaagtggaagcttcagagaagaaaaaggaacaagagccagaaaaagtagacacagaagaagacggaaaggcagaggttgcctccgagaaactgaccgcctccgagcaagcccacccacaggagccggcagaaagtgcccacgagccccggttatcagctgaatatgagaaagttgagctgccctcagaggagcaagtcagtggctcgcagggaccttctgaagagaaacctgctccgttggcgacagaagtgtttgatgagaaaatagaagtccaccaagaagaggttgtggccgaagtccacgtcagcaccgtggaggagagaaccgaagagcagaaaacggaggtggaagaaacagcagggtctgtgccagctgaagaattggttgaaatggatgcagaacctcaggaagccgaacctgccaaggagctggtgaagctcaaagaaacgtgtgtttccggagaggaccctacacagggagctgacctcagtcctgatgagaaggtgctgtccaaaccccccgaaggcgttgtgagtgaggtggaaatgctgtcatcacaggagagaatgaaggtgcagggaagtccactaaagaagctttttaccagcactggcttaaaaaagctttctggaaagaaacagaaagggaaaagaggaggaggagacgaggaatcaggggagcacactcaggttccagccgattctccggacagccaggaggagcaaaagggcgagagctctgcctcatcccctgaggagcccgaggagatcacgtgtctggaaaagggcttagccgaggtgcagcaggatggggaagctgaagaaggagctacttccgatggagagaaaaaaagagaaggtgtcactccctgggcatcattcaaaaagatggtgacgcccaagaagcgtgttagacggccttcggaaagtgataaagaagatgagctggacaaggtcaagagcgctaccttgtcttccaccgagagcacagcctctgaaatgcaagaagaaatgaaagggagcgtggaagagccaaagccggaagaaccaaagcgcaaggtggatacctcagtatcttgggaagctttaatttgtgtgggatcatccaagaaaagagcaaggagagggtcctcttctgatgaggaagggggaccaaaagcaatgggaggagaccaccagaaagctgatgaggccggaaaagacaaagagacggggacagacgggatccttgctggttcccaagaacatgatccagggcagggaagttcctccccggagcaagctggaagccctaccgaaggggagggcgtttccacctgggagtcatttaaaaggttagtcacgccaagaaaaaaatcaaagtccaagctggaagagaaaagcgaagactccatagctgggtctggtgtagaacattccactccagacactgaacccggtaaagaagaatcctgggtctcaatcaagaagtttattcctggacgaaggaagaaaaggccagatgggaaacaagaacaagcccctgttgaagacgcagggccaacaggggccaacgaagatgactctgatgtcccggccgtggtccctctgtctgagtatgatgctgtagaaagggagaaaatggaggcacagcaagcccaaaaaagcgcagagcagcccgagcagaaggcagccactgaggtgtccaaggagctcagcgagagtcaggttcatatgatggcagcagctgtcgctgacgggacgagggcagctaccattattgaagaaaggtctccttcttggatatctgcttcagtgacagaacctcttgaacaagtagaagctgaagccgcactgttaactgaggaggtattggaaagagaagtaattgcagaagaagaaccccccacggttactgaacctctgccagagaacagagaggcccggggcgacacggtcgttagtgaggcggaattgacccccgaagctgtgacagctgcagaaactgcagggccattgggtgccgaagaaggaaccgaagcatctgctgctgaagagaccacagaaatggtgtcagcagtctcccagttaaccgactccccagacaccacagaggaggccactccggtgcaggaggtggaaggtggcgtacctgacatagaagagcaagagaggcggactcaagaggtcctccaggcagtggcagaaaaagtgaaagaggaatcccagctgcctggcaccggtgggccagaagatgtgcttcagcctgtgcagagagcagaggcagaaagaccagaagagcaggctgaagcgtcgggtctgaagaaagagacggatgtagtgttgaaagtagatgctcaggaggcaaaaactgagccttttacacaagggaaggtggtggggcagaccaccccagaaagctttgaaaaagctcctcaagtcacagagagcatagagtccagtgagcttgtaaccacttgtcaagccgaaaccttagctggggtaaaatcacaggagatggtgatggaacaggctatcccccctgactcggtggaaacccctacagacagtgagactgatggaagcacccccgtagccgactttgacgcaccaggcacaacccagaaagacgagattgtggaaatccatgaggagaatgaggtcgcatctggtacccagtcagggggcacagaagcagaggcagttcctgcacagaaagagaggcctccagcaccttccagttttgtgttccaggaagaaactaaagaacaatcaaagatggaagacactctagagcatacagataaagaggtgtcagtggaaactgtatccattctgtcaaagactgaggggactcaagaggctgaccagtatgctgatgagaaaaccaaagacgtaccatttttcgaaggacttgaggggtctatagacacaggcataacagtcagtcgggaaaaggtcactgaagttgcccttaaaggtgaagggacagaagaagcaggaatggctgaactgtttcaagaagcagaactgggtccgcc

SEQ ID NO: 454069 - DNA, 1164 bp, Homo sapiens
ccttcttttaaggagtttgccgcgagcgcgtctccttcattcgcaggctgggcgcgttcgcagtcggctggcggcgaaggaaggcgctctcgggacctcgcgggcgcgcgtcttttggctcttgcccctgtccctgcggcttggggaaggcgtaacccggcggctaggcgcgggagaagtgcggaggagccatgggcgccgggagctccaccgagcagcgcagcccggagcagccgcccgaggggagctccacgccggctgagcccgagcccagcggcggcggcccctcggccgaggcggcgccagacaccaccgcggaccccgccatcgctgcctcggaccccgccaccaagctcctacagaagaatggtcagctgtccaccatcaatggcgtagctgagcaagatgagctcagcctccaggagggtgacctaaatggccagaaaggagccctgaacggtcaaggagccctaaacagccaggaggaagaagaagtcattgtcacagagggtaagccgcccctccaggaactggaaggcacacagcacttgcaacaaactttggactcagcagaaaatactctgtcatactgcctggtggtggattggtgttaacagcaaaaacaatcaattggttacaaaaggaagtatttatctgaccatttggataccccctatacttagaccttgaagttatgtttcctttttcttatctggaacttgatgctttttaaattattgttgctttgtcccaactgcttgtctggagttgaatgtgaattcttgttggaaacagaagtcatggttgctttaaaagagtcattatctctccctctagagaggagcctgctatacttgtacaactctttctgataggcgcattgcaaggcacgtacccctctttgcttaaactatgatgtgctgcgtgttttatagctcttgagcctagagatcttcgaggaatggttattgaagagtgaccgtttggacacagtattgggatttgatttttacccatatagggggtgaggaaccgtatcttgaggtcagaattgagagcatgtggcccagtaagtctcttgtgaaaagcgaaaggctgcatgttgaagaaggaccttgagctcgttgttccatttaattataaataaagggataaccaataact

SEQ ID NO: 454070 - DNA, 6447 bp, Homo sapiens
tgcggcccgggcggggaagtttgcgctcccgaagtcctggagctcagcaagggaggggccagcgccagcccgcgtgtgggtggctgggtgggggcgtgggtgggggtccgcctataattatctggggaaatgcatccgcgctctgcttttcgctgcggcagctccgagggcacctccggttctcccccatcctccgggagtgtctgggcgctcagtccgctctgatcccgccgaaaccacctgcggttggcaggcaggagactaggcgtctgccggggagggcagggacccgctaagctgatctcctgtacagtagtgctacttaaaatatgctggggaccatcaccatcacagttggacagagagactctgaagatgtgagcgaaagagactccgataaagagatggctactaagtcagcggttgttcacgacatcacagatgatgggcaggaggagacacccgaaataatcgaacagattccttcttcagaaagcaatttagaagagctaacacaacccactgagtcccaggctaatgatattggatttaagaaggtgtttaagtttgttggctttaaattcactgtgaaaaaggataagacagagaagcctgacactgtccagctactcactgtgaagaaagatgaaggggagggagcagcaggggctggcgaccacaaggaccccagccttggggctggagaagcagcatccaaagaaagcgaacccaaacaatctacagagaaacccgaagagaccctgaagcgtgagcaaagccacgcagaaatttctcccccagccgaatctggccaagcagtggaggaatgcaaagaggaaggagaagagaaacaagaaaaagaacctagcaagtctgcagaatctccgactagtcccgtgaccagtgaaacaggatcaaccttcaaaaaattcttcactcaaggttgggccggctggcgcaaaaagaccagtttcaggaagccgaaggaggatgaagtggaagcttcagagaagaaaaaggaacaagagccagaaaaagtagacacagaagaagacggaaaggcagaggttgcctccgagaaactgaccgcctccgagcaagcccacccacaggagccggcagaaagtgcccacgagccccggttatcagctgaatatgagaaagttgagctgccctcagaggagcaagtcagtggctcgcagggaccttctgaagagaaacctgctccgttggcgacagaagtgtttgatgagaaaatagaagtccaccaagaagaggttgtggccgaagtccacgtcagcaccgtggaggagagaaccgaagagcagaaaacggaggtggaagaaacagcagggtctgtgccagctgaagaattggttgaaatggatgcagaacctcaggaagccgaacctgccaaggagctggtgaagctcaaagaaacgtgtgtttccggagaggaccctacacagggagctgacctcagtcctgatgagaaggtgctgtccaaaccccccgaaggcgttgtgagtgaggtggaaatgctgtcatcacaggagagaatgaaggtgcagggaagtccactaaagaagctttttaccagcactggcttaaaaaagctttctggaaagaaacagaaagggaaaagaggaggaggagacgaggaatcaggggagcacactcaggttccagccgattctccggacagccaggaggagcaaaagggcgagagctctgcctcatcccctgaggagcccgaggagatcacgtgtctggaaaagggcttagccgaggtgcagcaggatggggaagctgaagaaggagctacttccgatggagagaaaaaaagagaaggtgtcactccctgggcatcattcaaaaagatggtgacgcccaagaagcgtgttagacggccttcggaaagtgataaagaagatgagctggacaaggtcaagagcgctaccttgtcttccaccgagagcacagcctctgaaatgcaagaagaaatgaaagggagcgtggaagagccaaagccggaagaaccaaagcgcaaggtggatacctcagtatcttgggaagctttaatttgtgtgggatcatccaagaaaagagcaaggagagggtcctcttctgatgaggaagggggaccaaaagcaatgggaggagaccaccagaaagctgatgaggccggaaaagacaaagagacggggacagacgggatccttgctggttcccaagaacatgatccagggcagggaagttcctccccggagcaagctggaagccctaccgaaggggagggcgtttccacctgggagtcatttaaaaggttagtcacgccaagaaaaaaatcaaagtccaagctggaagagaaaagcgaagactccatagctgggtctggtgtagaacattccactccagacactgaacccggtaaagaagaatcctgggtctcaatcaagaagtttattcctggacgaaggaagaaaaggccagatgggaaacaagaacaagcccctgttgaagacgcagggccaacaggggccaacgaagatgactctgatgtcccggccgtggtccctctgtctgagtatgatgctgtagaaagggagaaaatggaggcacagcaagcccaaaaaagcgcagagcagcccgagcagaaggcagccactgaggtgtccaaggagctcagcgagagtcaggttcatatgatggcagcagctgtcgctgacgggacgagggcagctaccattattgaagaaaggtctccttcttggatatctgcttcagtgacagaacctcttgaacaagtagaagctgaagccgcactgttaactgaggaggtattggaaagagaagtaattgcagaagaagaaccccccacggttactgaacctctgccagagaacagagaggcccggggcgacacggtcgttagtgaggcggaattgacccccgaagctgtgacagctgcagaaactgcagggccattgggtgccgaagaaggaaccgaagcatctgctgctgaagagaccacagaaatggtgtcagcagtctcccagttaaccgactccccagacaccacagaggaggccactccggtgcaggaggtggaaggtggcgtacctgacatagaagagcaagagaggcggactcaagaggtcctccaggcagtggcagaaaaagtgaaagaggaatcccagctgcctggcaccggtgggccagaagatgtgcttcagcctgtgcagagagcagaggcagaaagaccagaagagcaggctgaagcgtcgggtctgaagaaagagacggatgtagtgttgaaagtagatgctcaggaggcaaaaactgagccttttacacaagggaaggtggtggggcagaccaccccagaaagctttgaaaaagctcctcaagtcacagagagcatagagtccagtgagcttgtaaccacttgtcaagccgaaaccttagctggggtaaaatcacaggagatggtgatggaacaggctatcccccctgactcggtggaaacccctacagacagtgagactgatggaagcacccccgtagccgactttgacgcaccaggcacaacccagaaagacgagattgtggaaatccatgaggagaatgaggtcgcatctggtacccagtcagggggcacagaagcagaggcagttcctgcacagaaagagaggcctccagcaccttccagttttgtgttccaggaagaaactaaagaacaatcaaagatggaagacactctagagcatacagataaagaggtgtcagtggaaactgtatccattctgtcaaagactgaggggactcaagaggctgaccagtatgctgatgagaaaaccaaagacgtaccatttttcgaaggacttgaggggtctatagacacaggcataacagtcagtcgggaaaaggtcactgaagttgcccttaaaggtgaagggacagaagaagctgaatgtaaaaaggatgatgctcttgaactgcagagtcacgctaagtctcctccatcccccgtggagagagagatggtagttcaagtcgaaagggagaaaacagaagcagagccaacccatgtgaatgaagagaagcttgagcacgaaacagctgttaccgtatctgaagaggtcagtaagcagctcctccagacagtgaatgtgcccatcatagatggggcaaaggaagtcagcagtttggaaggaagccctcctccctgcctaggtcaagaggaggcagtatgcaccaaaattcaagttcagagctctgaggcatcattcactctaacagcggctgcagaggaggaaaaggtcttaggagaaactgccaacattttagaaacaggtgaaacgttggagcctgcaggtgcacatttagttctggaagagaaatcctctgaaaaaaatgaagactttgccgctcatccaggggaagatgctgtgcccacagggcccgactgtcaggcaaaatcgacaccagtgatagtatctgctactaccaagaaaggcttaagttccgacctggaaggagagaaaaccacatcactgaagtggaagtcagatgaagtcgatgagcaggttgcttgccaggaggtcaaagtgagtgtagcaattgaggaggatttagagcctgaaaatgggattttggaacttgagaccaaaagcagtaaacttgtccaaaacatcatccagacagccgttgaccagtttgtacgtacagaagaaacagccaccgaaatgttgacgtctgagttacagacacaagctcacgtgataaaagctgacagccaggacgctggacaggaaacggagaaagaaggagaggaacctcaggcctctgcacaggatgaaacaccaattacttcagccaaagaggagtcagagtcaaccgcagtgggacaagcacattctgatatttccaaagacatgagtgaagcctcagaaaagaccatgactgttgaggtagaaggttccactgtaaatgatcagcagctggaagaggtcgtcctcccatctgaggaagagggaggtggagctggaacaaagtctgtgccagaagatgatggtcatgccttgttagcagaaagaatagagaagtcactagttgaaccgaaagaagatgaaaaaggtgatgatgttgatgaccctgaaaaccagaactcagccctggctgatactgatgcctcaggaggcttaaccaaagagtccccagatacaaatggaccaaaacaaaaagagaaggaggatgcccaggaagtagaattgcaggaaggaaaagtgcacagtgaatcagataaagcgatcacaccccaagcacaggaggagttacagaaacaagagagagaatctgcaaagtcagaacttacagaatcttaaaacatcatgcagttaaactcattgtctgtttggaagaccagaatgtgaagacaagtagtagaagaaaatgaatgctgctgctgagactgaagaccagtatttcagaactttgagaattggagagcaggcacatcaactgatctcatttctagagagcccctgacaatcctgaggcttcatcaggagctagagccatttaacatttcctctttccaagaccaacctacaattttcccttgataaccatataaattctgatttaaggtcctaaattcttaacctggaactggagttggcaatacctagttctgcttctgaaactggagtatcattctttacatatttatatgtatgttttaagtagtcctcctgtatctattgtatatttttttcttaatgtttaaggaaatgtgcaggatactacatgctttttgtatcacacagtatatgatggggcatgtgccatagtgcaggcttggggagctttaagcctcagttatataacccacgaaaaacagagcctcctagatgtaacattcctgatcaaggtacaattctttaaaattcactaatgattgaggtccatatttagtggtactctgaaattggtcactttcctattacacggagtgtgctaaaactaaaaagcattttgaaacatacagaatgttctattgtcattgggaaatttttctttctaacccagtggaggttagaaagaagttatattctggtagcaaattaactttacatcctttttcctacttgttatggttgtttggaccgataagtgtgcttaatcctgaggcaaagtagtgaatatgttttatatgttatgaagaaaagaattgttgtaagtttttgattctactcttatatgctggactgcattcacacatggcatgaaataagtcaggttctttacaaatggtattttgatagatactggattgtgtttgtgccatatttgtgccattcttttaagaacaatgttgcaacacattcatttggataagttgtgatttgacgactgatttaaataaaatatttgcttcactta

SEQ ID NO: 454071 - DNA, 7112 bp, Homo sapiens
ccttcttttaaggagtttgccgcgagcgcgtctccttcattcgcaggctgggcgcgttcgcagtcggctggcggcgaaggaaggcgctctcgggacctcgcgggcgcgcgtcttttggctcttgcccctgtccctgcggcttggggaaggcgtaacccggcggctaggcgcgggagaagtgcggaggagccatgggcgccgggagctccaccgagcagcgcagcccggagcagccgcccgaggggagctccacgccggctgagcccgagcccagcggcggcggcccctcggccgaggcggcgccagacaccaccgcggaccccgccatcgctgcctcggaccccgccaccaagctcctacagaagaatggtcagctgtccaccatcaatggcgtagctgagcaagatgagctcagcctccaggagggtgacctaaatggccagaaaggagccctgaacggtcaaggagccctaaacagccaggaggaagaagaagtcattgtcacagaggttggacagagagactctgaagatgtgagcgaaagagactccgataaagagatggctactaagtcagcggttgttcacgacatcacagatgatgggcaggaggagacacccgaaataatcgaacagattccttcttcagaaagcaatttagaagagctaacacaacccactgagtcccaggctaatgatattggatttaagaaggtgtttaagtttgttggctttaaattcactgtgaaaaaggataagacagagaagcctgacactgtccagctactcactgtgaagaaagatgaaggggagggagcagcaggggctggcgaccacaaggaccccagccttggggctggagaagcagcatccaaagaaagcgaacccaaacaatctacagagaaacccgaagagaccctgaagcgtgagcaaagccacgcagaaatttctcccccagccgaatctggccaagcagtggaggaatgcaaagaggaaggagaagagaaacaagaaaaagaacctagcaagtctgcagaatctccgactagtcccgtgaccagtgaaacaggatcaaccttcaaaaaattcttcactcaaggttgggccggctggcgcaaaaagaccagtttcaggaagccgaaggaggatgaagtggaagcttcagagaagaaaaaggaacaagagccagaaaaagtagacacagaagaagacggaaaggcagaggttgcctccgagaaactgaccgcctccgagcaagcccacccacaggagccggcagaaagtgcccacgagccccggttatcagctgaatatgagaaagttgagctgccctcagaggagcaagtcagtggctcgcagggaccttctgaagagaaacctgctccgttggcgacagaagtgtttgatgagaaaatagaagtccaccaagaagaggttgtggccgaagtccacgtcagcaccgtggaggagagaaccgaagagcagaaaacggaggtggaagaaacagcagggtctgtgccagctgaagaattggttgaaatggatgcagaacctcaggaagccgaacctgccaaggagctggtgaagctcaaagaaacgtgtgtttccggagaggaccctacacagggagctgacctcagtcctgatgagaaggtgctgtccaaaccccccgaaggcgttgtgagtgaggtggaaatgctgtcatcacaggagagaatgaaggtgcagggaagtccactaaagaagctttttaccagcactggcttaaaaaagctttctggaaagaaacagaaagggaaaagaggaggaggagacgaggaatcaggggagcacactcaggttccagccgattctccggacagccaggaggagcaaaagggcgagagctctgcctcatcccctgaggagcccgaggagatcacgtgtctggaaaagggcttagccgaggtgcagcaggatggggaagctgaagaaggagctacttccgatggagagaaaaaaagagaaggtgtcactccctgggcatcattcaaaaagatggtgacgcccaagaagcgtgttagacggccttcggaaagtgataaagaagatgagctggacaaggtcaagagcgctaccttgtcttccaccgagagcacagcctctgaaatgcaagaagaaatgaaagggagcgtggaagagccaaagccggaagaaccaaagcgcaaggtggatacctcagtatcttgggaagctttaatttgtgtgggatcatccaagaaaagagcaaggagagggtcctcttctgatgaggaagggggaccaaaagcaatgggaggagaccaccagaaagctgatgaggccggaaaagacaaagagacggggacagacgggatccttgctggttcccaagaacatgatccagggcagggaagttcctccccggagcaagctggaagccctaccgaaggggagggcgtttccacctgggagtcatttaaaaggttagtcacgccaagaaaaaaatcaaagtccaagctggaagagaaaagcgaagactccatagctgggtctggtgtagaacattccactccagacactgaacccggtaaagaagaatcctgggtctcaatcaagaagtttattcctggacgaaggaagaaaaggccagatgggaaacaagaacaagcccctgttgaagacgcagggccaacaggggccaacgaagatgactctgatgtcccggccgtggtccctctgtctgagtatgatgctgtagaaagggagaaaatggaggcacagcaagcccaaaaaagcgcagagcagcccgagcagaaggcagccactgaggtgtccaaggagctcagcgagagtcaggttcatatgatggcagcagctgtcgctgacgggacgagggcagctaccattattgaagaaaggtctccttcttggatatctgcttcagtgacagaacctcttgaacaagtagaagctgaagccgcactgttaactgaggaggtattggaaagagaagtaattgcagaagaagaaccccccacggttactgaacctctgccagagaacagagaggcccggggcgacacggtcgttagtgaggcggaattgacccccgaagctgtgacagctgcagaaactgcagggccattgggtgccgaagaaggaaccgaagcatctgctgctgaagagaccacagaaatggtgtcagcagtctcccagttaaccgactccccagacaccacagaggaggccactccggtgcaggaggtggaaggtggcgtacctgacatagaagagcaagagaggcggactcaagaggtcctccaggcagtggcagaaaaagtgaaagaggaatcccagctgcctggcaccggtgggccagaagatgtgcttcagcctgtgcagagagcagaggcagaaagaccagaagagcaggctgaagcgtcgggtctgaagaaagagacggatgtagtgttgaaagtagatgctcaggaggcaaaaactgagccttttacacaagggaaggtggtggggcagaccaccccagaaagctttgaaaaagctcctcaagtcacagagagcatagagtccagtgagcttgtaaccacttgtcaagccgaaaccttagctggggtaaaatcacaggagatggtgatggaacaggctatcccccctgactcggtggaaacccctacagacagtgagactgatggaagcacccccgtagccgactttgacgcaccaggcacaacccagaaagacgagattgtggaaatccatgaggagaatgaggtcgcatctggtacccagtcagggggcacagaagcagaggcagttcctgcacagaaagagaggcctccagcaccttccagttttgtgttccaggaagaaactaaagaacaatcaaagatggaagacactctagagcatacagataaagaggtgtcagtggaaactgtatccattctgtcaaagactgaggggactcaagaggctgaccagtatgctgatgagaaaaccaaagacgtaccatttttcgaaggacttgaggggtctatagacacaggcataacagtcagtcgggaaaaggtcactgaagttgcccttaaaggtgaagggacagaagaagctgaatgtaaaaaggatgatgctcttgaactgcagagtcacgctaagtctcctccatcccccgtggagagagagatggtagttcaagtcgaaagggagaaaacagaagcagagccaacccatgtgaatgaagagaagcttgagcacgaaacagctgttaccgtatctgaagaggtcagtaagcagctcctccagacagtgaatgtgcccatcatagatggggcaaaggaagtcagcagtttggaaggaagccctcctccctgcctaggtcaagaggaggcagtatgcaccaaaattcaagttcagagctctgaggcatcattcactctaacagcggctgcagaggaggaaaaggtcttaggagaaactgccaacattttagaaacaggtgaaacgttggagcctgcaggtgcacatttagttctggaagagaaatcctctgaaaaaaatgaagactttgccgctcatccaggggaagatgctgtgcccacagggcccgactgtcaggcaaaatcgacaccagtgatagtatctgctactaccaagaaaggcttaagttccgacctggaaggagagaaaaccacatcactgaagtggaagtcagatgaagtcgatgagcaggttgcttgccaggaggtcaaagtgagtgtagcaattgaggaggatttagagcctgaaaatgggattttggaacttgagaccaaaagcagtaaacttgtccaaaacatcatccagacagccgttgaccagtttgtacgtacagaagaaacagccaccgaaatgttgacgtctgagttacagacacaagctcacgtgataaaagctgacagccaggacgctggacaggaaacggagaaagaaggagaggaacctcaggcctctgcacaggatgaaacaccaattacttcagccaaagaggagtcagagtcaaccgcagtgggacaagcacattctgatatttccaaagacatgagtgaagcctcagaaaagaccatgactgttgaggtagaaggttccactgtaaatgatcagcagctggaagaggtcgtcctcccatctgaggaagagggaggtggagctggaacaaagtctgtgccagaagatgatggtcatgccttgttagcagaaagaatagagaagtcactagttgaaccgaaagaagatgaaaaaggtgatgatgttgatgaccctgaaaaccagaactcagccctggctgatactgatgcctcaggaggcttaaccaaagagtccccagatacaaatggaccaaaacaaaaagagaaggaggatgcccaggaagtagaattgcaggaaggaaaagtgcacagtgaatcagataaagcgatcacaccccaagcacaggaggagttacagaaacaagagagagaatctgcaaagtcagaacttacagaatcttaaaacatcatgcagttaaactcattgtctgtttggaagaccagaatgtgaagacaagtagtagaagaaaatgaatgctgctgctgagactgaagaccagtatttcagaactttgagaattggagagcaggcacatcaactgatctcatttctagagagcccctgacaatcctgaggcttcatcaggagctagagccatttaacatttcctctttccaagaccaacctacaattttcccttgataaccatataaattctgatttaaggtcctaaattcttaacctggaactggagttggcaatacctagttctgcttctgaaactggagtatcattctttacatatttatatgtatgttttaagtagtcctcctgtatctattgtatatttttttcttaatgtttaaggaaatgtgcaggatactacatgctttttgtatcacacagtatatgatggggcatgtgccatagtgcaggcttggggagctttaagcctcagttatataacccacgaaaaacagagcctcctagatgtaacattcctgatcaaggtacaattctttaaaattcactaatgattgaggtccatatttagtggtactctgaaattggtcactttcctattacacggagtgtgctaaaactaaaaagcattttgaaacatacagaatgttctattgtcattgggaaatttttctttctaacccagtggaggttagaaagaagttatattctggtagcaaattaactttacatcctttttcctacttgttatggttgtttggaccgataagtgtgcttaatcctgaggcaaagtagtgaatatgttttatatgttatgaagaaaagaattgttgtaagtttttgattctactcttatatgctggactgcattcacacatggcatgaaataagtcaggttctttacaaatggtattttgatagatactggattgtgtttgtgccatatttgtgccattcttttaagaacaatgttgcaacacattcatttggataagttgtgatttgacgactgatttaaataaaatatttgcttcacttagatttgctggttttattagataccaggaagcctgggacatatgtgtaccacattagaattctaaagataatgattgataagctagaactttctgatgtagtcattacatgaaaccccttgtcactggtttgtgtgttcagaggaagccatggccgagatagctttcctgaaataaaccagtagcttttcagattgacgttcttgctacaattgtaccatctggtaattcctgaaaatgtcaatttttttgtgttaatatttttggtttcaaacaataacaaatgtctctagaaagaaattttaagaaagcttaattaatagtaaaaatgcctttcctgaaataatcttggaaaattttttaaatgtcaaaatgatgagtcatgctaatacattgagggtttgtttttttgtttgtttgtttgtttttgagacagagtttcgctcttgttgcccaggctggagtgcaccactacactccagcctggatgacagagtgagacttcatctca

SEQ ID NO: 454072 - DNA, 3925 bp, Homo sapiens
ccttcttttaaggagtttgccgcgagcgcgtctccttcattcgcaggctgggcgcgttcgcagtcggctggcggcgaaggaaggcgctctcgggacctcgcgggcgcgcgtcttttggctcttgcccctgtccctgcggcttggggaaggcgtaacccggcggctaggcgcgggagaagtgcggaggagccatgggcgccgggagctccaccgagcagcgcagcccggagcagccgcccgaggggagctccacgccggctgagcccgagcccagcggcggcggcccctcggccgaggcggcgccagacaccaccgcggaccccgccatcgctgcctcggaccccgccaccaagctcctacagaagaatggtcagctgtccaccatcaatggcgtagctgagcaagatgagctcagcctccaggagggtgacctaaatggccagaaaggagccctgaacggtcaaggagccctaaacagccaggaggaagaagaagtcattgtcacagaggttggacagagagactctgaagatgtgagcgaaagagactccgataaagagatggctactaagtcagcggttgttcacgacatcacagatgatgggcaggaggagacacccgaaataatcgaacagattccttcttcagaaagcaatttagaagagctaacacaacccactgagtcccaggctaatgatattggatttaagaaggtgtttaagtttgttggctttaaattcactgtgaaaaaggataagacagagaagcctgacactgtccagctactcactgtgaagaaagatgaaggggagggagcagcaggggctggcgaccacaaggaccccagccttggggctggagaagcagcatccaaagaaagcgaacccaaacaatctacagagaaacccgaagagaccctgaagcgtgagcaaagccacgcagaaatttctcccccagccgaatctggccaagcagtggaggaatgcaaagaggaaggagaagagaaacaagaaaaagaacctagcaagtctgcagaatctccgactagtcccgtgaccagtgaaacaggatcaaccttcaaaaaattcttcactcaaggttgggccggctggcgcaaaaagaccagtttcaggaagccgaaggaggatgaagtggaagcttcagagaagaaaaaggaacaagagccagaaaaagtagacacagaagaagacggaaaggcagaggttgcctccgagaaactgaccgcctccgagcaagcccacccacaggagccggcagaaagtgcccacgagccccggttatcagctgaatatgagaaagttgagctgccctcagaggagcaagtcagtggctcgcagggaccttctgaagagaaacctgctccgttggcgacagaagtgtttgatgagaaaatagaagtccaccaagaagaggttgtggccgaagtccacgtcagcaccgtggaggagagaaccgaagagcagaaaacggaggtggaagaaacagcagggtctgtgccagctgaagaattggttgaaatggatgcagaacctcaggaagccgaacctgccaaggagctggtgaagctcaaagaaacgtgtgtttccggagaggaccctacacagggagctgacctcagtcctgatgagaaggtgctgtccaaaccccccgaaggcgttgtgagtgaggtggaaatgctgtcatcacaggagagaatgaaggtgcagggaagtccactaaagaagctttttaccagcactggcttaaaaaagctttctggaaagaaacagaaagggaaaagaggaggaggagacgaggaatcaggggagcacactcaggttccagccgattctccggacagccaggaggagcaaaagggcgagagctctgcctcatcccctgaggagcccgaggagatcacgtgtctggaaaagggcttagccgaggtgcagcaggatggggaagctgaagaaggagctacttccgatggagagaaaaaaagagaaggtgtcactccctgggcatcattcaaaaagatggtgacgcccaagaagcgtgttagacggccttcggaaagtgataaagaagatgagctggacaaggtcaagagcgctaccttgtcttccaccgagagcacagcctctgaaatgcaagaagaaatgaaagggagcgtggaagagccaaagccggaagaaccaaagcgcaaggtggatacctcagtatcttgggaagctttaatttgtgtgggatcatccaagaaaagagcaaggagagggtcctcttctgatgaggaagggggaccaaaagcaatgggaggagaccaccagaaagctgatgaggccggaaaagacaaagagacggggacagacgggatccttgctggttcccaagaacatgatccagggcagggaagttcctccccggagcaagctggaagccctaccgaaggggagggcgtttccacctgggagtcatttaaaaggttagtcacgccaagaaaaaaatcaaagtccaagctggaagagaaaagcgaagactccatagctgggtctggtgtagaacattccactccagacactgaacccggtaaagaagaatcctgggtctcaatcaagaagtttattcctggacgaaggaagaaaaggccagatgggaaacaagaacaagcccctgttgaagacgcagggccaacaggggccaacgaagatgactctgatgtcccggccgtggtccctctgtctgagtatgatgctgtagaaagggagaaaatggaggcacagcaagcccaaaaaagcgcagagcagcccgagcagaaggcagccactgaggtgtccaaggagctcagcgagagtcaggttcatatgatggcagcagctgtcgctgacgggacgagggcagctaccattattgaagaaaggtctccttcttggatatctgcttcagtgacagaacctcttgaacaagtagaagctgaagccgcactgttaactgaggaggtattggaaagagaagtaattgcagaagaagaaccccccacggttactgaacctctgccagagaacagagaggcccggggcgacacggtcgttagtgaggcggaattgacccccgaagctgtgacagctgcagaaactgcagggccattgggtgccgaagaaggaaccgaagcatctgctgctgaagagaccacagaaatggtgtcagcagtctcccagttaaccgactccccagacaccacagaggaggccactccggtgcaggaggtggaaggtggcgtacctgacatagaagagcaagagaggcggactcaagaggtcctccaggcagtggcagaaaaagtgaaagaggaatcccagctgcctggcaccggtgggccagaagatgtgcttcagcctgtgcagagagcagaggcagaaagaccagaagagcaggctgaagcgtcgggtctgaagaaagagacggatgtagtgttgaaagtagatgctcaggaggcaaaaactgagccttttacacaagggaaggtggtggggcagaccaccccagaaagctttgaaaaagctcctcaagtcacagagagcatagagtccagtgagcttgtaaccacttgtcaagccgaaaccttagctggggtaaaatcacaggagatggtgatggaacaggctatcccccctgactcggtggaaacccctacagacagtgagactgatggaagcacccccgtagccgactttgacgcaccaggcacaacccagaaagacgagattgtggaaatccatgaggagaatgaggtcgcatctggtacccagtcagggggcacagaagcagaggcagttcctgcacagaaagagaggcctccagcaccttccagttttgtgttccaggaagaaactaaagaacaatcaaagatggaagacactctagagca

SEQ ID NO: 454073 - DNA, 730 bp, Homo sapiens
gctggaacaaagtctgtgccagaagatgatggtcatgccttgttagcagaaagaatagagaagtcactagttgaaccgaaagaagatgaaaaaggtgatgatgttgatgaccctgaaaaccagaactcagccctggctgatactgatgcctcaggaggcttaaccaaagagtccccagatacaaatggaccaaaacaaaaagagaaggaggatgcccaggaagtagaattgcaggaaggaaaagtgcacagtgaatcagataaagcgatcacaccccaagcacaggaggagttacagaaacaagagagagaatctgcaaagtcagaacttacagaatcttaaaacatcatgcaggtaagcttccttgtcttctaagataatttttctcttttatgccaatagatggcaaatttgttacataaggaatcgggagcaaataattaatgccttcgtgtagaaccttcagttgaggaaaataactatcaactagattcaaagatctaggatagtttcatggtttttggtgattgaaatgccatttagtcttatcgatgttatgaaaagaacgacttcgttttacctcctaatgtgactgctttagaataaaataaaacggcatgtgtgtgtgcacatgtgcgtgtttgacccaaaggcataagaaatacattgtgttcactcaactatcttgttgagtttttttaaaaataactagtgctccaatggctgggcg

SEQ ID NO: 454074 - DNA, 3833 bp, Homo sapiens
ggcacgagggtcttcccctcgtgggccctgagcgggactgcagccagccccctggggcgccagctttggaggcccccgacagctgctctcgggagccgcctcccgacacccgagccccgccggcgcctcccgctcccggctcccggctcctggctccctccgcctcccccgcccctcgccccgccgccgaagaggccccgctcccgggtcggacgcctgggtctgccgggaagagcgatgagaggtgtctgaaggtggctattcactgagcgatggggttggacttgaaggaatgccaagagatgctgcccccacccccttaggcccgagggatcaggagctatgggaccagaggccctgtcatctttactgctgctgctcttggtggcaagtggagatgctgacatgaagggacattttgatcctgccaagtgccgctatgccctgggcatgcaggaccggaccatcccagacagtgacatctctgcttccagctcctggtcagattccactgccgcccgccacagcaggttggagagcagtgacggggatggggcctggtgccccgcagggtcggtgtttcccaaggaggaggagtacttgcaggtggatctacaacgactgcacctggtggctctggtgggcacccagggacggcatgccgggggcctgggcaaggagttctcccggagctaccggctgcgttactcccgggatggtcgccgctggatgggctggaaggaccgctggggtcaggaggtgatctcaggcaatgaggaccctgagggagtggtgctgaaggaccttgggccccccatggttgcccgactggttcgcttctacccccgggctgaccgggtcatgagcgtctgtctgcgggtagagctctatggctgcctctggagggatggactcctgtcttacaccgcccctgtggggcagacaatgtatttatctgaggccgtgtacctcaacgactccacctatgacggacataccgtgggcggactgcagtatgggggtctgggccagctggcagatggtgtggtggggctggatgactttaggaagagtcaggagctgcgggtctggccaggctatgactatgtgggatggagcaaccacagcttctccagtggctatgtggagatggagtttgagtttgaccggctgagggccttccaggctatgcaggtccactgtaacaacatgcacacgctgggagcccgtctgcctggcggggtggaatgtcgcttccggcgtggccctgccatggcctgggagggggagcccatgcgccacaacctagggggcaacctgggggaccccagagcccgggctgtctcagtgccccttggcggccgtgtggctcgctttctgcagtgccgcttcctctttgcggggccctggttactcttcagcgaaatctccttcatctctgatgtggtgaacaattcctctccggcactgggaggcaccttcccgccagccccctggtggccgcctggcccacctcccaccaacttcagcagcttggagctggagcccagaggccagcagcccgtggccaaggccgaggggagcccgaccgccatcctcatcggctgcctggtggccatcatcctgctcctgctgctcatcattgccctcatgctctggcggctgcactggcgcaggctcctcagcaaggctgaacggagggtgttggaagaggagctgacggttcacctctctgtccctggggacactatcctcatcaacaaccgcccaggtcctagagagccacccccgtaccaggagccccggcctcgtgggaatccgccccactccgctccctgtgtccccaatggctctgcctacagtggggactatatggagcctgagaagccaggcgccccgcttctgcccccacctccccagaacagcgtcccccattatgccgaggctgacattgttaccctgcagggcgtcaccgggggcaacacctatgctgtgcctgcactgcccccaggggcagtcggggatgggccccccagagtggatttccctcgatctcgactccgcttcaaggagaagcttggcgagggccagtttggggaggtgcacctgtgtgaggtcgacagccctcaagatctggttagtcttgatttcccccttaatgtgcgtaagggacaccctttgctggtagctgtcaagatcttacggccagatgccaccaagaatgccaggaatgatttcctgaaagaggtgaagatcatgtcgaggctcaaggacccaaacatcattcggctgctgggcgtgtgtgtgcaggacgaccccctctgcatgattactgactacatggagaacggcgacctcaaccagttcctcagtgcccaccagctggaggacaaggcagccgagggggcccctggggacgggcaggctgcgcaggggcccaccatcagctacccaatgctgctgcatgtggcagcccagatcgcctccggcatgcgctatctggccacactcaactttgtacatcgggacctggccacgcggaactgcctagttggggaaaatttcaccatcaaaatcgcagactttggcatgagccggaacctctatgctggggactattaccgtgtgcagggccgggcagtgctgcccatccgctggatggcctgggagtgcatcctcatggggaagttcacgactgcgagtgacgtgtgggcctttggtgtgaccctgtgggaggtgctgatgctctgtagggcccagccctttgggcagctcaccgacgagcaggtcatcgagaacgcgggggagttcttccgggaccagggccggcaggtgtacctgtcccggccgcctgcctgcccgcagggcctatatgagctgatgcttcggtgctggagccgggagtctgagcagcgaccacccttttcccagctgcatcggttcctggcagaggatgcactcaacacggtgtgaatcacacatccagctgcccctccctcagggagcgatccaggggaagccagtgacactaaaacaagaggacacaatggcacctctgcccttcccctcccgacagcccatcacctctaatagaggcagtgagactgcaggtgggctgggcccacccagggagctgatgccccttctccccttcctggacacactctcatgtccccttcctgttcttccttcctagaagcccctgtcgcccacccagctggtcctgtggatgggatcctctccaccctcctctagccatcccttggggaagggtggggagaaatataggatagacactggacatggcccattggagcacctgggccccactggacaacactgattcctggagaggtggctgcgcccccagcttctctctccctgtcacacactggaccccactggctgagaatctgggggtgaggaggacaagaaggagaggaaaatgtttccttgtgcctgctcctgtacttgtcctcagcttgggcttcttcctcctccatcacctgaaacactggacctgggggtagccccgccccagccctcagtcacccccacttcccacttgcagtcttgtagctagaacttctctaagcctatacgtttctgtggagtaaatattgggattggggggaaagagggagcaacggcccatagccttggggttggacatctctagtgtagctgccacattgatttttctataatcacttggggtttgtacatttttggggggagagacacagatttttacactaatatatggacctagcttgaggcaattttaatcccctgcactaggcaggtaataataaaggttgagttttccacaa

SEQ ID NO: 454075 - DNA, 4354 bp, Homo sapiens
attataatagacattgctagattgctttccaaatagaagataacactcatttctgccattgagcatggtgcctcccttttcatcactttctaccacttttatatgttacagccttaaaaaaatatcttgtcagtctgcttggtatttccctgaggctggtgaatttgaccattaaaaaaaatgtttgttggcaatttggctttgcttttctgtgaaatgactattcacattctttggctgtttctttattgggttacttatatattttttcttgtcagttcctaaggggccttagtttattgtagttattaaaccttttcctgttgtatgtgttataaacattttttgcacacttgttgtttgttctaagccgttgtttatggggatattttgcccattcctgattggagaaatggggcttaggaagtattaactgatctctgccctagttctcatgtgttaaatatggatagtaatagtatctaccttatgaagtgactgtgaagataaaattatggattctgtttaagggtttaggccagtgtctggcacaggggaagcattctaaaaatatagctgatgctgttaaacaatgactgttgttgttgttttactgttattatccccaaagcggcccattctgtctgttgctgtcagctatgactcagtcccctgattaacttacgcaccacccattttatcccctgcagagatgctgcccccacccccttaggcccgagggatcaggagctatgggaccagaggccctgtcatctttactgctgctgctcttggtggcaagtggagatgctgacatgaagggacattttgatcctgccaagtgccgctatgccctgggcatgcaggaccggaccatcccagacagtgacatctctgcttccagctcctggtcagattccactgccgcccgccacagcaggttggagagcagtgacggggatggggcctggtgccccgcagggtcggtgtttcccaaggaggaggagtacttgcaggtggatctacaacgactgcacctggtggctctggtgggcacccagggacggcatgccgggggcctgggcaaggagttctcccggagctaccggctgcgttactcccgggatggtcgccgctggatgggctggaaggaccgctggggtcaggaggtgatctcaggcaatgaggaccctgagggagtggtgctgaaggaccttgggccccccatggttgcccgactggttcgcttctacccccgggctgaccgggtcatgagcgtctgtctgcgggtagagctctatggctgcctctggagggatggactcctgtcttacaccgcccctgtggggcagacaatgtatttatctgaggccgtgtacctcaacgactccacctatgacggacataccgtgggcggactgcagtatgggggtctgggccagctggcagatggtgtggtggggctggatgactttaggaagagtcaggagctgcgggtctggccaggctatgactatgtgggatggagcaaccacagcttctccagtggctatgtggagatggagtttgagtttgaccggctgagggccttccaggctatgcaggtccactgtaacaacatgcacacgctgggagcccgtctgcctggcggggtggaatgtcgcttccggcgtggccctgccatggcctgggagggggagcccatgcgccacaacctagggggcaacctgggggaccccagagcccgggctgtctcagtgccccttggcggccgtgtggctcgctttctgcagtgccgcttcctctttgcggggccctggttactcttcagcgaaatctccttcatctctgatgtggtgaacaattcctctccggcactgggaggcaccttcccgccagccccctggtggccgcctggcccacctcccaccaacttcagcagcttggagctggagcccagaggccagcagcccgtggccaaggccgaggggagcccgaccgccatcctcatcggctgcctggtggccatcatcctgctcctgctgctcatcattgccctcatgctctggcggctgcactggcgcaggctcctcagcaaggctgaacggagggtgttggaagaggagctgacggttcacctctctgtccctggggacactatcctcatcaacaaccgcccaggtcctagagagccacccccgtaccaggagccccggcctcgtgggaatccgccccactccgctccctgtgtccccaatggctctgcgttgctgctctccaatccagcctaccgcctccttctggccacttacgcccgtccccctcgaggcccgggcccccccacacccgcctgggccaaacccaccaacacccaggcctacagtggggactatatggagcctgagaagccaggcgccccgcttctgcccccacctccccagaacagcgtcccccattatgccgaggctgacattgttaccctgcagggcgtcaccgggggcaacacctatgctgtgcctgcactgcccccaggggcagtcggggatgggccccccagagtggatttccctcgatctcgactccgcttcaaggagaagcttggcgagggccagtttggggaggtgcacctgtgtgaggtcgacagccctcaagatctggttagtcttgatttcccccttaatgtgcgtaagggacaccctttgctggtagctgtcaagatcttacggccagatgccaccaagaatgccaggaatgatttcctgaaagaggtgaagatcatgtcgaggctcaaggacccaaacatcattcggctgctgggcgtgtgtgtgcaggacgaccccctctgcatgattactgactacatggagaacggcgacctcaaccagttcctcagtgcccaccagctggaggacaaggcagccgagggggcccctggggacgggcaggctgcgcaggggcccaccatcagctacccaatgctgctgcatgtggcagcccagatcgcctccggcatgcgctatctggccacactcaactttgtacatcgggacctggccacgcggaactgcctagttggggaaaatttcaccatcaaaatcgcagactttggcatgagccggaacctctatgctggggactattaccgtgtgcagggccgggcagtgctgcccatccgctggatggcctgggagtgcatcctcatggggaagttcacgactgcgagtgacgtgtgggcctttggtgtgaccctgtgggaggtgctgatgctctgtagggcccagccctttgggcagctcaccgacgagcaggtcatcgagaacgcgggggagttcttccgggaccagggccggcaggtgtacctgtcccggccgcctgcctgcccgcagggcctatatgagctgatgcttcggtgctggagccgggagtctgagcagcgaccacccttttcccagctgcatcggttcctggcagaggatgcactcaacacggtgtgaatcacacatccagctgcccctccctcagggagcgatccaggggaagccagtgacactaaaacaagaggacacaatggcacctctgcccttcccctcccgacagcccatcacctctaatagaggcagtgagactgcaggtgggctgggcccacccagggagctgatgccccttctccccttcctggacacactctcatgtccccttcctgttcttccttcctagaagcccctgtcgcccacccagctggtcctgtggatgggatcctctccaccctcctctagccatcccttggggaagggtggggagaaatataggatagacactggacatggcccattggagcacctgggccccactggacaacactgattcctggagaggtggctgcgcccccagcttctctctccctgtcacacactggaccccactggctgagaatctgggggtgaggaggacaagaaggagaggaaaatgtttccttgtgcctgctcctgtacttgtcctcagcttgggcttcttcctcctccatcacctgaaacactggacctgggggtagccccgccccagccctcagtcacccccacttcccacttgcagtcttgtagctagaacttctctaagcctatacgtttctgtggagtaaatattgggattggggggaaagagggagcaacggcccatagccttggggttggacatctctagtgtagctgccacattgatttttctataatcacttggggtttgtacatttttggggggagagacacagatttttacactaatatatggacctagcttgaggcaattttaatcccctgcactaggcaggtaataataaaggttgagttttccacaa

SEQ ID NO: 454076 - DNA, 4372 bp, Homo sapiens
attataatagacattgctagattgctttccaaatagaagataacactcatttctgccattgagcatggtgcctcccttttcatcactttctaccacttttatatgttacagccttaaaaaaatatcttgtcagtctgcttggtatttccctgaggctggtgaatttgaccattaaaaaaaatgtttgttggcaatttggctttgcttttctgtgaaatgactattcacattctttggctgtttctttattgggttacttatatattttttcttgtcagttcctaaggggccttagtttattgtagttattaaaccttttcctgttgtatgtgttataaacattttttgcacacttgttgtttgttctaagccgttgtttatggggatattttgcccattcctgattggagaaatggggcttaggaagtattaactgatctctgccctagttctcatgtgttaaatatggatagtaatagtatctaccttatgaagtgactgtgaagataaaattatggattctgtttaagggtttaggccagtgtctggcacaggggaagcattctaaaaatatagctgatgctgttaaacaatgactgttgttgttgttttactgttattatccccaaagcggcccattctgtctgttgctgtcagctatgactcagtcccctgattaacttacgcaccacccattttatcccctgcagagatgctgcccccacccccttaggcccgagggatcaggagctatgggaccagaggccctgtcatctttactgctgctgctcttggtggcaagtggagatgctgacatgaagggacattttgatcctgccaagtgccgctatgccctgggcatgcaggaccggaccatcccagacagtgacatctctgcttccagctcctggtcagattccactgccgcccgccacagcaggttggagagcagtgacggggatggggcctggtgccccgcagggtcggtgtttcccaaggaggaggagtacttgcaggtggatctacaacgactgcacctggtggctctggtgggcacccagggacggcatgccgggggcctgggcaaggagttctcccggagctaccggctgcgttactcccgggatggtcgccgctggatgggctggaaggaccgctggggtcaggaggtgatctcaggcaatgaggaccctgagggagtggtgctgaaggaccttgggccccccatggttgcccgactggttcgcttctacccccgggctgaccgggtcatgagcgtctgtctgcgggtagagctctatggctgcctctggagggatggactcctgtcttacaccgcccctgtggggcagacaatgtatttatctgaggccgtgtacctcaacgactccacctatgacggacataccgtgggcggactgcagtatgggggtctgggccagctggcagatggtgtggtggggctggatgactttaggaagagtcaggagctgcgggtctggccaggctatgactatgtgggatggagcaaccacagcttctccagtggctatgtggagatggagtttgagtttgaccggctgagggccttccaggctatgcaggtccactgtaacaacatgcacacgctgggagcccgtctgcctggcggggtggaatgtcgcttccggcgtggccctgccatggcctgggagggggagcccatgcgccacaacctagggggcaacctgggggaccccagagcccgggctgtctcagtgccccttggcggccgtgtggctcgctttctgcagtgccgcttcctctttgcggggccctggttactcttcagcgaaatctccttcatctctgatgtggtgaacaattcctctccggcactgggaggcaccttcccgccagccccctggtggccgcctggcccacctcccaccaacttcagcagcttggagctggagcccagaggccagcagcccgtggccaaggccgaggggagcccgaccgccatcctcatcggctgcctggtggccatcatcctgctcctgctgctcatcattgccctcatgctctggcggctgcactggcgcaggctcctcagcaaggctgaacggagggtgttggaagaggagctgacggttcacctctctgtccctggggacactatcctcatcaacaaccgcccaggtcctagagagccacccccgtaccaggagccccggcctcgtgggaatccgccccactccgctccctgtgtccccaatggctctgcgttgctgctctccaatccagcctaccgcctccttctggccacttacgcccgtccccctcgaggcccgggcccccccacacccgcctgggccaaacccaccaacacccaggcctacagtggggactatatggagcctgagaagccaggcgccccgcttctgcccccacctccccagaacagcgtcccccattatgccgaggctgacattgttaccctgcagggcgtcaccgggggcaacacctatgctgtgcctgcactgcccccaggggcagtcggggatgggccccccagagtggatttccctcgatctcgactccgcttcaaggagaagcttggcgagggccagtttggggaggtgcacctgtgtgaggtcgacagccctcaagatctggttagtcttgatttcccccttaatgtgcgtaagggacaccctttgctggtagctgtcaagatcttacggccagatgccaccaagaatgccagcttctccttgttctccaggaatgatttcctgaaagaggtgaagatcatgtcgaggctcaaggacccaaacatcattcggctgctgggcgtgtgtgtgcaggacgaccccctctgcatgattactgactacatggagaacggcgacctcaaccagttcctcagtgcccaccagctggaggacaaggcagccgagggggcccctggggacgggcaggctgcgcaggggcccaccatcagctacccaatgctgctgcatgtggcagcccagatcgcctccggcatgcgctatctggccacactcaactttgtacatcgggacctggccacgcggaactgcctagttggggaaaatttcaccatcaaaatcgcagactttggcatgagccggaacctctatgctggggactattaccgtgtgcagggccgggcagtgctgcccatccgctggatggcctgggagtgcatcctcatggggaagttcacgactgcgagtgacgtgtgggcctttggtgtgaccctgtgggaggtgctgatgctctgtagggcccagccctttgggcagctcaccgacgagcaggtcatcgagaacgcgggggagttcttccgggaccagggccggcaggtgtacctgtcccggccgcctgcctgcccgcagggcctatatgagctgatgcttcggtgctggagccgggagtctgagcagcgaccacccttttcccagctgcatcggttcctggcagaggatgcactcaacacggtgtgaatcacacatccagctgcccctccctcagggagcgatccaggggaagccagtgacactaaaacaagaggacacaatggcacctctgcccttcccctcccgacagcccatcacctctaatagaggcagtgagactgcaggtgggctgggcccacccagggagctgatgccccttctccccttcctggacacactctcatgtccccttcctgttcttccttcctagaagcccctgtcgcccacccagctggtcctgtggatgggatcctctccaccctcctctagccatcccttggggaagggtggggagaaatataggatagacactggacatggcccattggagcacctgggccccactggacaacactgattcctggagaggtggctgcgcccccagcttctctctccctgtcacacactggaccccactggctgagaatctgggggtgaggaggacaagaaggagaggaaaatgtttccttgtgcctgctcctgtacttgtcctcagcttgggcttcttcctcctccatcacctgaaacactggacctgggggtagccccgccccagccctcagtcacccccacttcccacttgcagtcttgtagctagaacttctctaagcctatacgtttctgtggagtaaatattgggattggggggaaagagggagcaacggcccatagccttggggttggacatctctagtgtagctgccacattgatttttctataatcacttggggtttgtacatttttggggggagagacacagatttttacactaatatatggacctagcttgaggcaattttaatcccctgcactaggcaggtaataataaaggttgagttttccacaa

SEQ ID NO: 454077 - DNA, 3856 bp, Homo sapiens
cccgagccgccccagccctggctcctctccccggaacaggcccccgacagctgctctcgggagccgcctcccgacacccgagccccgccggcgcctcccgctcccggctcccggctcctggctccctccgcctcccccgcccctcgccccgccgccgaagaggccccgctcccgggtcggacgcctgggtctgccgggaagagcgatgagagagatgctgcccccacccccttaggcccgagggatcaggagctatgggaccagaggccctgtcatctttactgctgctgctcttggtggcaagtggagatgctgacatgaagggacattttgatcctgccaagtgccgctatgccctgggcatgcaggaccggaccatcccagacagtgacatctctgcttccagctcctggtcagattccactgccgcccgccacagcaggttggagagcagtgacggggatggggcctggtgccccgcagggtcggtgtttcccaaggaggaggagtacttgcaggtggatctacaacgactgcacctggtggctctggtgggcacccagggacggcatgccgggggcctgggcaaggagttctcccggagctaccggctgcgttactcccgggatggtcgccgctggatgggctggaaggaccgctggggtcaggaggtgatctcaggcaatgaggaccctgagggagtggtgctgaaggaccttgggccccccatggttgcccgactggttcgcttctacccccgggctgaccgggtcatgagcgtctgtctgcgggtagagctctatggctgcctctggagggatggactcctgtcttacaccgcccctgtggggcagacaatgtatttatctgaggccgtgtacctcaacgactccacctatgacggacataccgtgggcggactgcagtatgggggtctgggccagctggcagatggtgtggtggggctggatgactttaggaagagtcaggagctgcgggtctggccaggctatgactatgtgggatggagcaaccacagcttctccagtggctatgtggagatggagtttgagtttgaccggctgagggccttccaggctatgcaggtccactgtaacaacatgcacacgctgggagcccgtctgcctggcggggtggaatgtcgcttccggcgtggccctgccatggcctgggagggggagcccatgcgccacaacctagggggcaacctgggggaccccagagcccgggctgtctcagtgccccttggcggccgtgtggctcgctttctgcagtgccgcttcctctttgcggggccctggttactcttcagcgaaatctccttcatctctgatgtggtgaacaattcctctccggcactgggaggcaccttcccgccagccccctggtggccgcctggcccacctcccaccaacttcagcagcttggagctggagcccagaggccagcagcccgtggccaaggccgaggggagcccgaccgccatcctcatcggctgcctggtggccatcatcctgctcctgctgctcatcattgccctcatgctctggcggctgcactggcgcaggctcctcagcaaggctgaacggagggtgttggaagaggagctgacggttcacctctctgtccctggggacactatcctcatcaacaaccgcccaggtcctagagagccacccccgtaccaggagccccggcctcgtgggaatccgccccactccgctccctgtgtccccaatggctctgcgttgctgctctccaatccagcctaccgcctccttctggccacttacgcccgtccccctcgaggcccgggcccccccacacccgcctgggccaaacccaccaacacccaggcctacagtggggactatatggagcctgagaagccaggcgccccgcttctgcccccacctccccagaacagcgtcccccattatgccgaggctgacattgttaccctgcagggcgtcaccgggggcaacacctatgctgtgcctgcactgcccccaggggcagtcggggatgggccccccagagtggatttccctcgatctcgactccgcttcaaggagaagcttggcgagggccagtttggggaggtgcacctgtgtgaggtcgacagccctcaagatctggttagtcttgatttcccccttaatgtgcgtaagggacaccctttgctggtagctgtcaagatcttacggccagatgccaccaagaatgccaggaatgatttcctgaaagaggtgaagatcatgtcgaggctcaaggacccaaacatcattcggctgctgggcgtgtgtgtgcaggacgaccccctctgcatgattactgactacatggagaacggcgacctcaaccagttcctcagtgcccaccagctggaggacaaggcagccgagggggcccctggggacgggcaggctgcgcaggggcccaccatcagctacccaatgctgctgcatgtggcagcccagatcgcctccggcatgcgctatctggccacactcaactttgtacatcgggacctggccacgcggaactgcctagttggggaaaatttcaccatcaaaatcgcagactttggcatgagccggaacctctatgctggggactattaccgtgtgcagggccgggcagtgctgcccatccgctggatggcctgggagtgcatcctcatggggaagttcacgactgcgagtgacgtgtgggcctttggtgtgaccctgtgggaggtgctgatgctctgtagggcccagccctttgggcagctcaccgacgagcaggtcatcgagaacgcgggggagttcttccgggaccagggccggcaggtgtacctgtcccggccgcctgcctgcccgcagggcctatatgagctgatgcttcggtgctggagccgggagtctgagcagcgaccacccttttcccagctgcatcggttcctggcagaggatgcactcaacacggtgtgaatcacacatccagctgcccctccctcagggagcgatccaggggaagccagtgacactaaaacaagaggacacaatggcacctctgcccttcccctcccgacagcccatcacctctaatagaggcagtgagactgcaggtgggctgggcccacccagggagctgatgccccttctccccttcctggacacactctcatgtccccttcctgttcttccttcctagaagcccctgtcgcccacccagctggtcctgtggatgggatcctctccaccctcctctagccatcccttggggaagggtggggagaaatataggatagacactggacatggcccattggagcacctgggccccactggacaacactgattcctggagaggtggctgcgcccccagcttctctctccctgtcacacactggaccccactggctgagaatctgggggtgaggaggacaagaaggagaggaaaatgtttccttgtgcctgctcctgtacttgtcctcagcttgggcttcttcctcctccatcacctgaaacactggacctgggggtagccccgccccagccctcagtcacccccacttcccacttgcagtcttgtagctagaacttctctaagcctatacgtttctgtggagtaaatattgggattggggggaaagagggagcaacggcccatagccttggggttggacatctctagtgtagctgccacattgatttttctataatcacttggggtttgtacatttttggggggagagacacagatttttacactaatatatggacctagcttgaggcaattttaatcccctgcactaggcaggtaataataaaggttgagttttccacaa

SEQ ID NO: 454078 - DNA, 3968 bp, Homo sapiens
gaagccagccgcagctggcccgggcagctgctcctcctgggcccggggccccggacgctcggacaaagccaggcagcgttggcagccccagacccgaccccaaaggcctgagactggggtgactgggacctaagagaatcctgagctggaggcccccgacagctgctctcgggagccgcctcccgacacccgagccccgccggcgcctcccgctcccggctcccggctcctggctccctccgcctcccccgcccctcgccccgccgccgaagaggccccgctcccgggtcggacgcctgggtctgccgggaagagcgatgagagagatgctgcccccacccccttaggcccgagggatcaggagctatgggaccagaggccctgtcatctttactgctgctgctcttggtggcaagtggagatgctgacatgaagggacattttgatcctgccaagtgccgctatgccctgggcatgcaggaccggaccatcccagacagtgacatctctgcttccagctcctggtcagattccactgccgcccgccacagcaggttggagagcagtgacggggatggggcctggtgccccgcagggtcggtgtttcccaaggaggaggagtacttgcaggtggatctacaacgactgcacctggtggctctggtgggcacccagggacggcatgccgggggcctgggcaaggagttctcccggagctaccggctgcgttactcccgggatggtcgccgctggatgggctggaaggaccgctggggtcaggaggtgatctcaggcaatgaggaccctgagggagtggtgctgaaggaccttgggccccccatggttgcccgactggttcgcttctacccccgggctgaccgggtcatgagcgtctgtctgcgggtagagctctatggctgcctctggagggatggactcctgtcttacaccgcccctgtggggcagacaatgtatttatctgaggccgtgtacctcaacgactccacctatgacggacataccgtgggcggactgcagtatgggggtctgggccagctggcagatggtgtggtggggctggatgactttaggaagagtcaggagctgcgggtctggccaggctatgactatgtgggatggagcaaccacagcttctccagtggctatgtggagatggagtttgagtttgaccggctgagggccttccaggctatgcaggtccactgtaacaacatgcacacgctgggagcccgtctgcctggcggggtggaatgtcgcttccggcgtggccctgccatggcctgggagggggagcccatgcgccacaacctagggggcaacctgggggaccccagagcccgggctgtctcagtgccccttggcggccgtgtggctcgctttctgcagtgccgcttcctctttgcggggccctggttactcttcagcgaaatctccttcatctctgatgtggtgaacaattcctctccggcactgggaggcaccttcccgccagccccctggtggccgcctggcccacctcccaccaacttcagcagcttggagctggagcccagaggccagcagcccgtggccaaggccgaggggagcccgaccgccatcctcatcggctgcctggtggccatcatcctgctcctgctgctcatcattgccctcatgctctggcggctgcactggcgcaggctcctcagcaaggctgaacggagggtgttggaagaggagctgacggttcacctctctgtccctggggacactatcctcatcaacaaccgcccaggtcctagagagccacccccgtaccaggagccccggcctcgtgggaatccgccccactccgctccctgtgtccccaatggctctgcgttgctgctctccaatccagcctaccgcctccttctggccacttacgcccgtccccctcgaggcccgggcccccccacacccgcctgggccaaacccaccaacacccaggcctacagtggggactatatggagcctgagaagccaggcgccccgcttctgcccccacctccccagaacagcgtcccccattatgccgaggctgacattgttaccctgcagggcgtcaccgggggcaacacctatgctgtgcctgcactgcccccaggggcagtcggggatgggccccccagagtggatttccctcgatctcgactccgcttcaaggagaagcttggcgagggccagtttggggaggtgcacctgtgtgaggtcgacagccctcaagatctggttagtcttgatttcccccttaatgtgcgtaagggacaccctttgctggtagctgtcaagatcttacggccagatgccaccaagaatgccaggaatgatttcctgaaagaggtgaagatcatgtcgaggctcaaggacccaaacatcattcggctgctgggcgtgtgtgtgcaggacgaccccctctgcatgattactgactacatggagaacggcgacctcaaccagttcctcagtgcccaccagctggaggacaaggcagccgagggggcccctggggacgggcaggctgcgcaggggcccaccatcagctacccaatgctgctgcatgtggcagcccagatcgcctccggcatgcgctatctggccacactcaactttgtacatcgggacctggccacgcggaactgcctagttggggaaaatttcaccatcaaaatcgcagactttggcatgagccggaacctctatgctggggactattaccgtgtgcagggccgggcagtgctgcccatccgctggatggcctgggagtgcatcctcatggggaagttcacgactgcgagtgacgtgtgggcctttggtgtgaccctgtgggaggtgctgatgctctgtagggcccagccctttgggcagctcaccgacgagcaggtcatcgagaacgcgggggagttcttccgggaccagggccggcaggtgtacctgtcccggccgcctgcctgcccgcagggcctatatgagctgatgcttcggtgctggagccgggagtctgagcagcgaccacccttttcccagctgcatcggttcctggcagaggatgcactcaacacggtgtgaatcacacatccagctgcccctccctcagggagcgatccaggggaagccagtgacactaaaacaagaggacacaatggcacctctgcccttcccctcccgacagcccatcacctctaatagaggcagtgagactgcaggtgggctgggcccacccagggagctgatgccccttctccccttcctggacacactctcatgtccccttcctgttcttccttcctagaagcccctgtcgcccacccagctggtcctgtggatgggatcctctccaccctcctctagccatcccttggggaagggtggggagaaatataggatagacactggacatggcccattggagcacctgggccccactggacaacactgattcctggagaggtggctgcgcccccagcttctctctccctgtcacacactggaccccactggctgagaatctgggggtgaggaggacaagaaggagaggaaaatgtttccttgtgcctgctcctgtacttgtcctcagcttgggcttcttcctcctccatcacctgaaacactggacctgggggtagccccgccccagccctcagtcacccccacttcccacttgcagtcttgtagctagaacttctctaagcctatacgtttctgtggagtaaatattgggattggggggaaagagggagcaacggcccatagccttggggttggacatctctagtgtagctgccacattgatttttctataatcacttggggtttgtacatttttggggggagagacacagatttttacactaatatatggacctagcttgaggcaattttaatcccctgcactaggcaggtaataataaaggttgagttttccacaa

SEQ ID NO: 454079 - DNA, 3810 bp, Homo sapiens
ggcctgggagcgcccaggcgggcttggcgggcgggttacctgggggaggccgggccgggcgctagcgcgcggggtcggacgcctgggtctgccgggaagagcgatgagaggtgtctgaaggtggctattcactgagcgatggggttggacttgaaggaatgccaagagatgctgcccccacccccttaggcccgagggatcaggagctatgggaccagaggccctgtcatctttactgctgctgctcttggtggcaagtggagatgctgacatgaagggacattttgatcctgccaagtgccgctatgccctgggcatgcaggaccggaccatcccagacagtgacatctctgcttccagctcctggtcagattccactgccgcccgccacagcaggttggagagcagtgacggggatggggcctggtgccccgcagggtcggtgtttcccaaggaggaggagtacttgcaggtggatctacaacgactgcacctggtggctctggtgggcacccagggacggcatgccgggggcctgggcaaggagttctcccggagctaccggctgcgttactcccgggatggtcgccgctggatgggctggaaggaccgctggggtcaggaggtgatctcaggcaatgaggaccctgagggagtggtgctgaaggaccttgggccccccatggttgcccgactggttcgcttctacccccgggctgaccgggtcatgagcgtctgtctgcgggtagagctctatggctgcctctggagggatggactcctgtcttacaccgcccctgtggggcagacaatgtatttatctgaggccgtgtacctcaacgactccacctatgacggacataccgtgggcggactgcagtatgggggtctgggccagctggcagatggtgtggtggggctggatgactttaggaagagtcaggagctgcgggtctggccaggctatgactatgtgggatggagcaaccacagcttctccagtggctatgtggagatggagtttgagtttgaccggctgagggccttccaggctatgcaggtccactgtaacaacatgcacacgctgggagcccgtctgcctggcggggtggaatgtcgcttccggcgtggccctgccatggcctgggagggggagcccatgcgccacaacctagggggcaacctgggggaccccagagcccgggctgtctcagtgccccttggcggccgtgtggctcgctttctgcagtgccgcttcctctttgcggggccctggttactcttcagcgaaatctccttcatctctgatgtggtgaacaattcctctccggcactgggaggcaccttcccgccagccccctggtggccgcctggcccacctcccaccaacttcagcagcttggagctggagcccagaggccagcagcccgtggccaaggccgaggggagcccgaccgccatcctcatcggctgcctggtggccatcatcctgctcctgctgctcatcattgccctcatgctctggcggctgcactggcgcaggctcctcagcaaggctgaacggagggtgttggaagaggagctgacggttcacctctctgtccctggggacactatcctcatcaacaaccgcccaggtcctagagagccacccccgtaccaggagccccggcctcgtgggaatccgccccactccgctccctgtgtccccaatggctctgcgttgctgctctccaatccagcctaccgcctccttctggccacttacgcccgtccccctcgaggcccgggcccccccacacccgcctgggccaaacccaccaacacccaggcctacagtggggactatatggagcctgagaagccaggcgccccgcttctgcccccacctccccagaacagcgtcccccattatgccgaggctgacattgttaccctgcagggcgtcaccgggggcaacacctatgctgtgcctgcactgcccccaggggcagtcggggatgggccccccagagtggatttccctcgatctcgactccgcttcaaggagaagcttggcgagggccagtttggggaggtgcacctgtgtgaggtcgacagccctcaagatctggttagtcttgatttcccccttaatgtgcgtaagggacaccctttgctggtagctgtcaagatcttacggccagatgccaccaagaatgccaggaatgatttcctgaaagaggtgaagatcatgtcgaggctcaaggacccaaacatcattcggctgctgggcgtgtgtgtgcaggacgaccccctctgcatgattactgactacatggagaacggcgacctcaaccagttcctcagtgcccaccagctggaggacaaggcagccgagggggcccctggggacgggcaggctgcgcaggggcccaccatcagctacccaatgctgctgcatgtggcagcccagatcgcctccggcatgcgctatctggccacactcaactttgtacatcgggacctggccacgcggaactgcctagttggggaaaatttcaccatcaaaatcgcagactttggcatgagccggaacctctatgctggggactattaccgtgtgcagggccgggcagtgctgcccatccgctggatggcctgggagtgcatcctcatggggaagttcacgactgcgagtgacgtgtgggcctttggtgtgaccctgtgggaggtgctgatgctctgtagggcccagccctttgggcagctcaccgacgagcaggtcatcgagaacgcgggggagttcttccgggaccagggccggcaggtgtacctgtcccggccgcctgcctgcccgcagggcctatatgagctgatgcttcggtgctggagccgggagtctgagcagcgaccacccttttcccagctgcatcggttcctggcagaggatgcactcaacacggtgtgaatcacacatccagctgcccctccctcagggagcgatccaggggaagccagtgacactaaaacaagaggacacaatggcacctctgcccttcccctcccgacagcccatcacctctaatagaggcagtgagactgcaggtgggctgggcccacccagggagctgatgccccttctccccttcctggacacactctcatgtccccttcctgttcttccttcctagaagcccctgtcgcccacccagctggtcctgtggatgggatcctctccaccctcctctagccatcccttggggaagggtggggagaaatataggatagacactggacatggcccattggagcacctgggccccactggacaacactgattcctggagaggtggctgcgcccccagcttctctctccctgtcacacactggaccccactggctgagaatctgggggtgaggaggacaagaaggagaggaaaatgtttccttgtgcctgctcctgtacttgtcctcagcttgggcttcttcctcctccatcacctgaaacactggacctgggggtagccccgccccagccctcagtcacccccacttcccacttgcagtcttgtagctagaacttctctaagcctatacgtttctgtggagtaaatattgggattggggggaaagagggagcaacggcccatagccttggggttggacatctctagtgtagctgccacattgatttttctataatcacttggggtttgtacatttttggggggagagacacagatttttacactaatatatggacctagcttgaggcaattttaatcccctgcactaggcaggtaataataaaggttgagttttccacaa

SEQ ID NO: 454080 - DNA, 3795 bp, Homo sapiens
gaagccagccgcagctggcccgggcagctgctcctcctgggcccggggccccggacgctcggacaaagccaggcagcgttggcagccccagacccgaccccaaaggcctgagactggggtgactgggacctaagagaatcctgagctggagagatgctgcccccacccccttaggcccgagggatcaggagctatgggaccagaggccctgtcatctttactgctgctgctcttggtggcaagtggagatgctgacatgaagggacattttgatcctgccaagtgccgctatgccctgggcatgcaggaccggaccatcccagacagtgacatctctgcttccagctcctggtcagattccactgccgcccgccacagcaggttggagagcagtgacggggatggggcctggtgccccgcagggtcggtgtttcccaaggaggaggagtacttgcaggtggatctacaacgactgcacctggtggctctggtgggcacccagggacggcatgccgggggcctgggcaaggagttctcccggagctaccggctgcgttactcccgggatggtcgccgctggatgggctggaaggaccgctggggtcaggaggtgatctcaggcaatgaggaccctgagggagtggtgctgaaggaccttgggccccccatggttgcccgactggttcgcttctacccccgggctgaccgggtcatgagcgtctgtctgcgggtagagctctatggctgcctctggagggatggactcctgtcttacaccgcccctgtggggcagacaatgtatttatctgaggccgtgtacctcaacgactccacctatgacggacataccgtgggcggactgcagtatgggggtctgggccagctggcagatggtgtggtggggctggatgactttaggaagagtcaggagctgcgggtctggccaggctatgactatgtgggatggagcaaccacagcttctccagtggctatgtggagatggagtttgagtttgaccggctgagggccttccaggctatgcaggtccactgtaacaacatgcacacgctgggagcccgtctgcctggcggggtggaatgtcgcttccggcgtggccctgccatggcctgggagggggagcccatgcgccacaacctagggggcaacctgggggaccccagagcccgggctgtctcagtgccccttggcggccgtgtggctcgctttctgcagtgccgcttcctctttgcggggccctggttactcttcagcgaaatctccttcatctctgatgtggtgaacaattcctctccggcactgggaggcaccttcccgccagccccctggtggccgcctggcccacctcccaccaacttcagcagcttggagctggagcccagaggccagcagcccgtggccaaggccgaggggagcccgaccgccatcctcatcggctgcctggtggccatcatcctgctcctgctgctcatcattgccctcatgctctggcggctgcactggcgcaggctcctcagcaaggctgaacggagggtgttggaagaggagctgacggttcacctctctgtccctggggacactatcctcatcaacaaccgcccaggtcctagagagccacccccgtaccaggagccccggcctcgtgggaatccgccccactccgctccctgtgtccccaatggctctgcgttgctgctctccaatccagcctaccgcctccttctggccacttacgcccgtccccctcgaggcccgggcccccccacacccgcctgggccaaacccaccaacacccaggcctacagtggggactatatggagcctgagaagccaggcgccccgcttctgcccccacctccccagaacagcgtcccccattatgccgaggctgacattgttaccctgcagggcgtcaccgggggcaacacctatgctgtgcctgcactgcccccaggggcagtcggggatgggccccccagagtggatttccctcgatctcgactccgcttcaaggagaagcttggcgagggccagtttggggaggtgcacctgtgtgaggtcgacagccctcaagatctggttagtcttgatttcccccttaatgtgcgtaagggacaccctttgctggtagctgtcaagatcttacggccagatgccaccaagaatgccaggaatgatttcctgaaagaggtgaagatcatgtcgaggctcaaggacccaaacatcattcggctgctgggcgtgtgtgtgcaggacgaccccctctgcatgattactgactacatggagaacggcgacctcaaccagttcctcagtgcccaccagctggaggacaaggcagccgagggggcccctggggacgggcaggctgcgcaggggcccaccatcagctacccaatgctgctgcatgtggcagcccagatcgcctccggcatgcgctatctggccacactcaactttgtacatcgggacctggccacgcggaactgcctagttggggaaaatttcaccatcaaaatcgcagactttggcatgagccggaacctctatgctggggactattaccgtgtgcagggccgggcagtgctgcccatccgctggatggcctgggagtgcatcctcatggggaagttcacgactgcgagtgacgtgtgggcctttggtgtgaccctgtgggaggtgctgatgctctgtagggcccagccctttgggcagctcaccgacgagcaggtcatcgagaacgcgggggagttcttccgggaccagggccggcaggtgtacctgtcccggccgcctgcctgcccgcagggcctatatgagctgatgcttcggtgctggagccgggagtctgagcagcgaccacccttttcccagctgcatcggttcctggcagaggatgcactcaacacggtgtgaatcacacatccagctgcccctccctcagggagcgatccaggggaagccagtgacactaaaacaagaggacacaatggcacctctgcccttcccctcccgacagcccatcacctctaatagaggcagtgagactgcaggtgggctgggcccacccagggagctgatgccccttctccccttcctggacacactctcatgtccccttcctgttcttccttcctagaagcccctgtcgcccacccagctggtcctgtggatgggatcctctccaccctcctctagccatcccttggggaagggtggggagaaatataggatagacactggacatggcccattggagcacctgggccccactggacaacactgattcctggagaggtggctgcgcccccagcttctctctccctgtcacacactggaccccactggctgagaatctgggggtgaggaggacaagaaggagaggaaaatgtttccttgtgcctgctcctgtacttgtcctcagcttgggcttcttcctcctccatcacctgaaacactggacctgggggtagccccgccccagccctcagtcacccccacttcccacttgcagtcttgtagctagaacttctctaagcctatacgtttctgtggagtaaatattgggattggggggaaagagggagcaacggcccatagccttggggttggacatctctagtgtagctgccacattgatttttctataatcacttggggtttgtacatttttggggggagagacacagatttttacactaatatatggacctagcttgaggcaattttaatcccctgcactaggcaggtaataataaaggttgagttttccacaa

SEQ ID NO: 454081 - DNA, 3911 bp, Homo sapiens
gaagccagccgcagctggcccgggcagctgctcctcctgggcccggggccccggacgctcggacaaagccaggcagcgttggcagccccagacccgaccccaaaggcctgagactggggtgactgggacctaagagaatcctgagctggaggcccccgacagctgctctcgggagccgcctcccgacacccgagccccgccggcgcctcccgctcccggctcccggctcctggctccctccgcctcccccgcccctcgcccgcggaagcgccgtcgggtgtctgcgaaggaaagatgtgccctagccagaagcgaccagaggccctgtcatctttactgctgctgctcttggtggcaagtggagatgctgacatgaagggacattttgatcctgccaagtgccgctatgccctgggcatgcaggaccggaccatcccagacagtgacatctctgcttccagctcctggtcagattccactgccgcccgccacagcaggttggagagcagtgacggggatggggcctggtgccccgcagggtcggtgtttcccaaggaggaggagtacttgcaggtggatctacaacgactgcacctggtggctctggtgggcacccagggacggcatgccgggggcctgggcaaggagttctcccggagctaccggctgcgttactcccgggatggtcgccgctggatgggctggaaggaccgctggggtcaggaggtgatctcaggcaatgaggaccctgagggagtggtgctgaaggaccttgggccccccatggttgcccgactggttcgcttctacccccgggctgaccgggtcatgagcgtctgtctgcgggtagagctctatggctgcctctggagggatggactcctgtcttacaccgcccctgtggggcagacaatgtatttatctgaggccgtgtacctcaacgactccacctatgacggacataccgtgggcggactgcagtatgggggtctgggccagctggcagatggtgtggtggggctggatgactttaggaagagtcaggagctgcgggtctggccaggctatgactatgtgggatggagcaaccacagcttctccagtggctatgtggagatggagtttgagtttgaccggctgagggccttccaggctatgcaggtccactgtaacaacatgcacacgctgggagcccgtctgcctggcggggtggaatgtcgcttccggcgtggccctgccatggcctgggagggggagcccatgcgccacaacctagggggcaacctgggggaccccagagcccgggctgtctcagtgccccttggcggccgtgtggctcgctttctgcagtgccgcttcctctttgcggggccctggttactcttcagcgaaatctccttcatctctgatgtggtgaacaattcctctccggcactgggaggcaccttcccgccagccccctggtggccgcctggcccacctcccaccaacttcagcagcttggagctggagcccagaggccagcagcccgtggccaaggccgaggggagcccgaccgccatcctcatcggctgcctggtggccatcatcctgctcctgctgctcatcattgccctcatgctctggcggctgcactggcgcaggctcctcagcaaggctgaacggagggtgttggaagaggagctgacggttcacctctctgtccctggggacactatcctcatcaacaaccgcccaggtcctagagagccacccccgtaccaggagccccggcctcgtgggaatccgccccactccgctccctgtgtccccaatggctctgcgttgctgctctccaatccagcctaccgcctccttctggccacttacgcccgtccccctcgaggcccgggcccccccacacccgcctgggccaaacccaccaacacccaggcctacagtggggactatatggagcctgagaagccaggcgccccgcttctgcccccacctccccagaacagcgtcccccattatgccgaggctgacattgttaccctgcagggcgtcaccgggggcaacacctatgctgtgcctgcactgcccccaggggcagtcggggatgggccccccagagtggatttccctcgatctcgactccgcttcaaggagaagcttggcgagggccagtttggggaggtgcacctgtgtgaggtcgacagccctcaagatctggttagtcttgatttcccccttaatgtgcgtaagggacaccctttgctggtagctgtcaagatcttacggccagatgccaccaagaatgccaggaatgatttcctgaaagaggtgaagatcatgtcgaggctcaaggacccaaacatcattcggctgctgggcgtgtgtgtgcaggacgaccccctctgcatgattactgactacatggagaacggcgacctcaaccagttcctcagtgcccaccagctggaggacaaggcagccgagggggcccctggggacgggcaggctgcgcaggggcccaccatcagctacccaatgctgctgcatgtggcagcccagatcgcctccggcatgcgctatctggccacactcaactttgtacatcgggacctggccacgcggaactgcctagttggggaaaatttcaccatcaaaatcgcagactttggcatgagccggaacctctatgctggggactattaccgtgtgcagggccgggcagtgctgcccatccgctggatggcctgggagtgcatcctcatggggaagttcacgactgcgagtgacgtgtgggcctttggtgtgaccctgtgggaggtgctgatgctctgtagggcccagccctttgggcagctcaccgacgagcaggtcatcgagaacgcgggggagttcttccgggaccagggccggcaggtgtacctgtcccggccgcctgcctgcccgcagggcctatatgagctgatgcttcggtgctggagccgggagtctgagcagcgaccacccttttcccagctgcatcggttcctggcagaggatgcactcaacacggtgtgaatcacacatccagctgcccctccctcagggagcgatccaggggaagccagtgacactaaaacaagaggacacaatggcacctctgcccttcccctcccgacagcccatcacctctaatagaggcagtgagactgcaggtgggctgggcccacccagggagctgatgccccttctccccttcctggacacactctcatgtccccttcctgttcttccttcctagaagcccctgtcgcccacccagctggtcctgtggatgggatcctctccaccctcctctagccatcccttggggaagggtggggagaaatataggatagacactggacatggcccattggagcacctgggccccactggacaacactgattcctggagaggtggctgcgcccccagcttctctctccctgtcacacactggaccccactggctgagaatctgggggtgaggaggacaagaaggagaggaaaatgtttccttgtgcctgctcctgtacttgtcctcagcttgggcttcttcctcctccatcacctgaaacactggacctgggggtagccccgccccagccctcagtcacccccacttcccacttgcagtcttgtagctagaacttctctaagcctatacgtttctgtggagtaaatattgggattggggggaaagagggagcaacggcccatagccttggggttggacatctctagtgtagctgccacattgatttttctataatcacttggggtttgtacatttttggggggagagacacagatttttacactaatatatggacctagcttgaggcaattttaatcccctgcactaggcaggtaataataaaggttgagttttccacaa

SEQ ID NO: 454082 - DNA, 4207 bp, Homo sapiens
cccgagccgccccagccctggctcctctccccggaacaggcccccgacagctgctctcgggagccgcctcccgacacccgagccccgccggcgcctcccgctcccggctcccggctcctggctccctccgcctcccccgcccctcgccccgccgccgaagaggccccgctcccgggtcggacgcctgggtctgccgggaagagcgatgagagagatgctgcccccacccccttaggcccgagggatcaggagctatgggaccagaggccctgtcatctttactgctgctgctcttggtggcaagtggagatgctgacatgaagggacattttgatcctgccaagtgccgctatgccctgggcatgcaggaccggaccatcccagacagtgacatctctgcttccagctcctggtcagattccactgccgcccgccacagcaggttggagagcagtgacggggatggggcctggtgccccgcagggtcggtgtttcccaaggaggaggagtacttgcaggtggatctacaacgactgcacctggtggctctggtgggcacccagggacggcatgccgggggcctgggcaaggagttctcccggagctaccggctgcgttactcccgggatggtcgccgctggatgggctggaaggaccgctggggtcaggaggtgatctcaggcaatgaggaccctgagggagtggtgctgaaggaccttgggccccccatggttgcccgactggttcgcttctacccccgggctgaccgggtcatgagcgtctgtctgcgggtagagctctatggctgcctctggagggatggactcctgtcttacaccgcccctgtggggcagacaatgtatttatctgaggccgtgtacctcaacgactccacctatgacggacataccgtgggcggactgcagtatgggggtctgggccagctggcagatggtgtggtggggctggatgactttaggaagagtcaggagctgcgggtctggccaggctatgactatgtgggatggagcaaccacagcttctccagtggctatgtggagatggagtttgagtttgaccggctgagggccttccaggctatgcaggtccactgtaacaacatgcacacgctgggagcccgtctgcctggcggggtggaatgtcgcttccggcgtggccctgccatggcctgggagggggagcccatgcgccacaacctagggggcaacctgggggaccccagagcccgggctgtctcagtgccccttggcggccgtgtggctcgctttctgcagtgccgcttcctctttgcggggccctggttactcttcagcgaaatctccttcatctctgatgtggtgaacaattcctctccggcactgggaggcaccttcccgccagccccctggtggccgcctggcccacctcccaccaacttcagcagcttggagctggagcccagaggccagcagcccgtggccaaggccgaggggagcccgaccgccatcctcatcggctgcctggtggccatcatcctgctcctgctgctcatcattgccctcatgctctggcggctgcactggcgcaggctcctcagcaaggctgaacggagggtgttggaagaggagctgacggttcacctctctgtccctggggacactatcctcatcaacaaccgcccaggtcctagagagccacccccgtaccaggagccccggcctcgtgggaatccgccccactccgctccctgtgtccccaatggctctgcgttgctgctctccaatccagcctaccgcctccttctggccacttacgcccgtccccctcgaggcccgggcccccccacacccgcctgggccaaacccaccaacacccaggcctacagtggggactatatggagcctgagaagccaggcgccccgcttctgcccccacctccccagaacagcgtcccccattatgccgaggctgacattgttaccctgcagggcgtcaccgggggcaacacctatgctgtgcctgcactgcccccaggggcagtcggggatgggccccccagagtggatttccctcgatctcgactccgcttcaaggagaagcttggcgagggccagtttggggaggtgcacctgtgtgaggtcgacagccctcaagatctggttagtcttgatttcccccttaatgtgcgtaagggacaccctttgctggtagctgtcaagatcttacggccagatgccaccaagaatgccaggaatgatttcctgaaagaggtgaagatcatgtcgaggctcaaggacccaaacatcattcggctgctgggcgtgtgtgtgcaggacgaccccctctgcatgattactgactacatggagaacggcgacctcaaccagttcctcagtgcccaccagctggaggacaaggcagccgagggggcccctggggacgggcaggctgcgcaggggcccaccatcagctacccaatgctgctgcatgtggcagcccagatcgcctccggcatgcgctatctggccacactcaactttgtacatcgggacctggccacgcggaactgcctagttggggaaaatttcaccatcaaaatcgcagactttggcatgagccggaacctctatgctggggactattaccgtgtgcagggccgggcagtgctgcccatccgctggatggcctgggagtgcatcctcatggggaagttcacgactgcgagtgacgtgtgggcctttggtgtgaccctgtgggaggtgctgatgctctgtagggcccagccctttgggcagctcaccgacgagcaggtcatcgagaacgcgggggagttcttccgggaccagggccggcaggtgtacctgtcccggccgcctgcctgcccgcagggcctatatgagctgatgcttcggtgctggagccgggagtctgagcagcgaccacccttttcccagctgcatcggttcctggcagaggatgcactcaacacggtgtgaatcacacatccagctgcccctccctcagggagcgatccaggggaagccagtgacactaaaacaagaggacacaatggcacctctgcccttcccctcccgacagcccatcacctctaatagaggcagtgagactgcaggtgggctgggcccacccagggagctgatgccccttctccccttcctggacacactctcatgtccccttcctgttcttccttcctagaagcccctgtcgcccacccagctggtcctgtggatgggatcctctccaccctcctctagccatcccttggggaagggtggggagaaatataggatagacactggacatggcccattggagcacctgggccccactggacaacactgattcctggagaggtggctgcgcccccagcttctctctccctgtcacacactggaccccactggctgagaatctgggggtgaggaggacaagaaggagaggaaaatgtttccttgtgcctgctcctgtacttgtcctcagcttgggcttcttcctcctccatcacctgaaacactggacctgggggtagccccgccccagccctcagtcacccccacttcccacttgcagtcttgtagctagaacttctctaagcctatacgtttctgtggagtaaatattgggattggggggaaagagggagcaacggcccatagccttggggttggacatctctagtgtagctgccacattgatttttctataatcacttggggtttgtacatttttggggggagagacacagatttttacactaatatatggacctagcttgaggcaattttaatcccctgcactaggcaggtaataataaaggttgagttttccacaaaaaaaacaacaagacaaaacacaaacaataacacgaacgaaagcaaacacaacgcaaacaagacgaaccagcacaacaacacaccaaccaacaaaaagaacaaaaagaagaaaacgaaccgccgggcggagccacggaaacacaaccacgagacaacagacacgacaagcgaaaagagaaagcgacagacggcgacggaaaaaaaggggcggcgcgcaccagaaacggcagaaagccacccgccggcgacggggggaaccccccaggggggacacggacccccccagaaaagaaccgacggacaaacgacgcacgggcacacgagcagggggaaaaggcacgcgaccaacc

SEQ ID NO: 454083 - DNA, 2560 bp, Homo sapiens
  misc_feature (4)..(4): n is a, c, g, or t
  misc_feature (34)..(34): n is a, c, g, or t
  misc_feature (43)..(43): n is a, c, g, or t
agcngcccctactactactaaattcgcggccgcncgaccgcgnaggcctgggagtgcatcctcatggggaagttcacgactgcgagtgacgtgtgggcctttggtgtgaccctgtgtgaggtgctgatgctctgtagggcccagcctattgcgagcgtcaccgacgagcaggtcatcgagaacgcgggggagttcttccgggaccagggagcggagtggggcggattcccacgaggccggggctcctgctgctcatcattgccctcatgctctggcggctgcactggcgcaggctcctcagcaaggctgaacggagggtgttggaagaggagctgacggttcacctctctgtccctggggacactatcctcatcaacaaccgcccaggtcctagagagccacccccgtaccaggagccccggcctcgtgggaatccgccccactccgctccctgtgtccccaatggctctgcgttgctgctctccaatccagcctaccgcctccttctggccacttacgcccgtccccctcgaggcccgggcccccccacacccgcctgggccaaacccaccaacacccaggcctacagtggggactatatggagcctgagaagccaggcgccccgcttctgcccccacctccccagaacagcgtcccccattatgccgaggctgacattgttaccctgcagggcgtcaccgggggcaacacctatgctgtgcctgcactgcccccaggggcagtcggggatgggccccccagagtggatttccctcgatctcgactccgcttcaaggagaagcttggcgagggccagtttggggaggtgcacctgtgtgaggtcgacagccctcaagatctggttagtcttgatttcccccttaatgtgcgtaagggacaccctttgctggtagctgtcaagatcttacggccagatgccaccaagaatgccaggaatgatttcctgaaagaggtgaagatcatgtcgaggctcaaggacccaaacatcattcggctgctgggcgtgtgtgtgcaggacgaccccctctgcatgattactgactacatggagaacggcgacctcaaccagttcctcagtgcccaccagctggaggacaaggcagccgagggggcccctggggacgggcaggctgcgcaggggcccaccatcagctacccaatgctgctgcatgtggcagcccagatcgcctccggcatgcgctatctggccacactcaactttgtacatcgggacctggccacgcggaactgcctagttggggaaaatttcaccatcaaaatcgcagactttggcatgagccggaacctctatgctggggactattaccgtgtgcagggccgggcagtgctgcccatccgctggatggcctgggagtgcatcctcatggggaagttcacgactgcgagtgacgtgtgggcctttggtgtgaccctgtgggaggtgctgatgctctgtagggcccagccctttgggcagctcaccgacgagcaggtcatcgagaacgcgggggagttcttccgggaccagggccggcaggtgtacctgtcccggccgcctgcctgcccgcagggcctatatgagctgatgcttcggtgctggagccgggagtctgagcagcgaccacccttttcccagctgcatcggttcctggcagaggatgcactcaacacggtgtgaatcacacatccagctgcccctccctcagggagcgatccaggggaagccagtgacactaaaacaagaggacacaatggcacctctgcccttcccctcccgacagcccatcacctctaatagaggcagtgagactgcaggtgggctgggcccacccagggagctgatgccccttctccccttcctggacacactctcatgtccccttcctgttcttccttcctagaagcccctgtcgcccacccagctggtcctgtggatgggatcctctccaccctcctctagccatcccttggggaagggtggggagaaatataggatagacactggacatggcccattggagcacctgggccccactggacaacactgattcctggagaggtggctgcgcccccagcttctctctccctgtcacacactggaccccactggctgagaatctgggggtgaggaggacaagaaggagaggaaaatgtttccttgtgcctgctcctgtacttgtcctcagcttgggcttcttcctcctccatcacctgaaacactggacctgggggtagccccgccccagccctcagtcacccccacttcccacttgcagtcttgtagctagaacttctctaagcctatacgtttctgtggagtaaatattgggattggggggaaagagggagcaacggcccatagccttggggttggacatctctagtgtagctgccacattgatttttctataatcacttggggtttgtacatttttggggggagagacacagatttttacactaatatatggacctagcttgaggcaattttaatcccctgcactaggcaggtaataataaaggttgagttttccacaa

SEQ ID NO: 454084 - DNA, 5061 bp, Homo sapiens
cccgagccgccccagccctggctcctctccccggaacaggcccccgacagctgctctcgggagccgcctcccgacacccgagccccgccggcgcctcccgctcccggctcccggctcctggctccctccgcctcccccgcccctcgccccgccgccgaagaggccccgctcccgggtcggacgcctgggtctgccgggaagagcgatgagagagatgctgcccccacccccttaggcccgagggatcaggagctatgggaccagaggccctgtcatctttactgctgctgctcttggtggcaagtggagatgctgacatgaagggacattttgatcctgccaagtgccgctatgccctgggcatgcaggaccggaccatcccagacagtgacatctctgcttccagctcctggtcagattccactgccgcccgccacagcaggttggagagcagtgacggggatggggcctggtgccccgcagggtcggtgtttcccaaggaggaggagtacttgcaggtggatctacaacgactgcacctggtggctctggtgggcacccagggacggcatgccgggggcctgggcaaggagttctcccggagctaccggctgcgttactcccgggatggtcgccgctggatgggctggaaggaccgctggggtcaggaggtgatctcaggcaatgaggaccctgagggagtggtgctgaaggaccttgggccccccatggttgcccgactggttcgcttctacccccgggctgaccgggtcatgagcgtctgtctgcgggtagagctctatggctgcctctggagggatggactcctgtcttacaccgcccctgtggggcagacaatgtatttatctgaggccgtgtacctcaacgactccacctatgacggacataccgtgggcggactgcagtatgggggtctgggccagctggcagatggtgtggtggggctggatgactttaggaagagtcaggagctgcgggtctggccaggctatgactatgtgggatggagcaaccacagcttctccagtggctatgtggagatggagtttgagtttgaccggctgagggccttccaggctatgcaggtccactgtaacaacatgcacacgctgggagcccgtctgcctggcggggtggaatgtcgcttccggcgtggccctgccatggcctgggagggggagcccatgcgccacaacctagggggcaacctgggggaccccagagcccgggctgtctcagtgccccttggcggccgtgtggctcgctttctgcagtgccgcttcctctttgcggggccctggttactcttcagcgaaatctccttcatctctgatgtggtgaacaattcctctccggcactgggaggcaccttcccgccagccccctggtggccgcctggcccacctcccaccaacttcagcagcttggagctggagcccagaggccagcagcccgtggccaaggccgaggggagcccgaccgccatcctcatcggctgcctggtggccatcatcctgctcctgctgctcatcattgccctcatgctctggcggctgcactggcgcaggctcctcagcaaggctgaacggagggtgttggaagaggagctgacggttcacctctctgtccctggggacactatcctcatcaacaaccgcccaggtcctagagagccacccccgtaccaggagccccggcctcgtgggaatccgccccactccgctccctgtgtccccaatggctctgcgttgctgctctccaatccagcctaccgcctccttctggccacttacgcccgtccccctcgaggcccgggcccccccacacccgcctgggccaaacccaccaacacccaggcctacagtggggactatatggagcctgagaagccaggcgccccgcttctgcccccacctccccagaacagcgtcccccattatgccgaggctgacattgttaccctgcagggcgtcaccgggggcaacacctatgctgtgcctgcactgcccccaggggcagtcggggatgggccccccagagtggatttccctcgatctcgactccgcttcaaggagaagcttggcgagggccagtttggggaggtgcacctgtgtgaggtcgacagccctcaagatctggttagtcttgatttcccccttaatgtgcgtaagggacaccctttgctggtagctgtcaagatcttacggccagatgccaccaagaatgccaggaatgatttcctgaaagaggtgaagatcatgtcgaggctcaaggacccaaacatcattcggctgctgggcgtgtgtgtgcaggacgaccccctctgcatgattactgactacatggagaacggcgacctcaaccagttcctcagtgcccaccagctggaggacaaggcagccgagggggcccctggggacgggcaggctgcgcaggggcccaccatcagctacccaatgctgctgcatgtggcagcccagatcgcctccggcatgcgctatctggccacactcaactttgtacatcgggacctggccacgcggaactgcctagttggggaaaatttcaccatcaaaatcgcagactttggcatgagccggaacctctatgctggggactattaccgtgtgcagggccgggcagtgctgcccatccgctggatggcctgggagtgcatcctcatggggaagttcacgactgcgagtgacgtgtgggcctttggtgtgaccctgtgggaggtgctgatgctctgtagggcccagccctttgggcagctcaccgacgagcaggtcatcgagaacgcgggggagttcttccgggaccagggccggcaggtgtacctgtcccggccgcctgcctgcccgcagggcctatatgagctgatgcttcggtgctggagccgggagtctgagcagcgaccacccttttcccagctgcatcggttcctggcagaggatgcactcaacacggtgtgaatcacacatccagctgcccctccctcagggagcgatccaggggaagccagtgacactaaaacaagaggacacaatggcacctctgcccttcccctcccgacagcccatcacctctaatagaggcagtgagactgcaggtgggctgggcccacccagggagctgatgccccttctccccttcctggacacactctcatgtccccttcctgttcttccttcctagaagcccctgtcgcccacccagctggtcctgtggatgggatcctctccaccctcctctagccatcccttggggaagggtggggagaaatataggatagacactggacatggcccattggagcacctgggccccactggacaacactgattcctggagaggtggctgcgcccccagcttctctctccctgtcacacactggaccccactggctgagaatctgggggtgaggaggacaagaaggagaggaaaatgtttccttgtgcctgctcctgtacttgtcctcagcttgggcttcttcctcctccatcacctgaaacactggacctgggggtagccccgccccagccctcagtcacccccacttcccacttgcagtcttgtagctagaacttctctaagcctatacgtttctgtggagtaaatattgggattggggggaaagagggagcaacggcccatagccttggggttggacatctctagtgtagctgccacattgatttttctataatcacttggggtttgtacatttttggggggagagacacagatttttacactaatatatggacctagcttgaggcaattttaatcccctgcactaggcaggtaataataaaggttgagttttccacaactgtgtgagtgggttccttgggaatttggtaactctgcctcctgcacctccctctgaacccacttcccaacccacttcccatcttccttttttcctgcctcctcattccatttcccatcacctgttttgcccagcattgtgttctgtttctggataatccaggcctttgcctgtgggacctcaggagatgcatgaatgtctgagtgcatgaaccttctcaactcagaggggtgctctggtggaggcctggaaggaatgcagtcaggccaggggtgctgaaccttttttgtgccataaacgcctttggcagtctgtagaggtctactgagtcctcctcagaattaggttttaaaacctataaaatggaccaggcatagtggctcacccctgtaatcccagcactttgggaggctgaggtgggtagatcacttgaggccaggagttcgagaccaacctggccaacatagcaaaaccccatctctactaaagatacaaaaattagcagggtgtggtggcatgcgcctgtaatctcagctattcaggaggctgaggcaggagaattgcttagaacccgggaggtgggggttgcagtgagctgagatcacacaactgtgctccagcctgggcaacagagtgagactgtctcaaaaacagaacaacaacaacaacaaaacccataaaatgtataggattataagggaaaccaatggaaacagtttaccaaaatgctaaaaaattatgaaactaatgtgcttctttttcatgtatttaataacaagatctaaaaacaggtgtaataaactgacattttccaaataaataagagagagagaaatgaaaatagagaaaggagaaaaaggggggggggataaaagattcccggggagggggccgcaggttgatcgggttactccacgattttgttgtggtcgcaagggtgggtcccataatggaggagacgagtgattgtaaagcatagagcatgtggccggccgtctttttaaacaacgttcgagaatcgtgggcaaagaagggtggtttaccgtgggggaaaatctttggcgtataaggcacacctgtatactatcggtgggggtggggtaccactacagtgtgtggcagaagagtaatagcgctaacaggagagaattgaaagagggttctgaggggttaaccttgtttcacaattgttggaaggcggctta

SEQ ID NO: 454085 - DNA, 2903 bp, Homo sapiens
cccgagccgccccagccctggctcctctccccggaacaggcccccgacagctgctctcgggagccgcctcccgacacccgagccccgccggcgcctcccgctcccggctcccggctcctggctccctccgcctcccccgcccctcgccccgccgccgaagaggccccgctcccgggtcggacgcctgggtctgccgggaagagcgatgagagagatgctgcccccacccccttaggcccgagggatcaggagctatgggaccagaggccctgtcatctttactgctgctgctcttggtggcaagtggagatgctgacatgaagggacattttgatcctgccaagtgccgctatgccctgggcatgcaggaccggaccatcccagacagtgacatctctgcttccagctcctggtcagattccactgccgcccgccacagcaggttggagagcagtgacggggatggggcctggtgccccgcagggtcggtgtttcccaaggaggaggagtacttgcaggtggatctacaacgactgcacctggtggctctggtgggcacccagggacggcatgccgggggcctgggcaaggagttctcccggagctaccggctgcgttactcccgggatggtcgccgctggatgggctggaaggaccgctggggtcaggaggtgatctcaggcaatgaggaccctgagggagtggtgctgaaggaccttgggccccccatggttgcccgactggttcgcttctacccccgggctgaccgggtcatgagcgtctgtctgcgggtagagctctatggctgcctctggagggatggactcctgtcttacaccgcccctgtggggcagacaatgtatttatctgaggccgtgtacctcaacgactccacctatgacggacataccgtgggcggactgcagtatgggggtctgggccagctggcagatggtgtggtggggctggatgactttaggaagagtcaggagctgcgggtctggccaggctatgactatgtgggatggagcaaccacagcttctccagtggctatgtggagatggagtttgagtttgaccggctgagggccttccaggctatgcaggtccactgtaacaacatgcacacgctgggagcccgtctgcctggcggggtggaatgtcgcttccggcgtggccctgccatggcctgggagggggagcccatgcgccacaacctagggggcaacctgggggaccccagagcccgggctgtctcagtgccccttggcggccgtgtggctcgctttctgcagtgccgcttcctctttgcggggccctggttactcttcagcgaaatctccttcatctctgattcggctgctgggcgtgtgtgtgcaggacgaccccctctgcatgattactgactacatggagaacggcgacctcaaccagttcctcagtgcccaccagctggaggacaaggcagccgagggggcccctggggacgggcaggctgcgcaggggcccaccatcagctacccaatgctgctgcatgtggcagcccagatcgcctccggcatgcgctatctggccacactcaactttgtacatcgggacctggccacgcggaactgcctagttggggaaaatttcaccatcaaaatcgcagactttggcatgagccggaacctctatgctggggactattaccgtgtgcagggccgggcagtgctgcccatccgctggatggcctgggagtgcatcctcatggggaagttcacgactgcgagtgacgtgtgggcctttggtgtgaccctgtgggaggtgctgatgctctgtagggcccagccctttgggcagctcaccgacgagcaggtcatcgagaacgcgggggagttcttccgggaccagggccggcaggtgtacctgtcccggccgcctgcctgcccgcagggcctatatgagctgatgcttcggtgctggagccgggagtctgagcagcgaccacccttttcccagctgcatcggttcctggcagaggatgcactcaacacggtgtgaatcacacatccagctgcccctccctcagggagcgatccaggggaagccagtgacactaaaacaagaggacacaatggcacctctgcccttcccctcccgacagcccatcacctctaatagaggcagtgagactgcaggtgggctgggcccacccagggagctgatgccccttctccccttcctggacacactctcatgtccccttcctgttcttccttcctagaagcccctgtcgcccacccagctggtcctgtggatgggatcctctccaccctcctctagccatcccttggggaagggtggggagaaatataggatagacactggacatggcccattggagcacctgggccccactggacaacactgattcctggagaggtggctgcgcccccagcttctctctccctgtcacacactggaccccactggctgagaatctgggggtgaggaggacaagaaggagaggaaaatgtttccttgtgcctgctcctgtacttgtcctcagcttgggcttcttcctcctccatcacctgaaacactggacctgggggtagccccgccccagccctcagtcacccccacttcccacttgcagtcttgtagctagaacttctctaagcctatacgtttctgtggagtaaatattgggattggggggaaagagggagcaacggcccatagccttggggttggacatctctagtgtagctgccacattgatttttctataatcacttggggtttgtacatttttggggggagagacacagatttttacactaatatatggacctagcttgaggcaattttaatcccctgcactaggcaggtaataataaaggttgagttttccacaa

SEQ ID NO: 454086 - DNA, 2204 bp, Homo sapiens
  misc_feature (4)..(4): n is a, c, g, or t
  misc_feature (34)..(34): n is a, c, g, or t
  misc_feature (43)..(43): n is a, c, g, or t
agcngcccctactactactaaattcgcggccgcncgaccgcgnaggcctgggagtgcatcctcatggggaagttcacgactgcgagtgacgtgtgggcctttggtgtgaccctgtgtgaggtgctgatgctctgtagggcccagcctattgcgagcgtcaccgacgagcaggtcatcgagaacgcgggggagttcttccgggaccagggagcggagtggggcggattcccacgaggccggggctcctgctgctcatcattgccctcatgctctggcggctgcactggcgcaggctcctcagcaaggctgaacggagggtgttggaagaggagctgacggttcacctctctgtccctggggacactatcctcatcaacaaccgcccaggtcctagagagccacccccgtaccaggagccccggcctcgtgggaatccgccccactccgctccctgtgtccccaatggctctggtgcacctgtgtgaggtcgacagccctcaagatctggttagtcttgatttcccccttaatgtgcgtaagggacaccctttgctggtagctgtcaagatcttacggccagatgccaccaagaatgccaggaatgatttcctgaaagaggtgaagatcatgtcgaggctcaaggacccaaacatcattcggctgctgggcgtgtgtgtgcaggacgaccccctctgcatgattactgactacatggagaacggcgacctcaaccagttcctcagtgcccaccagctggaggacaaggcagccgagggggcccctggggacgggcaggctgcgcaggggcccaccatcagctacccaatgctgctgcatgtggcagcccagatcgcctccggcatgcgctatctggccacactcaactttgtacatcgggacctggccacgcggaactgcctagttggggaaaatttcaccatcaaaatcgcagactttggcatgagccggaacctctatgctggggactattaccgtgtgcagggccgggcagtgctgcccatccgctggatggcctgggagtgcatcctcatggggaagttcacgactgcgagtgacgtgtgggcctttggtgtgaccctgtgggaggtgctgatgctctgtagggcccagccctttgggcagctcaccgacgagcaggtcatcgagaacgcgggggagttcttccgggaccagggccggcaggtgtacctgtcccggccgcctgcctgcccgcagggcctatatgagctgatgcttcggtgctggagccgggagtctgagcagcgaccacccttttcccagctgcatcggttcctggcagaggatgcactcaacacggtgtgaatcacacatccagctgcccctccctcagggagcgatccaggggaagccagtgacactaaaacaagaggacacaatggcacctctgcccttcccctcccgacagcccatcacctctaatagaggcagtgagactgcaggtgggctgggcccacccagggagctgatgccccttctccccttcctggacacactctcatgtccccttcctgttcttccttcctagaagcccctgtcgcccacccagctggtcctgtggatgggatcctctccaccctcctctagccatcccttggggaagggtggggagaaatataggatagacactggacatggcccattggagcacctgggccccactggacaacactgattcctggagaggtggctgcgcccccagcttctctctccctgtcacacactggaccccactggctgagaatctgggggtgaggaggacaagaaggagaggaaaatgtttccttgtgcctgctcctgtacttgtcctcagcttgggcttcttcctcctccatcacctgaaacactggacctgggggtagccccgccccagccctcagtcacccccacttcccacttgcagtcttgtagctagaacttctctaagcctatacgtttctgtggagtaaatattgggattggggggaaagagggagcaacggcccatagccttggggttggacatctctagtgtagctgccacattgatttttctataatcacttggggtttgtacatttttggggggagagacacagatttttacactaatatatggacctagcttgaggcaattttaatcccctgcactaggcaggtaataataaaggttgagttttccacaa

SEQ ID NO: 454087 - DNA, 3620 bp, Homo sapiens
cccgagccgccccagccctggctcctctccccggaacaggcccccgacagctgctctcgggagccgcctcccgacacccgagccccgccggcgcctcccgctcccggctcccggctcctggctccctccgcctcccccgcccctcgccccgccgccgaagaggccccgctcccgggtcggacgcctgggtctgccgggaagagcgatgagagagatgctgcccccacccccttaggcccgagggatcaggagctatgggaccagaggccctgtcatctttactgctgctgctcttggtggcaagtggagatgctgacatgaagggacattttgatcctgccaagtgccgctatgccctgggcatgcaggaccggaccatcccagacagtgacatctctgcttccagctcctggtcagattccactgccgcccgccacagcaggttggagagcagtgacggggatggggcctggtgccccgcagggtcggtgtttcccaaggaggaggagtacttgcaggtggatctacaacgactgcacctggtggctctggtgggcacccagggacggcatgccgggggcctgggcaaggagttctcccggagctaccggctgcgttactcccgggatggtcgccgctggatgggctggaaggaccgctggggtcaggaggtgatctcaggcaatgaggaccctgagggagtggtgctgaaggaccttgggccccccatggttgcccgactggttcgcttctacccccgggctgaccgggtcatgagcgtctgtctgcgggtagagctctatggctgcctctggagggatggactcctgtcttacaccgcccctgtggggcagacaatgtatttatctgaggccgtgtacctcaacgactccacctatgacggacataccgtgggcggactgcagtatgggggtctgggccagctggcagatggtgtggtggggctggatgactttaggaagagtcaggagctgcgggtctggccaggctatgactatgtgggatggagcaaccacagcttctccagtggctatgtggagatggagtttgagtttgaccggctgagggccttccaggctatgcaggtccactgtaacaacatgcacacgctgggagcccgtctgcctggcggggtggaatgtcgcttccggcgtggccctgccatggcctgggagggggagcccatgcgccacaacctagggggcaacctgggggaccccagagcccgggctgtctcagtgccccttggcggccgtgtggctcgctttctgcagtgccgcttcctctttgcggggccctggttactcttcagcgaaatctccttcatctctgatgtggtgaacaattcctctccggcactgggaggcaccttcccgccagccccctggtggccgcctggcccacctcccaccaacttcagcagcttggagctggagcccagaggccagcagcccgtggccaaggccgaggggagcccgaccgccatcctcatcggctgcctggtggccatcatcctgctcctgctgctcatcattgccctcatgctctggcggctgcactggcgcaggctcctcagcaaggctgaacggagggtgttggaagaggagctgacggttcacctctctgtccctggggacactatcctcatcaacaaccgcccaggtcctagagagccacccccgtaccaggagccccggcctcgtgggaatccgccccactccgctccctgtgtccccaatggctctgcgttgctgctctccaatccagcctaccgcctccttctggccacttacgcccgtccccctcgaggcccgggcccccccacacccgcctgggccaaacccaccaacacccaggcctacagtggggactatatggagcctgagaagccaggcgccccgcttctgcccccacctccccagaacagcgtcccccattatgccgaggctgacattgttaccctgcagggcgtcaccgggggcaacacctatgctgtgcctgcactgcccccaggggcagtcggggatgggccccccagagtggatttccctcgatctcgactccgcttcaaggagaagcttggcgagggccagtttggggaggtgcacctgtgtgaggtcgacagccctcaagatctggttagtcttgatttcccccttaatgtgcgtaagggacaccctttgctggtagctgtcaagatcttacggccagatgccaccaagaatgccaggaatgatttcctgaaagaggtgaagatcatgtcgaggctcaaggacccaaacatcattcggctgctgggcgtgtgtgtgcaggacgaccccctctgcatgattactgactacatggagaacggcgacctcaaccagttcctcagtgcccaccagctggaggacaaggcagccgagggggcccctggggacgggcaggctgcgcaggggcccaccatcagctacccaatgctgctgcatgtggcagcccagatcgcctccggcatgcgctatctggccacactcaactttgtacatcgggacctggccacgcggaactgcctagttggggaaaatttcaccatcaaaatcgcagactttggcatgagccggaacctctatgctggggactattaccgtgtgcagggccgggcagtgctgcccatccgctggatggcctgggagtgcatcctcatggggaagttcacgactgcgagtgacgtgtgggcctttggtgtgaccctgtgggaggtgctgatgctctgtagggcccagccctttgggcagctcaccgacgagcaggtcatcgagaacgcgggggagttcttccgggaccagggccggcaggtgtacctgtcccggccgcctgcctgcccgcagggcctatatgagctgatgcttcggtgctggagccgggagtctgagcagcgaccacccttttcccagctgcatcggttcctggcagaggatgcactcaacacctgtcgcccacccagctggtcctgtggatgggatcctctccaccctcctctagccatcccttggggaagggtggggagaaatataggatagacactggacatggcccattggagcacctgggccccactggacaacactgattcctggagaggtggctgcgcccccagcttctctctccctgtcacacactggaccccactggctgagaatctgggggtgaggaggacaagaaggagaggaaaatgtttccttgtgcctgctcctgtacttgtcctcagcttgggcttcttcctcctccatcacctgaaacactggacctgggggtagccccgccccagccctcagtcacccccacttcccacttgcagtcttgtagctagaacttctctaagcctatacgtttctgtggagtaaatattgggattggggggaaagagggagcaacggcccatagccttggggttggacatctctagtgtagctgccacattgatttttctataatcacttggggtttgtacatttttggggggagagacacagatttttacactaatatatggacctagcttgaggcaattttaatcccctgcactaggcaggtaataataaaggttgagttttccacaa

SEQ ID NO: 454088 - DNA, 1425 bp, Homo sapiens
  misc_feature (5)..(5): n is a, c, g, or t
  misc_feature (25)..(25): n is a, c, g, or t
  misc_feature (27)..(27): n is a, c, g, or t
acatnaggctagtagaggctgggtntnaatcggccgaggctacccaatgctgctgcatgtggcagcccagatcgcctccggcatgcgctatctggccacactcaactttgtacatcgggacctggccacgcggaactgcctagttggggaaaatttcaccatcaaaatcgcagactttggcatgagccggaacctctatgctggggactattaccgtgtgcagggccgggcagtgctgcccatccgctggatggcctgggagtgcatcctcatggggaagttcacgactgcgagtgacgtgtgggcctttggtgtgaccctgtgggaggtgctgatgctctgtagggcccagccctttgggcagctcaccgacgagcaggtcatcgagaacgcgggggagttcttccgggaccagggccggcaggtgtacctgtcccggccgcctgcctgcccgcagggcctatatgagctgatgcttcggtgctggagccgggagtctgagcagcgaccacccttttcccagctgcatcggttcctggcagaggatgcactcaacacggtgtgaatcacacatccagctgcccctccctcagggagcgatccaggggaagccagtgacactaaaacaagaggacacaatggcacctctgcccttcccctcccgacagcccatcacctctaatagaggcagtgagactgcaggtgggctgggcccacccagggagctgatgccccttctccccttcctggacacactctcatgtccccttcctgttcttccttcctagaagcccctgtcgcccacccagctggtcctgtggatgggatcctctccaccctcctctagccatcccttggggaagggtggggagaaatataggatagacactggacatggcccattggagcacctgggccccactggacaacactgattcctggagaggtggctgcgcccccagcttctctctccctgtcacacactggaccccactggctgagaatctgggggtgaggaggacaagaaggagaggaaaatgtttccttgtgcctgctcctgtacttgtcctcagcttgggcttcttcctcctccatcacctgaaacactggacctgggggtagccccgccccagccctcagtcacccccacttcccacttgcagtcttgtagctagaacttctctaagcctatacgtttctgtggagtaaatattgggattggggggaaagagggagcaacggcccatagccttggggttggacatctctagtgtagctgccacattgatttttctataatcacttggggtttgtacatttttggggggagagacacagatttttacactaatatatggacctagcttgaggcaattttaatcccctgcactaggcaggtaataataaaggttgagttttccacaa

SEQ ID NO: 454089 - DNA, 3257 bp, Homo sapiens
cccgagccgccccagccctggctcctctccccggaacaggcccccgacagctgctctcgggagccgcctcccgacacccgagccccgccggcgcctcccgctcccggctcccggctcctggctccctccgcctcccccgcccctcgccccgccgccgaagaggccccgctcccgggtcggacgcctgggtctgccgggaagagcgatgagagagatgctgcccccacccccttaggcccgagggatcaggagctatgggaccagaggccctgtcatctttactgctgctgctcttggtggcaagtggagatgctgacatgaagggacattttgatcctgccaagtgccgctatgccctgggcatgcaggaccggaccatcccagacagtgacatctctgcttccagctcctggtcagattccactgccgcccgccacagcaggttggagagcagtgacggggatggggcctggtgccccgcagggtcggtgtttcccaaggaggaggagtacttgcaggtggatctacaacgactgcacctggtggctctggtgggcacccagggacggcatgccgggggcctgggcaaggagttctcccggagctaccggctgcgttactcccgggatggtcgccgctggatgggctggaaggaccgctggggtcaggaggtgatctcaggcaatgaggaccctgagggagtggtgctgaaggaccttgggccccccatggttgcccgactggttcgcttctacccccgggctgaccgggtcatgagcgtctgtctgcgggtagagctctatggctgcctctggagggatggactcctgtcttacaccgcccctgtggggcagacaatgtatttatctgaggccgtgtacctcaacgactccacctatgacggacataccgtgggcggactgcagtatgggggtctgggccagctggcagatggtgtggtggggctggatgactttaggaagagtcaggagctgcgggtctggccaggctatgactatgtgggatggagcaaccacagcttctccagtggctatgtggagatggagtttgagtttgaccggctgagggccttccaggctatgcaggtccactgtaacaacatgcacacgctgggagcccgtctgcctggcggggtggaatgtcgcttccggcgtggccctgccatggcctgggagggggagcccatgcgccacaacctagggggcaacctgggggaccccagagcccgggctgtctcagtgccccttggcggccgtgtggctcgctttctgcagtgccgcttcctctttgcggggccctggttactcttcagcgaaatctccttcatctctgatgtggtgaacaattcctctccggcactgggaggcaccttcccgccagccccctggtggccgcctggcccacctcccaccaacttcagcagcttggagctggagcccagaggccagcagcccgtggccaaggccgaggggagcccgaccgccatcctcatcggctgcctggtggccatcatcctgctcctgctgctcatcattgccctcatgctctggcggctgcactggcgcaggctcctcagcaaggctgaacggagggtgttggaagaggagctgacggttcacctctctgtccctggggacactatcctcatcaacaaccgcccaggtcctagagagccacccccgtaccaggagccccggcctcgtgggaatccgccccactccgctccctgtgtccccaatggctctgcgttgctgctctccaatccagcctaccgcctccttctggccacttacgcccgtccccctcgaggcccgggcccccccacacccgcctgggccaaacccaccaacacccaggcctacagtggggactatatggagcctgagaagccaggcgccccgcttctgcccccacctccccagaacagcgtcccccattatgccgaggctgacattgttaccctgcagggcgtcaccgggggcaacacctatgctgtgcctgcactgcccccaggggcagtcggggatgggccccccagagtggatttccctcgatctcgactccgcttcaaggagaagcttggcgagggccagtttggggaggtgcacctgtgtgaggtcgacagccctcaagatctggttagtcttgatttcccccttaatgtgcgtaagggacaccctttgctggtagctgtcaagatcttacggccagatgccaccaagaatgccaggaatgatttcctgaaagaggtgaagatcatgtcgaggctcaaggacccaaacatcattcggctgctgggcgtgtgtgtgcaggacgaccccctctgcatgattactgactacatggagaacggcgacctcaaccagttcctcagtgcccaccagctggaggacaaggcagccgagggggcccctggggacgggcaggctgcgcaggggcccaccatcagctacccaatgctgctgcatgtggcagcccagatcgcctccggcatgcgctatctggccacactcaactttgtacatcgggacctggccacgcggaactgcctagttggggaaaatttcaccatcaaaatcgcagactttggcatgagccggaacctctatgctggggactattaccgtgtgcagggccgggcagtgctgcccatccgctggatggcctgggagtgcatcctcatggggaagttcacgactgcgagtgacgtgtgggcctttggtgtgaccctgtgggaggtgctgatgctctgtagggcccagccctttgggcagctcaccgacgagcaggtcatcgagaacgcgggggagttcttccgggaccagggccggcaggtgtacctgtcccggccgcctgcctgcccgcagggcctatatgagctgatgcttcggtgctggagccgggagtctgagcagcgaccacccttttcccagctgcatcggttcctggcagaggatgcactcaacacggtgtgaatcacacatccagctgcccctccctcagggagcgatccaggggaagccagtgacactaaaacaagaggacacaatggcacctctgcccttcccctcccgacagcccatcacctctaatagaggcagtgagactgcaggtgggctgggcccacccagggagctgatgccccttctccccttcctggacacactctcatgtccccttcctgttcttccttcctagaagcccggctagtcggggggatcctacaagtcacctaa

SEQ ID NO: 454090 - DNA, 919 bp, Homo sapiens
ccccgactagcccgacaggaccatacaggacaaccatagtgcatcctcatggggtgtgaatcacacatccagctgcccctccctcagggagcgatccaggggaagccagtgacactaaaacaagaggacacaatggcacctctgcccttcccctcccgacagcccatcacctctaatagaggcagtgagactgcaggtgggctgggcccacccagggagctgatgccccttctccccttcctggacacactctcatgtccccttcctgttcttccttcctagaagcccctgtcgcccacccagctggtcctgtggatgggatcctctccaccctcctctagccatcccttggggaagggtggggagaaatataggatagacactggacatggcccattggagcacctgggccccactggacaacactgattcctggagaggtggctgcgcccccagcttctctctccctgtcacacactggaccccactggctgagaatctgggggtgaggaggacaagaaggagaggaaaatgtttccttgtgcctgctcctgtacttgtcctcagcttgggcttcttcctcctccatcacctgaaacactggacctgggggtagccccgccccagccctcagtcacccccacttcccacttgcagtcttgtagctagaacttctctaagcctatacgtttctgtggagtaaatattgggattggggggaaagagggagcaacggcccatagccttggggttggacatctctagtgtagctgccacattgatttttctataatcacttggggtttgtacatttttggggggagagacacagatttttacactaatatatggacctagcttgaggcaattttaatcccctgcactaggcaggtaataataaaggttgagttttccacaa

SEQ ID NO: 454091 - DNA, 877 bp, Homo sapiens
  misc_feature (4)..(4): n is a, c, g, or t
  misc_feature (34)..(34): n is a, c, g, or t
  misc_feature (43)..(43): n is a, c, g, or t
agcngcccctactactactaaattcgcggccgcncgaccgcgnagggagcgatccaggggaagccagtgacactaaaacaagaggacacaatggcacctctgcccttcccctcccgacagcccatcacctctaatagaggcagtgagactgcaggtgggctgggcccacccagggagctgatgccccttctccccttcctggacacactctcatgtccccttcctgttcttccttcctagaagcccctgtcgcccacccagctggtcctgtggatgggatcctctccaccctcctctagccatcccttggggaagggtggggagaaatataggatagacactggacatggcccattggagcacctgggccccactggacaacactgattcctggagaggtggctgcgcccccagcttctctctccctgtcacacactggaccccactggctgagaatctgggggtgaggaggacaagaaggagaggaaaatgtttccttgtgcctgctcctgtacttgtcctcagcttgggcttcttcctcctccatcacctgaaacactggacctgggggtagccccgccccagccctcagtcacccccacttcccacttgcagtcttgtagctagaacttctctaagcctatacgtttctgtggagtaaatattgggattggggggaaagagggagcaacggcccatagccttggggttggacatctctagtgtagctgccacattgatttttctataatcacttggggtttgtacatttttggggggagagacacagatttttacactaatatatggacctagcttgaggcaattttaatcccctgcactaggcaggtaataataaaggttgagttttccacaa

SEQ ID NO: 454092 - DNA, 786 bp, Homo sapiens
gtgtaccgggatactagtacagatcgaccgtaagcttgaatagagggagtgggactgtcgtgtggacaaggttcgctgccagggagctgatgccccttctccccttcctggacacactctcatgtccccttcctgttcttccttcctagaagcccctgtcgcccacccagctggtcctgtggatgggatcctctccaccctcctctagccatcccttggggaagggtggggagaaatataggatagacactggacatggcccattggagcacctgggccccactggacaacactgattcctggagaggtggctgcgcccccagcttctctctccctgtcacacactggaccccactggctgagaatctgggggtgaggaggacaagaaggagaggaaaatgtttccttgtgcctgctcctgtacttgtcctcagcttgggcttcttcctcctccatcacctgaaacactggacctgggggtagccccgccccagccctcagtcacccccacttcccacttgcagtcttgtagctagaacttctctaagcctatacgtttctgtggagtaaatattgggattggggggaaagagggagcaacggcccatagccttggggttggacatctctagtgtagctgccacattgatttttctataatcacttggggtttgtacatttttggggggagagacacagatttttacactaatatatggacctagcttgaggcaattttaatcccctgcactaggcaggtaataataaaggttgagttttccacaa

SEQ ID NO: 454093 - DNA, 3543 bp, Homo sapiens
cccgagccgccccagccctggctcctctccccggaacaggcccccgacagctgctctcgggagccgcctcccgacacccgagccccgccggcgcctcccgctcccggctcccggctcctggctccctccgcctcccccgcccctcgccccgccgccgaagaggccccgctcccgggtcggacgcctgggtctgccgggaagagcgatgagagagatgctgcccccacccccttaggcccgagggatcaggagctatgggaccagaggccctgtcatctttactgctgctgctcttggtggcaagtggagatgctgacatgaagggacattttgatcctgccaagtgccgctatgccctgggcatgcaggaccggaccatcccagacagtgacatctctgcttccagctcctggtcagattccactgccgcccgccacagcaggttggagagcagtgacggggatggggcctggtgccccgcagggtcggtgtttcccaaggaggaggagtacttgcaggtggatctacaacgactgcacctggtggctctggtgggcacccagggacggcatgccgggggcctgggcaaggagttctcccggagctaccggctgcgttactcccgggatggtcgccgctggatgggctggaaggaccgctggggtcaggaggtgatctcaggcaatgaggaccctgagggagtggtgctgaaggaccttgggccccccatggttgcccgactggttcgcttctacccccgggctgaccgggtcatgagcgtctgtctgcgggtagagctctatggctgcctctggagggatggactcctgtcttacaccgcccctgtggggcagacaatgtatttatctgaggccgtgtacctcaacgactccacctatgacggacataccgtgggcggactgcagtatgggggtctgggccagctggcagatggtgtggtggggctggatgactttaggaagagtcaggagctgcgggtctggccaggctatgactatgtgggatggagcaaccacagcttctccagtggctatgtggagatggagtttgagtttgaccggctgagggccttccaggctatgcaggtccactgtaacaacatgcacacgctgggagcccgtctgcctggcggggtggaatgtcgcttccggcgtggccctgccatggcctgggagggggagcccatgcgccacaacctagggggcaacctgggggaccccagagcccgggctgtctcagtgccccttggcggccgtgtggctcgctttctgcagtgccgcttcctctttgcggggccctggttactcttcagcgaaatctccttcatctctgatgtggtgaacaattcctctccggcactgggaggcaccttcccgccagccccctggtggccgcctggcccacctcccaccaacttcagcagcttggagctggagcccagaggccagcagcccgtggccaaggccgaggggagcccgaccgccatcctcatcggctgcctggtggccatcatcctgctcctgctgctcatcattgccctcatgctctggcggctgcactggcgcaggctcctcagcaaggctgaacggagggtgttggaagaggagctgacggttcacctctctgtccctggggacactatcctcatcaacaaccgcccaggtcctagagagccacccccgtaccaggagccccggcctcgtgggaatccgccccactccgctccctgtgtccccaatggctctgcctacagtggggactatatggagcctgagaagccaggcgccccgcttctgcccccacctccccagaacagcgtcccccattatgccgaggctgacattgttaccctgcagggcgtcaccgggggcaacacctatgctgtgcctgcactgcccccaggggcagtcggggatgggccccccagagtggatttccctcgatctcgactccgcttcaaggagaagcttggcgagggccagtttggggaggtgcacctgtgtgaggtcgacagccctcaagatctggttagtcttgatttcccccttaatgtgcgtaagggacaccctttgctggtagctgtcaagatcttacggccagatgccaccaagaatgccaggaatgatttcctgaaagaggtgaagatcatgtcgaggctcaaggacccaaacatcattcggctgctgggcgtgtgtgtgcaggacgaccccctctgcatgattactgactacatggagaacggcgacctcaaccagttcctcagtgcccaccagctggaggactaggcaggtaataataaaggttgagttttccacaactgtgtgagtgggttccttgggaatttggtaactctgcctcctgcacctccctctgaacccacttcccaacccacttcccatcttccttttttcctgcctcctcattccatttcccatcacctgttttgcccagcattgtgttctgtttctggataatccaggcctttgcctgtgggacctcaggagatgcatgaatgtctgagtgcatgaaccttctcaactcagaggggtgctctggtggaggcctggaaggaatgcagtcaggccaggggtgctgaaccttttttgtgccataaacgcctttggcagtctgtagaggtctactgagtcctcctcagaattaggttttaaaacctataaaatggaccaggcatagtggctcacccctgtaatcccagcactttgggaggctgaggtgggtagatcacttgaggccaggagttcgagaccaacctggccaacatagcaaaaccccatctctactaaagatacaaaaattagcagggtgtggtggcatgcgcctgtaatctcagctattcaggaggctgaggcaggagaattgcttagaacccgggaggtgggggttgcagtgagctgagatcacacaactgtgctccagcctgggcaacagagtgagactgtctcaaaaacagaacaacaacaacaacaaaacccataaaatgtataggattataagggaaaccaatggaaacagtttaccaaaatgctaaaaaattatgaaactaatgtgcttctttttcatgtatttaataacaagatctaaaaacaggtgtaataaactgacattttccaaataaataagagagagagaaatgaaaatagagaaaggagaaaaaggggggggggataaaagattcccggggagggggccgcaggttgatcgggttactccacgattttgttgtggtcgcaagggtgggtcccataatggaggagacgagtgattgtaaagcatagagcatgtggccggccgtctttttaaacaacgttcgagaatcgtgggcaaagaagggtggtttaccgtgggggaaaatctttggcgtataaggcacacctgtatactatcggtgggggtggggtaccactacagtgtgtggcagaagagtaatagcgctaacaggagagaattgaaagagggttctgaggggttaaccttgtttcacaattgttggaaggcggctta

SEQ ID NO: 454094 - DNA, 1802 bp, Homo sapiens
cccgagccgccccagccctggctcctctccccggaacaggcccccgacagctgctctcgggagccgcctcccgacacccgagccccgccggcgcctcccgctcccggctcccggctcctggctccctccgcctcccccgcccctcgccccgccgccgaagaggccccgctcccgggtcggacgcctgggtctgccgggaagagcgatgagagagatgctgcccccacccccttaggcccgagggatcaggagctatgggaccagaggccctgtcatctttactgctgctgctcttggtggcaagtggagatgctgacatgaagggacattttgatcctgccaagtgccgctatgccctgggcatgcaggaccggaccatcccagacagtgacatctctgcttccagctcctggtcagattccactgccgcccgccacagcaggttggagagcagtgacggggatggggcctggtgccccgcagggtcggtgtttcccaaggaggaggagtacttgcaggtggatctacaacgactgcacctggtggctctggtgggcacccagggacggcatgccgggggcctgggcaaggagttctcccggagctaccggctgcgttactcccgggatggtcgccgctggatgggctggaaggaccgctggggtcaggaggtgatctcaggcaatgaggaccctgagggagtggtgctgaaggaccttgggccccccatggttgcccgactggttcgcttctacccccgggctgaccgggtcatgagcgtctgtctgcgggtagagctctatggctgcctctggagggatggactcctgtcttacaccgcccctgtggggcagacaatgtatttatctgaggccgtgtacctcaacgactccacctatgacggacataccgtgggcggactgcagtatgggggtctgggccagctggcagatggtgtggtggggctggatgactttaggaagagtcaggagctgcgggtctggccaggctatgactatgtgggatggagcaaccacagcttctccagtggctatgtggagatggagtttgagtttgaccggctgagggccttccaggctatgcaggtccactgtaacaacatgcacacgctgggagcccgtctgcctggcggggtggaatgtcgcttccggcgtggccctgccatggcctgggagggggagcccatgcgccacaacctagggggcaacctgggggaccccagagcccgggctgtctcagtgccccttggcggccgtgtggctcgctttctgcagtgccgcttcctctttgcggggccctggttactcttcagcgaaatctccttcatctctgatgtggtgaacaattcctctccggcactgggaggcaccttcccgccagccccctggtggccgcctggcccacctcccaccaacttcagcagcttggagctggagcccagaggccagcagcccgtggccaaggccgaggggagcccgaccgccatcctcatcggctgcctggtggccatcatcctgctcctgctgctcatcattgccctcatgctctggcggctgcactggcgcaggctcctcagcaaggctgaacggagggtgttggaagaggagctgacggttcacctctctgtccctggggacactatcctcatcaacaaccgcccaggtcctagagagccacccccgtaccaggagccccggcctcgtgggaatccgccccactccgctccctgtgtccccaatggctctggtaagacctgccttgttccagtcgcacctctgtcc

SEQ ID NO: 454095 - DNA, 1200 bp, Homo sapiens
  misc_feature (1006)..(1006): n is a, c, g, or t
cccgagccgccccagccctggctcctctccccggaacaggcccccgacagctgctctcgggagccgcctcccgacacccgagccccgccggcgcctcccgctcccggctcccggctcctggctccctccgcctcccccgcccctcgccccgccgccgaagaggccccgctcccgggtcggacgcctgggtctgccgggaagagcgatgagagagatgctgcccccacccccttaggcccgagggatcaggagctatgggaccagaggccctgtcatctttactgctgctgctcttggtggcaagtggagatgctgacatgaagggacattttgatcctgccaagtgccgctatgccctgggcatgcaggaccggaccatcccagacagtgacatctctgcttccagctcctggtcagattccactgccgcccgccacagcaggttggagagcagtgacggggatggggcctggtgccccgcagggtcggtgtttcccaaggaggaggagtacttgcaggtggatctacaacgactgcacctggtggctctggtgggcacccagggacggcatgccgggggcctgggcaaggagttctcccggagctaccggctgcgttactcccgggatggtcgccgctggatgggctggaaggaccgctggggtcaggaggtgatctcaggcaatgaggaccctgagggagtggtgctgaaggaccttgggccccccatggttgcccgactggttcgcttctacccccgggctgaccgggtcatgagcgtctgtctgcgggtagagctctatggctgcctctggagggatggactcctgtcttacaccgcccctgtggggcagacaatgtatttatctgaggccgtgtacctcaacgactccacctatgacggacataccgtgggcggactgcagtatgggggtctgggccaactggccgaggtggtggagtccgggagtcctgcagagaccttgctgctggccctcctggatgncaccaggtagaggccgacctgacattctttaacacgctggtgagaaagaagagcaagctgtgagacctggagggggccaaggcgctgttgccggtcctggcaaagaggggcctcgtccccaacctgcagacattctgcaacctggccatcgggtgccacaggccgaaaggacgtctacagcttctcacagacat

SEQ ID NO: 454096 - DNA, 339 bp, Homo sapiens
ttcggctgctgggcgtgtgtgtgcaggacgaccccctctgcatgattactgactacatggagaacggcgacctcaaccagttcctcagtgcccaccagctggaggacaaggcagccgagggggcccctggggacgggcaggctgcgcaggggcccaccatcaggtacctgcttacccaggctgggccttgctcagaattcccccaggggatctcctcctctcccctcgcttcagcctggaggaaaagaggggagcgtgggggtgggaagggagagaggttccaggagggcctgggataaggaatgtgtgacaagttaacccaggaacatggacagaaag

SEQ ID NO: 454097 - DNA, 4243 bp, Homo sapiens
attataatagacattgctagattgctttccaaatagaagataacactcatttctgccattgagcatggtgcctcccttttcatcactttctaccacttttatatgttacagccttaaaaaaatatcttgtcagtctgcttggtatttccctgaggctggtgaatttgaccattaaaaaaaatgtttgttggcaatttggctttgcttttctgtgaaatgactattcacattctttggctgtttctttattgggttacttatatattttttcttgtcagttcctaaggggccttagtttattgtagttattaaaccttttcctgttgtatgtgttataaacattttttgcacacttgttgtttgttctaagccgttgtttatggggatattttgcccattcctgattggagaaatggggcttaggaagtattaactgatctctgccctagttctcatgtgttaaatatggatagtaatagtatctaccttatgaagtgactgtgaagataaaattatggattctgtttaagggtttaggccagtgtctggcacaggggaagcattctaaaaatatagctgatgctgttaaacaatgactgttgttgttgttttactgttattatccccaaagcggcccattctgtctgttgctgtcagctatgactcagtcccctgattaacttacgcaccacccattttatcccctgcagagatgctgcccccacccccttaggcccgagggatcaggagctatgggaccagaggccctgtcatctttactgctgctgctcttggtggcaagtggagatgctgacatgaagggacattttgatcctgccaagtgccgctatgccctgggcatgcaggaccggaccatcccagacagtgacatctctgcttccagctcctggtcagattccactgccgcccgccacagcaggttggagagcagtgacggggatggggcctggtgccccgcagggtcggtgtttcccaaggaggaggagtacttgcaggtggatctacaacgactgcacctggtggctctggtgggcacccagggacggcatgccgggggcctgggcaaggagttctcccggagctaccggctgcgttactcccgggatggtcgccgctggatgggctggaaggaccgctggggtcaggaggtgatctcaggcaatgaggaccctgagggagtggtgctgaaggaccttgggccccccatggttgcccgactggttcgcttctacccccgggctgaccgggtcatgagcgtctgtctgcgggtagagctctatggctgcctctggagggatggactcctgtcttacaccgcccctgtggggcagacaatgtatttatctgaggccgtgtacctcaacgactccacctatgacggacataccgtgggcggactgcagtatgggggtctgggccagctggcagatggtgtggtggggctggatgactttaggaagagtcaggagctgcgggtctggccaggctatgactatgtgggatggagcaaccacagcttctccagtggctatgtggagatggagtttgagtttgaccggctgagggccttccaggctatgcaggtccactgtaacaacatgcacacgctgggagcccgtctgcctggcggggtggaatgtcgcttccggcgtggccctgccatggcctgggagggggagcccatgcgccacaacctagggggcaacctgggggaccccagagcccgggctgtctcagtgccccttggcggccgtgtggctcgctttctgcagtgccgcttcctctttgcggggccctggttactcttcagcgaaatctccttcatctctgatgtggtgaacaattcctctccggcactgggaggcaccttcccgccagccccctggtggccgcctggcccacctcccaccaacttcagcagcttggagctggagcccagaggccagcagcccgtggccaaggccgaggggagcccgaccgccatcctcatcggctgcctggtggccatcatcctgctcctgctgctcatcattgccctcatgctctggcggctgcactggcgcaggctcctcagcaaggctgaacggagggtgttggaagaggagctgacggttcacctctctgtccctggggacactatcctcatcaacaaccgcccaggtcctagagagccacccccgtaccaggagccccggcctcgtgggaatccgccccactccgctccctgtgtccccaatggctctgcctacagtggggactatatggagcctgagaagccaggcgccccgcttctgcccccacctccccagaacagcgtcccccattatgccgaggctgacattgttaccctgcagggcgtcaccgggggcaacacctatgctgtgcctgcactgcccccaggggcagtcggggatgggccccccagagtggatttccctcgatctcgactccgcttcaaggagaagcttggcgagggccagtttggggaggtgcacctgtgtgaggtcgacagccctcaagatctggttagtcttgatttcccccttaatgtgcgtaagggacaccctttgctggtagctgtcaagatcttacggccagatgccaccaagaatgccaggaatgatttcctgaaagaggtgaagatcatgtcgaggctcaaggacccaaacatcattcggctgctgggcgtgtgtgtgcaggacgaccccctctgcatgattactgactacatggagaacggcgacctcaaccagttcctcagtgcccaccagctggaggacaaggcagccgagggggcccctggggacgggcaggctgcgcaggggcccaccatcagctacccaatgctgctgcatgtggcagcccagatcgcctccggcatgcgctatctggccacactcaactttgtacatcgggacctggccacgcggaactgcctagttggggaaaatttcaccatcaaaatcgcagactttggcatgagccggaacctctatgctggggactattaccgtgtgcagggccgggcagtgctgcccatccgctggatggcctgggagtgcatcctcatggggaagttcacgactgcgagtgacgtgtgggcctttggtgtgaccctgtgggaggtgctgatgctctgtagggcccagccctttgggcagctcaccgacgagcaggtcatcgagaacgcgggggagttcttccgggaccagggccggcaggtgtacctgtcccggccgcctgcctgcccgcagggcctatatgagctgatgcttcggtgctggagccgggagtctgagcagcgaccacccttttcccagctgcatcggttcctggcagaggatgcactcaacacggtgtgaatcacacatccagctgcccctccctcagggagcgatccaggggaagccagtgacactaaaacaagaggacacaatggcacctctgcccttcccctcccgacagcccatcacctctaatagaggcagtgagactgcaggtgggctgggcccacccagggagctgatgccccttctccccttcctggacacactctcatgtccccttcctgttcttccttcctagaagcccctgtcgcccacccagctggtcctgtggatgggatcctctccaccctcctctagccatcccttggggaagggtggggagaaatataggatagacactggacatggcccattggagcacctgggccccactggacaacactgattcctggagaggtggctgcgcccccagcttctctctccctgtcacacactggaccccactggctgagaatctgggggtgaggaggacaagaaggagaggaaaatgtttccttgtgcctgctcctgtacttgtcctcagcttgggcttcttcctcctccatcacctgaaacactggacctgggggtagccccgccccagccctcagtcacccccacttcccacttgcagtcttgtagctagaacttctctaagcctatacgtttctgtggagtaaatattgggattggggggaaagagggagcaacggcccatagccttggggttggacatctctagtgtagctgccacattgatttttctataatcacttggggtttgtacatttttggggggagagacacagatttttacactaatatatggacctagcttgaggcaattttaatcccctgcactaggcaggtaataataaaggttgagttttccacaa

SEQ ID NO: 454098 - DNA, 409 bp, Homo sapiens
aatagagttgggtgccatggtgtggtgaatgggctgagggactagggtgtccccaatgggggaccgttgtccagaaacaggttagattctctctttggtcctcatgtcaccatctgtcccgcaggtgcctcttcctttctcagccttttatacttctcatctccccgtgtcccttagcttcacactctgcgccccagtctccctcctctttccctccactctctgtttcactccagcccctccttcccttgtccttgcttcttgtccccttgatctgtctgcccagctctcgagcctcctcagttccctgccttcctctcttaggagtttgtttccaacactgtttccttcccgagtccacttcagttccttcatccagttcagcccttttcttcccaaacttcagtct

SEQ ID NO: 454099 - DNA, 3897 bp, Homo sapiens
aatagagttgggtgccatggtgtggtgaatgggctgagggactagggtgtccccaatgggggaccgttgtccagaaacaggcccccgacagctgctctcgggagccgcctcccgacacccgagccccgccggcgcctcccgctcccggctcccggctcctggctccctccgcctcccccgcccctcgccccgccgccgaagaggccccgctcccgggtcggacgcctgggtctgccgggaagagcgatgagagagatgctgcccccacccccttaggcccgagggatcaggagctatgggaccagaggccctgtcatctttactgctgctgctcttggtggcaagtggagatgctgacatgaagggacattttgatcctgccaagtgccgctatgccctgggcatgcaggaccggaccatcccagacagtgacatctctgcttccagctcctggtcagattccactgccgcccgccacagcaggttggagagcagtgacggggatggggcctggtgccccgcagggtcggtgtttcccaaggaggaggagtacttgcaggtggatctacaacgactgcacctggtggctctggtgggcacccagggacggcatgccgggggcctgggcaaggagttctcccggagctaccggctgcgttactcccgggatggtcgccgctggatgggctggaaggaccgctggggtcaggaggtgatctcaggcaatgaggaccctgagggagtggtgctgaaggaccttgggccccccatggttgcccgactggttcgcttctacccccgggctgaccgggtcatgagcgtctgtctgcgggtagagctctatggctgcctctggagggatggactcctgtcttacaccgcccctgtggggcagacaatgtatttatctgaggccgtgtacctcaacgactccacctatgacggacataccgtgggcggactgcagtatgggggtctgggccagctggcagatggtgtggtggggctggatgactttaggaagagtcaggagctgcgggtctggccaggctatgactatgtgggatggagcaaccacagcttctccagtggctatgtggagatggagtttgagtttgaccggctgagggccttccaggctatgcaggtccactgtaacaacatgcacacgctgggagcccgtctgcctggcggggtggaatgtcgcttccggcgtggccctgccatggcctgggagggggagcccatgcgccacaacctagggggcaacctgggggaccccagagcccgggctgtctcagtgccccttggcggccgtgtggctcgctttctgcagtgccgcttcctctttgcggggccctggttactcttcagcgaaatctccttcatctctgatgtggtgaacaattcctctccggcactgggaggcaccttcccgccagccccctggtggccgcctggcccacctcccaccaacttcagcagcttggagctggagcccagaggccagcagcccgtggccaaggccgaggggagcccgaccgccatcctcatcggctgcctggtggccatcatcctgctcctgctgctcatcattgccctcatgctctggcggctgcactggcgcaggctcctcagcaaggctgaacggagggtgttggaagaggagctgacggttcacctctctgtccctggggacactatcctcatcaacaaccgcccaggtcctagagagccacccccgtaccaggagccccggcctcgtgggaatccgccccactccgctccctgtgtccccaatggctctgcgttgctgctctccaatccagcctaccgcctccttctggccacttacgcccgtccccctcgaggcccgggcccccccacacccgcctgggccaaacccaccaacacccaggcctacagtggggactatatggagcctgagaagccaggcgccccgcttctgcccccacctccccagaacagcgtcccccattatgccgaggctgacattgttaccctgcagggcgtcaccgggggcaacacctatgctgtgcctgcactgcccccaggggcagtcggggatgggccccccagagtggatttccctcgatctcgactccgcttcaaggagaagcttggcgagggccagtttggggaggtgcacctgtgtgaggtcgacagccctcaagatctggttagtcttgatttcccccttaatgtgcgtaagggacaccctttgctggtagctgtcaagatcttacggccagatgccaccaagaatgccaggaatgatttcctgaaagaggtgaagatcatgtcgaggctcaaggacccaaacatcattcggctgctgggcgtgtgtgtgcaggacgaccccctctgcatgattactgactacatggagaacggcgacctcaaccagttcctcagtgcccaccagctggaggacaaggcagccgagggggcccctggggacgggcaggctgcgcaggggcccaccatcagctacccaatgctgctgcatgtggcagcccagatcgcctccggcatgcgctatctggccacactcaactttgtacatcgggacctggccacgcggaactgcctagttggggaaaatttcaccatcaaaatcgcagactttggcatgagccggaacctctatgctggggactattaccgtgtgcagggccgggcagtgctgcccatccgctggatggcctgggagtgcatcctcatggggaagttcacgactgcgagtgacgtgtgggcctttggtgtgaccctgtgggaggtgctgatgctctgtagggcccagccctttgggcagctcaccgacgagcaggtcatcgagaacgcgggggagttcttccgggaccagggccggcaggtgtacctgtcccggccgcctgcctgcccgcagggcctatatgagctgatgcttcggtgctggagccgggagtctgagcagcgaccacccttttcccagctgcatcggttcctggcagaggatgcactcaacacggtgtgaatcacacatccagctgcccctccctcagggagcgatccaggggaagccagtgacactaaaacaagaggacacaatggcacctctgcccttcccctcccgacagcccatcacctctaatagaggcagtgagactgcaggtgggctgggcccacccagggagctgatgccccttctccccttcctggacacactctcatgtccccttcctgttcttccttcctagaagcccctgtcgcccacccagctggtcctgtggatgggatcctctccaccctcctctagccatcccttggggaagggtggggagaaatataggatagacactggacatggcccattggagcacctgggccccactggacaacactgattcctggagaggtggctgcgcccccagcttctctctccctgtcacacactggaccccactggctgagaatctgggggtgaggaggacaagaaggagaggaaaatgtttccttgtgcctgctcctgtacttgtcctcagcttgggcttcttcctcctccatcacctgaaacactggacctgggggtagccccgccccagccctcagtcacccccacttcccacttgcagtcttgtagctagaacttctctaagcctatacgtttctgtggagtaaatattgggattggggggaaagagggagcaacggcccatagccttggggttggacatctctagtgtagctgccacattgatttttctataatcacttggggtttgtacatttttggggggagagacacagatttttacactaatatatggacctagcttgaggcaattttaatcccctgcactaggcaggtaataataaaggttgagttttccacaa

SEQ ID NO: 454100 - DNA, 3745 bp, Homo sapiens
cccgagccgccccagccctggctcctctccccggaacaggcccccgacagctgctctcgggagccgcctcccgacacccgagccccgccggcgcctcccgctcccggctcccggctcctggctccctccgcctcccccgcccctcgccccgccgccgaagaggccccgctcccgggtcggacgcctgggtctgccgggaagagcgatgagagagatgctgcccccacccccttaggcccgagggatcaggagctatgggaccagaggccctgtcatctttactgctgctgctcttggtggcaagtggagatgctgacatgaagggacattttgatcctgccaagtgccgctatgccctgggcatgcaggaccggaccatcccagacagtgacatctctgcttccagctcctggtcagattccactgccgcccgccacagcaggttggagagcagtgacggggatggggcctggtgccccgcagggtcggtgtttcccaaggaggaggagtacttgcaggtggatctacaacgactgcacctggtggctctggtgggcacccagggacggcatgccgggggcctgggcaaggagttctcccggagctaccggctgcgttactcccgggatggtcgccgctggatgggctggaaggaccgctggggtcaggaggtgatctcaggcaatgaggaccctgagggagtggtgctgaaggaccttgggccccccatggttgcccgactggttcgcttctacccccgggctgaccgggtcatgagcgtctgtctgcgggtagagctctatggctgcctctggagggatggactcctgtcttacaccgcccctgtggggcagacaatgtatttatctgaggccgtgtacctcaacgactccacctatgacggacataccgtgggcggactgcagtatgggggtctgggccagctggcagatggtgtggtggggctggatgactttaggaagagtcaggagctgcgggtctggccaggctatgactatgtgggatggagcaaccacagcttctccagtggctatgtggagatggagtttgagtttgaccggctgagggccttccaggctatgcaggtccactgtaacaacatgcacacgctgggagcccgtctgcctggcggggtggaatgtcgcttccggcgtggccctgccatggcctgggagggggagcccatgcgccacaacctagggggcaacctgggggaccccagagcccgggctgtctcagtgccccttggcggccgtgtggctcgctttctgcagtgccgcttcctctttgcggggccctggttactcttcagcgaaatctccttcatctctgatgtggtgaacaattcctctccggcactgggaggcaccttcccgccagccccctggtggccgcctggcccacctcccaccaacttcagcagcttggagctggagcccagaggccagcagcccgtggccaaggccgaggggagcccgaccgccatcctcatcggctgcctggtggccatcatcctgctcctgctgctcatcattgccctcatgctctggcggctgcactggcgcaggctcctcagcaaggctgaacggagggtgttggaagaggagctgacggttcacctctctgtccctggggacactatcctcatcaacaaccgcccaggtcctagagagccacccccgtaccaggagccccggcctcgtgggaatccgccccactccgctccctgtgtccccaatggctctgcctacagtggggactatatggagcctgagaagccaggcgccccgcttctgcccccacctccccagaacagcgtcccccattatgccgaggctgacattgttaccctgcagggcgtcaccgggggcaacacctatgctgtgcctgcactgcccccaggggcagtcggggatgggccccccagagtggatttccctcgatctcgactccgcttcaaggagaagcttggcgagggccagtttggggaggtgcacctgtgtgaggtcgacagccctcaagatctggttagtcttgatttcccccttaatgtgcgtaagggacaccctttgctggtagctgtcaagatcttacggccagatgccaccaagaatgccaggaatgatttcctgaaagaggtgaagatcatgtcgaggctcaaggacccaaacatcattcggctgctgggcgtgtgtgtgcaggacgaccccctctgcatgattactgactacatggagaacggcgacctcaaccagttcctcagtgcccaccagctggaggacaaggcagccgagggggcccctggggacgggcaggctgcgcaggggcccaccatcagctacccaatgctgctgcatgtggcagcccagatcgcctccggcatgcgctatctggccacactcaactttgtacatcgggacctggccacgcggaactgcctagttggggaaaatttcaccatcaaaatcgcagactttggcatgagccggaacctctatgctggggactattaccgtgtgcagggccgggcagtgctgcccatccgctggatggcctgggagtgcatcctcatggggaagttcacgactgcgagtgacgtgtgggcctttggtgtgaccctgtgggaggtgctgatgctctgtagggcccagccctttgggcagctcaccgacgagcaggtcatcgagaacgcgggggagttcttccgggaccagggccggcaggtgtacctgtcccggccgcctgcctgcccgcagggcctatatgagctgatgcttcggtgctggagccgggagtctgagcagcgaccacccttttcccagctgcatcggttcctggcagaggatgcactcaacacggtgtgaatcacacatccagctgcccctccctcagggagcgatccaggggaagccagtgacactaaaacaagaggacacaatggcacctctgcccttcccctcccgacagcccatcacctctaatagaggcagtgagactgcaggtgggctgggcccacccagggagctgatgccccttctccccttcctggacacactctcatgtccccttcctgttcttccttcctagaagcccctgtcgcccacccagctggtcctgtggatgggatcctctccaccctcctctagccatcccttggggaagggtggggagaaatataggatagacactggacatggcccattggagcacctgggccccactggacaacactgattcctggagaggtggctgcgcccccagcttctctctccctgtcacacactggaccccactggctgagaatctgggggtgaggaggacaagaaggagaggaaaatgtttccttgtgcctgctcctgtacttgtcctcagcttgggcttcttcctcctccatcacctgaaacactggacctgggggtagccccgccccagccctcagtcacccccacttcccacttgcagtcttgtagctagaacttctctaagcctatacgtttctgtggagtaaatattgggattggggggaaagagggagcaacggcccatagccttggggttggacatctctagtgtagctgccacattgatttttctataatcacttggggtttgtacatttttggggggagagacacagatttttacactaatatatggacctagcttgaggcaattttaatcccctgcactaggcaggtaataataaaggttgagttttccacaa

SEQ ID NO: 454101 - DNA, 3780 bp, Homo sapiens
aatgtcactgccggtgagcgccagcttcagggtcccacccccccatgcctggctcttggctgaacatttcttcccagcgcttccagcagccagaggcaggcgcccaagctcgctggctgttgctgagggcctgtagagatgctgcccccacccccttaggcccgagggatcaggagctatgggaccagaggccctgtcatctttactgctgctgctcttggtggcaagtggagatgctgacatgaagggacattttgatcctgccaagtgccgctatgccctgggcatgcaggaccggaccatcccagacagtgacatctctgcttccagctcctggtcagattccactgccgcccgccacagcaggttggagagcagtgacggggatggggcctggtgccccgcagggtcggtgtttcccaaggaggaggagtacttgcaggtggatctacaacgactgcacctggtggctctggtgggcacccagggacggcatgccgggggcctgggcaaggagttctcccggagctaccggctgcgttactcccgggatggtcgccgctggatgggctggaaggaccgctggggtcaggaggtgatctcaggcaatgaggaccctgagggagtggtgctgaaggaccttgggccccccatggttgcccgactggttcgcttctacccccgggctgaccgggtcatgagcgtctgtctgcgggtagagctctatggctgcctctggagggatggactcctgtcttacaccgcccctgtggggcagacaatgtatttatctgaggccgtgtacctcaacgactccacctatgacggacataccgtgggcggactgcagtatgggggtctgggccagctggcagatggtgtggtggggctggatgactttaggaagagtcaggagctgcgggtctggccaggctatgactatgtgggatggagcaaccacagcttctccagtggctatgtggagatggagtttgagtttgaccggctgagggccttccaggctatgcaggtccactgtaacaacatgcacacgctgggagcccgtctgcctggcggggtggaatgtcgcttccggcgtggccctgccatggcctgggagggggagcccatgcgccacaacctagggggcaacctgggggaccccagagcccgggctgtctcagtgccccttggcggccgtgtggctcgctttctgcagtgccgcttcctctttgcggggccctggttactcttcagcgaaatctccttcatctctgatgtggtgaacaattcctctccggcactgggaggcaccttcccgccagccccctggtggccgcctggcccacctcccaccaacttcagcagcttggagctggagcccagaggccagcagcccgtggccaaggccgaggggagcccgaccgccatcctcatcggctgcctggtggccatcatcctgctcctgctgctcatcattgccctcatgctctggcggctgcactggcgcaggctcctcagcaaggctgaacggagggtgttggaagaggagctgacggttcacctctctgtccctggggacactatcctcatcaacaaccgcccaggtcctagagagccacccccgtaccaggagccccggcctcgtgggaatccgccccactccgctccctgtgtccccaatggctctgcgttgctgctctccaatccagcctaccgcctccttctggccacttacgcccgtccccctcgaggcccgggcccccccacacccgcctgggccaaacccaccaacacccaggcctacagtggggactatatggagcctgagaagccaggcgccccgcttctgcccccacctccccagaacagcgtcccccattatgccgaggctgacattgttaccctgcagggcgtcaccgggggcaacacctatgctgtgcctgcactgcccccaggggcagtcggggatgggccccccagagtggatttccctcgatctcgactccgcttcaaggagaagcttggcgagggccagtttggggaggtgcacctgtgtgaggtcgacagccctcaagatctggttagtcttgatttcccccttaatgtgcgtaagggacaccctttgctggtagctgtcaagatcttacggccagatgccaccaagaatgccaggaatgatttcctgaaagaggtgaagatcatgtcgaggctcaaggacccaaacatcattcggctgctgggcgtgtgtgtgcaggacgaccccctctgcatgattactgactacatggagaacggcgacctcaaccagttcctcagtgcccaccagctggaggacaaggcagccgagggggcccctggggacgggcaggctgcgcaggggcccaccatcagctacccaatgctgctgcatgtggcagcccagatcgcctccggcatgcgctatctggccacactcaactttgtacatcgggacctggccacgcggaactgcctagttggggaaaatttcaccatcaaaatcgcagactttggcatgagccggaacctctatgctggggactattaccgtgtgcagggccgggcagtgctgcccatccgctggatggcctgggagtgcatcctcatggggaagttcacgactgcgagtgacgtgtgggcctttggtgtgaccctgtgggaggtgctgatgctctgtagggcccagccctttgggcagctcaccgacgagcaggtcatcgagaacgcgggggagttcttccgggaccagggccggcaggtgtacctgtcccggccgcctgcctgcccgcagggcctatatgagctgatgcttcggtgctggagccgggagtctgagcagcgaccacccttttcccagctgcatcggttcctggcagaggatgcactcaacacggtgtgaatcacacatccagctgcccctccctcagggagcgatccaggggaagccagtgacactaaaacaagaggacacaatggcacctctgcccttcccctcccgacagcccatcacctctaatagaggcagtgagactgcaggtgggctgggcccacccagggagctgatgccccttctccccttcctggacacactctcatgtccccttcctgttcttccttcctagaagcccctgtcgcccacccagctggtcctgtggatgggatcctctccaccctcctctagccatcccttggggaagggtggggagaaatataggatagacactggacatggcccattggagcacctgggccccactggacaacactgattcctggagaggtggctgcgcccccagcttctctctccctgtcacacactggaccccactggctgagaatctgggggtgaggaggacaagaaggagaggaaaatgtttccttgtgcctgctcctgtacttgtcctcagcttgggcttcttcctcctccatcacctgaaacactggacctgggggtagccccgccccagccctcagtcacccccacttcccacttgcagtcttgtagctagaacttctctaagcctatacgtttctgtggagtaaatattgggattggggggaaagagggagcaacggcccatagccttggggttggacatctctagtgtagctgccacattgatttttctataatcacttggggtttgtacatttttggggggagagacacagatttttacactaatatatggacctagcttgaggcaattttaatcccctgcactaggcaggtaataataaaggttgagttttccacaa

SEQ ID NO: 454102 - DNA, 3233 bp, Homo sapiens
cccgagccgccccagccctggctcctctccccggaacaggcccccgacagctgctctcgggagccgcctcccgacacccgagccccgccggcgcctcccgctcccggctcccggctcctggctccctccgcctcccccgcccctcgccccgccgccgaagaggccccgctcccgggtcggacgcctgggtctgccgggaagagcgatgagagagatgctgcccccacccccttaggcccgagggatcaggagctatgggaccagaggccctgtcatctttactgctgctgctcttggtggcaagtggagatgctgacatgaagggacattttgatcctgccaagtgccgctatgccctgggcatgcaggaccggaccatcccagacagtgacatctctgcttccagctcctggtcagattccactgccgcccgccacagcaggttggagagcagtgacggggatggggcctggtgccccgcagggtcggtgtttcccaaggaggaggagtacttgcaggtggatctacaacgactgcacctggtggctctggtgggcacccagggacggcatgccgggggcctgggcaaggagttctcccggagctaccggctgcgttactcccgggatggtcgccgctggatgggctggaaggaccgctggggtcaggaggtgatctcaggcaatgaggaccctgagggagtggtgctgaaggaccttgggccccccatggttgcccgactggttcgcttctacccccgggctgaccgggtcatgagcgtctgtctgcgggtagagctctatggctgcctctggagggatggactcctgtcttacaccgcccctgtggggcagacaatgtatttatctgaggccgtgtacctcaacgactccacctatgacggacataccgtgggcggactgcagtatgggggtctgggccagctggcagatggtgtggtggggctggatgactttaggaagagtcaggagctgcgggtctggccaggctatgactatgtgggatggagcaaccacagcttctccagtggctatgtggagatggagtttgagtttgaccggctgagggccttccaggctatgcaggtccactgtaacaacatgcacacgctgggagcccgtctgcctggcggggtggaatgtcgcttccggcgtggccctgccatggcctgggagggggagcccatgcgccacaacctagggggcaacctgggggaccccagagcccgggctgtctcagtgccccttggcggccgtgtggctcgctttctgcagtgccgttctgcccccacctccccagaacagcgtcccccattatgccgaggctgacattgttaccctgcagggcgtcaccgggggcaacacctatgctgtgcctgcactgcccccaggggcagtcggggatgggccccccagagtggatttccctcgatctcgactccgcttcaaggagaagcttggcgagggccagtttggggaggtgcacctgtgtgaggtcgacagccctcaagatctggttagtcttgatttcccccttaatgtgcgtaagggacaccctttgctggtagctgtcaagatcttacggccagatgccaccaagaatgccaggaatgatttcctgaaagaggtgaagatcatgtcgaggctcaaggacccaaacatcattcggctgctgggcgtgtgtgtgcaggacgaccccctctgcatgattactgactacatggagaacggcgacctcaaccagttcctcagtgcccaccagctggaggacaaggcagccgagggggcccctggggacgggcaggctgcgcaggggcccaccatcagctacccaatgctgctgcatgtggcagcccagatcgcctccggcatgcgctatctggccacactcaactttgtacatcgggacctggccacgcggaactgcctagttggggaaaatttcaccatcaaaatcgcagactttggcatgagccggaacctctatgctggggactattaccgtgtgcagggccgggcagtgctgcccatccgctggatggcctgggagtgcatcctcatggggaagttcacgactgcgagtgacgtgtgggcctttggtgtgaccctgtgggaggtgctgatgctctgtagggcccagccctttgggcagctcaccgacgagcaggtcatcgagaacgcgggggagttcttccgggaccagggccggcaggtgtacctgtcccggccgcctgcctgcccgcagggcctatatgagctgatgcttcggtgctggagccgggagtctgagcagcgaccacccttttcccagctgcatcggttcctggcagaggatgcactcaacacggtgtgaatcacacatccagctgcccctccctcagggagcgatccaggggaagccagtgacactaaaacaagaggacacaatggcacctctgcccttcccctcccgacagcccatcacctctaatagaggcagtgagactgcaggtgggctgggcccacccagggagctgatgccccttctccccttcctggacacactctcatgtccccttcctgttcttccttcctagaagcccctgtcgcccacccagctggtcctgtggatgggatcctctccaccctcctctagccatcccttggggaagggtggggagaaatataggatagacactggacatggcccattggagcacctgggccccactggacaacactgattcctggagaggtggctgcgcccccagcttctctctccctgtcacacactggaccccactggctgagaatctgggggtgaggaggacaagaaggagaggaaaatgtttccttgtgcctgctcctgtacttgtcctcagcttgggcttcttcctcctccatcacctgaaacactggacctgggggtagccccgccccagccctcagtcacccccacttcccacttgcagtcttgtagctagaacttctctaagcctatacgtttctgtggagtaaatattgggattggggggaaagagggagcaacggcccatagccttggggttggacatctctagtgtagctgccacattgatttttctataatcacttggggtttgtacatttttggggggagagacacagatttttacactaatatatggacctagcttgaggcaattttaatcccctgcactaggcaggtaataataaaggttgagttttccacaa

SEQ ID NO: 454103 - DNA, 3418 bp, Homo sapiens
cccgagccgccccagccctggctcctctccccggaacaggcccccgacagctgctctcgggagccgcctcccgacacccgagccccgccggcgcctcccgctcccggctcccggctcctggctccctccgcctcccccgcccctcgccccgccgccgaagaggccccgctcccgggtcggacgcctgggtctgccgggaagagcgatgagagagatgctgcccccacccccttaggcccgagggatcaggagctatgggaccagaggccctgtcatctttactgctgctgctcttggtggcaagtggagatgctgacatgaagggacattttgatcctgccaagtgccgctatgccctgggcatgcaggaccggaccatcccagacagtgacatctctgcttccagctcctggtcagattccactgccgcccgccacagcaggttggagagcagtgacggggatggggcctggtgccccgcagggtcggtgtttcccaaggaggaggagtacttgcaggtggatctacaacgactgcacctggtggctctggtgggcacccagggacggcatgccgggggcctgggcaaggagttctcccggagctaccggctgcgttactcccgggatggtcgccgctggatgggctggaaggaccgctggggtcaggaggtgatctcaggcaatgaggaccctgagggagtggtgctgaaggaccttgggccccccatggttgcccgactggttcgcttctacccccgggctgaccgggtcatgagcgtctgtctgcgggtagagctctatggctgcctctggagggatggactcctgtcttacaccgcccctgtggggcagacaatgtatttatctgaggccgtgtacctcaacgactccacctatgacggacataccgtgggcggactgcagtatgggggtctgggccagctggcagatggtgtggtggggctggatgactttaggaagagtcaggagctgcgggtctggccaggctatgactatgtgggatggagcaaccacagcttctccagtggctatgtggagatggagtttgagtttgaccggctgagggccttccaggctatgcaggtccactgtaacaacatgcacacgctgggagcccgtctgcctggcggggtggaatgtcgcttccggcgtggccctgccatggcctgggagggggagcccatgcgccacaacctagggggcaacctgggggaccccagagcccgggctgtctcagtgccccttggcggccgtgtggctcgctttctgcagtgccgcttcctctttgcggggccctggttactcttcagcgaaatctccttcatctctgatgtggtgaacaattcctctccggcactgggaggcaccttcccgccagccccctggtggccgcctggcccacctcccaccaacttcagcagcttggagctggagcccagaggccagcagcccgtggccaaggccgaggggagcccgaccgccatcctcatcggctgcctggtggccatcatcctgctcctgctgctcatcattgccctcatgctctggcggctgcactggcgcaggctcctcagcaaggtcctagagagccacccccgtaccaggagccccggcctcgtgggaatccgccccactccgctccctgtgtccccaatggctctggtgcacctgtgtgaggtcgacagccctcaagatctggttagtcttgatttcccccttaatgtgcgtaagggacaccctttgctggtagctgtcaagatcttacggccagatgccaccaagaatgccaggaatgatttcctgaaagaggtgaagatcatgtcgaggctcaaggacccaaacatcattcggctgctgggcgtgtgtgtgcaggacgaccccctctgcatgattactgactacatggagaacggcgacctcaaccagttcctcagtgcccaccagctggaggacaaggcagccgagggggcccctggggacgggcaggctgcgcaggggcccaccatcagctacccaatgctgctgcatgtggcagcccagatcgcctccggcatgcgctatctggccacactcaactttgtacatcgggacctggccacgcggaactgcctagttggggaaaatttcaccatcaaaatcgcagactttggcatgagccggaacctctatgctggggactattaccgtgtgcagggccgggcagtgctgcccatccgctggatggcctgggagtgcatcctcatggggaagttcacgactgcgagtgacgtgtgggcctttggtgtgaccctgtgggaggtgctgatgctctgtagggcccagccctttgggcagctcaccgacgagcaggtcatcgagaacgcgggggagttcttccgggaccagggccggcaggtgtacctgtcccggccgcctgcctgcccgcagggcctatatgagctgatgcttcggtgctggagccgggagtctgagcagcgaccacccttttcccagctgcatcggttcctggcagaggatgcactcaacacggtgtgaatcacacatccagctgcccctccctcagggagcgatccaggggaagccagtgacactaaaacaagaggacacaatggcacctctgcccttcccctcccgacagcccatcacctctaatagaggcagtgagactgcaggtgggctgggcccacccagggagctgatgccccttctccccttcctggacacactctcatgtccccttcctgttcttccttcctagaagcccctgtcgcccacccagctggtcctgtggatgggatcctctccaccctcctctagccatcccttggggaagggtggggagaaatataggatagacactggacatggcccattggagcacctgggccccactggacaacactgattcctggagaggtggctgcgcccccagcttctctctccctgtcacacactggaccccactggctgagaatctgggggtgaggaggacaagaaggagaggaaaatgtttccttgtgcctgctcctgtacttgtcctcagcttgggcttcttcctcctccatcacctgaaacactggacctgggggtagccccgccccagccctcagtcacccccacttcccacttgcagtcttgtagctagaacttctctaagcctatacgtttctgtggagtaaatattgggattggggggaaagagggagcaacggcccatagccttggggttggacatctctagtgtagctgccacattgatttttctataatcacttggggtttgtacatttttggggggagagacacagatttttacactaatatatggacctagcttgaggcaattttaatcccctgcactaggcaggtaataataaaggttgagttttccacaa

SEQ ID NO: 454104 - DNA, 1899 bp, Homo sapiens
  misc_feature (5)..(5): n is a, c, g, or t
  misc_feature (25)..(25): n is a, c, g, or t
  misc_feature (27)..(27): n is a, c, g, or t
acatnaggctagtagaggctgggtntnaatcggccgaggcgggggcaacacctatgctgtgcctgcactgcccccaggggcagtcggggatgggccccccagagtggatttccctcgatctcgactccgcttcaaggagaagcttggcgagggccagtttggggaggtgcacctgtgtgaggtcgacagccctcaagatctggttagtcttgatttcccccttaatgtgcgtaagggacaccctttgctggtagctgtcaagatcttacggccagatgccaccaagaatgccaggaatgatttcctgaaagaggtgaagatcatgtcgaggctcaaggacccaaacatcattcggctgctgggcgtgtgtgtgcaggacgaccccctctgcatgattactgactacatggagaacggcgacctcaaccagttcctcagtgcccaccagctggaggacaaggcagccgagggggcccctggggacgggcaggctgcgcaggggcccaccatcagctacccaatgctgctgcatgtggcagcccagatcgcctccggcatgcgctatctggccacactcaactttgtacatcgggacctggccacgcggaactgcctagttggggaaaatttcaccatcaaaatcgcagactttggcatgagccggaacctctatgctggggactattaccgtgtgcagggccgggcagtgctgcccatccgctggatggcctgggagtgcatcctcatggggaagttcacgactgcgagtgacgtgtgggcctttggtgtgaccctgtgggaggtgctgatgctctgtagggcccagccctttgggcagctcaccgacgagcaggtcatcgagaacgcgggggagttcttccgggaccagggccggcaggtgtacctgtcccggccgcctgcctgcccgcagggcctatatgagctgatgcttcggtgctggagccgggagtctgagcagcgaccacccttttcccagctgcatcggttcctggcagaggatgcactcaacacggtgtgaatcacacatccagctgcccctccctcagggagcgatccaggggaagccagtgacactaaaacaagaggacacaatggcacctctgcccttcccctcccgacagcccatcacctctaatagaggcagtgagactgcaggtgggctgggcccacccagggagctgatgccccttctccccttcctggacacactctcatgtccccttcctgttcttccttcctagaagcccctgtcgcccacccagctggtcctgtggatgggatcctctccaccctcctctagccatcccttggggaagggtggggagaaatataggatagacactggacatggcccattggagcacctgggccccactggacaacactgattcctggagaggtggctgcgcccccagcttctctctccctgtcacacactggaccccactggctgagaatctgggggtgaggaggacaagaaggagaggaaaatgtttccttgtgcctgctcctgtacttgtcctcagcttgggcttcttcctcctccatcacctgaaacactggacctgggggtagccccgccccagccctcagtcacccccacttcccacttgcagtcttgtagctagaacttctctaagcctatacgtttctgtggagtaaatattgggattggggggaaagagggagcaacggcccatagccttggggttggacatctctagtgtagctgccacattgatttttctataatcacttggggtttgtacatttttggggggagagacacagatttttacactaatatatggacctagcttgaggcaattttaatcccctgcactaggcaggtaataataaaggttgagttttccacaa

SEQ ID NO: 454105 - DNA, 4795 bp, Homo sapiens
cccgagccgccccagccctggctcctctccccggaacaggcccccgacagctgctctcgggagccgcctcccgacacccgagccccgccggcgcctcccgctcccggctcccggctcctggctccctccgcctcccccgcccctcgccccgccgccgaagaggccccgctcccgggtcggacgcctgggtctgccgggaagagcgatgagagagatgctgcccccacccccttaggcccgagggatcaggagctatgggaccagaggccctgtcatctttactgctgctgctcttggtggcaagtggagatgctgacatgaagggacattttgatcctgccaagtgccgctatgccctgggcatgcaggaccggaccatcccagacagtgacatctctgcttccagctcctggtcagattccactgccgcccgccacagcaggttggagagcagtgacggggatggggcctggtgccccgcagggtcggtgtttcccaaggaggaggagtacttgcaggtggatctacaacgactgcacctggtggctctggtgggcacccagggacggcatgccgggggcctgggcaaggagttctcccggagctaccggctgcgttactcccgggatggtcgccgctggatgggctggaaggaccgctggggtcaggaggtgatctcaggcaatgaggaccctgagggagtggtgctgaaggaccttgggccccccatggttgcccgactggttcgcttctacccccgggctgaccgggtcatgagcgtctgtctgcgggtagagctctatggctgcctctggagggatggactcctgtcttacaccgcccctgtggggcagacaatgtatttatctgaggccgtgtacctcaacgactccacctatgacggacataccgtgggcggactgcagtatgggggtctgggccagctggcagatggtgtggtggggctggatgactttaggaagagtcaggagctgcgggtctggccaggctatgactatgtgggatggagcaaccacagcttctccagtggctatgtggagatggagtttgagtttgaccggctgagggccttccaggctatgcaggtccactgtaacaacatgcacacgctgggagcccgtctgcctggcggggtggaatgtcgcttccggcgtggccctgccatggcctgggagggggagcccatgcgccacaacctagggggcaacctgggggaccccagagcccgggctgtctcagtgccccttggcggccgtgtggctcgctttctgcagtgccgcttcctctttgcggggccctggttactcttcagcgaaatctccttcatctctgatgtggtgaacaattcctctccggcactgggaggcaccttcccgccagccccctggtggccgcctggcccacctcccaccaacttcagcagcttggagctggagcccagaggccagcagcccgtggccaaggccgaggggagcccgaccgccatcctcatcggctgcctggtggccatcatcctgctcctgctgctcatcattgccctcatgctctggcggctgcactggcgcaggctcctcagcaaggctgaacggagggtgttggaagaggagctgacggttcacctctctgtccctggggacactatcctcatcaacaaccgcccaggtcctagagagccacccccgtaccaggagccccggcctcgtgggaatccgccccactccgctccctgtgtccccaatggctctgcgttgctgctctccaatccagcctaccgcctccttctggccacttacgcccgtccccctcgaggcccgggcccccccacacccgcctgggccaaacccaccaacacccaggcctacagtggggactatatggagcctgagaagccaggcgccccgcttctgcccccacctccccagaacagcgtcccccattatgccgaggctgacattgttaccctgcagggcgtcaccgggggcaacacctatgctgtgcctgcactgcccccaggggcagtcggggatgggccccccagagtggatttccctcgatctcgactccgcttcaaggagaagcttggcgagggccagtttggggaggtgcacctgtgtgaggtcgacagccctcaagatctggttagtcttgatttcccccttaatgtgcgtaagggacaccctttgctggtagctgtcaagatcttacggccagatgccaccaagaatgccaggaatgatttcctgaaagaggtgaagatcatgtcgaggctcaaggacccaaacatcattcggctgctgggcgtgtgtgtgcaggacgaccccctctgcatgattactgactacatggagaacggcgacctcaaccagttcctcagtgcccaccagctggaggacaaggcagccgagggggcccctggggacgggcaggctgcgcaggggcccaccatcagctacccaatgctgctgcatgtggcagcccagatcgcctccggcatgcgctatctggccacactcaactttgtacatcgggacctggccacgcggaactgcctagttggggaaaatttcaccatcaaaatcgcagactttggcatgagccggaacctctatgctggggactattaccgtgtgcagggccgggcagtgctgcccatccgctggatggcctgggagtgcatcctcatggggaagttcacgactgcgagtgacgtgtgggcctttggtgtgaccctgtgggaggtgctgatgctctgtagggcccagccctttgggcagctcaccgacgagcaggtcatcgagaacgcgggggagttcttccgggaccagggccggcaggtgtacctgtcccggccgcctgcctgcccgcagggcctatatgagctgatgcttcggtgctggagccgggagtctgagcagcgaccacccttttcccagctgcatcggttcctggcagaggatgcactcaacacggtgtgaatcacacatccagctgcccctccctcagggagcgatccaggggaagccagtgacactaaaacaagaggacacaatggcacctctgcccttcccctcccgacagcccatcacctctaatagaggcagtgagactgcaggtgggctgggcccacccagggagctgatgccccttctccccttcctggacacactctcatgtccccttcctgttcttccttcctagaagcccctgtcgcccacccagctggtcctgtggatgggatcctctccaccctcctctagccatcccttggggaagggtggggagaaatataggatagacactggacatggcccattggagcacctgggccccactggacaacactgattcctggagaggtggctgcgcccccagcttctctctccctgtcacacactggaccccactggctgagaatctgggggtgaggaggacaagaaggagaggaaaatgtttccttgtgcctgctcctgtacttgtcctcagcttgggcttcttcctcctccatcacctgaaacactggacctgggggtagccccgccccagccctcagtcacccccacttcccacttgcagtcttgtagctagaacttctctaagcctatacgtttctgtggagtaaatattgggattggggggaaagagggagcaacggcccatagccttggggttggacatctctagtgtagctgccacattgatttttctataatcacttggggtttgtacatttttggggggagagacacagatttttacactaatatatggacctagcttgaggcaattttaatcccctgcactaggcaggtaataataaaggttgagttttccacaactgtgtgagtgggttccttgggaatttggtaactctgcctcctgcacctccctctgaacccacttcccaacccacttcccatcttccttttttcctgcctcctcattccatttcccatcacctgttttgcccacactttgggaggctgaggtgggtagatcacttgaggccaggagttcgagaccaacctggccaacatagcaaaaccccatctctactaaagatacaaaaattagcagggtgtggtggcatgcgcctgtaatctcagctattcaggaggctgaggcaggagaattgcttagaacccgggaggtgggggttgcagtgagctgagatcacacaactgtgctccagcctgggcaacagagtgagactgtctcaaaaacagaacaacaacaacaacaaaacccataaaatgtataggattataagggaaaccaatggaaacagtttaccaaaatgctaaaaaattatgaaactaatgtgcttctttttcatgtatttaataacaagatctaaaaacaggtgtaataaactgacattttccaaataaataagagagagagaaatgaaaatagagaaaggagaaaaaggggggggggataaaagattcccggggagggggccgcaggttgatcgggttactccacgattttgttgtggtcgcaagggtgggtcccataatggaggagacgagtgattgtaaagcatagagcatgtggccggccgtctttttaaacaacgttcgagaatcgtgggcaaagaagggtggtttaccgtgggggaaaatctttggcgtataaggcacacctgtatactatcggtgggggtggggtaccactacagtgtgtggcagaagagtaatagcgctaacaggagagaattgaaagagggttctgaggggttaaccttgtttcacaattgttggaaggcggctta

SEQ ID NO: 454106 - DNA, 4252 bp, Homo sapiens
cccgagccgccccagccctggctcctctccccggaacaggcccccgacagctgctctcgggagccgcctcccgacacccgagccccgccggcgcctcccgctcccggctcccggctcctggctccctccgcctcccccgcccctcgccccgccgccgaagaggccccgctcccgggtcggacgcctgggtctgccgggaagagcgatgagagagatgctgcccccacccccttaggcccgagggatcaggagctatgggaccagaggccctgtcatctttactgctgctgctcttggtggcaagtggagatgctgacatgaagggacattttgatcctgccaagtgccgctatgccctgggcatgcaggaccggaccatcccagacagtgacatctctgcttccagctcctggtcagattccactgccgcccgccacagcaggttggagagcagtgacggggatggggcctggtgccccgcagggtcggtgtttcccaaggaggaggagtacttgcaggtggatctacaacgactgcacctggtggctctggtgggcacccagggacggcatgccgggggcctgggcaaggagttctcccggagctaccggctgcgttactcccgggatggtcgccgctggatgggctggaaggaccgctggggtcaggaggtgatctcaggcaatgaggaccctgagggagtggtgctgaaggaccttgggccccccatggttgcccgactggttcgcttctacccccgggctgaccgggtcatgagcgtctgtctgcgggtagagctctatggctgcctctggagggatggactcctgtcttacaccgcccctgtggggcagacaatgtatttatctgaggccgtgtacctcaacgactccacctatgacggacataccgtgggcggactgcagtatgggggtctgggccagctggcagatggtgtggtggggctggatgactttaggaagagtcaggagctgcgggtctggccaggctatgactatgtgggatggagcaaccacagcttctccagtggctatgtggagatggagtttgagtttgaccggctgagggccttccaggctatgcaggtccactgtaacaacatgcacacgctgggagcccgtctgcctggcggggtggaatgtcgcttccggcgtggccctgccatggcctgggagggggagcccatgcgccacaacctagggggcaacctgggggaccccagagcccgggctgtctcagtgccccttggcggccgtgtggctcgctttctgcagtgccgcttcctctttgcggggccctggttactcttcagcgaaatctccttcatctctgatgtggtgaacaattcctctccggcactgggaggcaccttcccgccagccccctggtggccgcctggcccacctcccaccaacttcagcagcttggagctggagcccagaggccagcagcccgtggccaaggccgaggggagcccgaccgccatcctcatcggctgcctggtggccatcatcctgctcctgctgctcatcattgccctcatgctctggcggctgcactggcgcaggctcctcagcaaggctgaacggagggtgttggaagaggagctgacggttcacctctctgtccctggggacactatcctcatcaacaaccgcccaggtcctagagagccacccccgtaccaggagccccggcctcgtgggaatccgccccactccgctccctgtgtccccaatggctctgcgttgctgctctccaatccagcctaccgcctccttctggccacttacgcccgtccccctcgaggcccgggcccccccacacccgcctgggccaaacccaccaacacccaggcctacagtggggactatatggagcctgagaagccaggcgccccgcttctgcccccacctccccagaacagcgtcccccattatgccgaggctgacattgttaccctgcagggcgtcaccgggggcaacacctatgctgtgcctgcactgcccccaggggcagtcggggatgggccccccagagtggatttccctcgatctcgactccgcttcaaggagaagcttggcgagggccagtttggggaggtgcacctgtgtgaggtcgacagccctcaagatctggttagtcttgatttcccccttaatgtgcgtaagggacaccctttgctggtagctgtcaagatcttacggccagatgccaccaagaatgccaggaatgatttcctgaaagaggtgaagatcatgtcgaggctcaaggacccaaacatcattcggctgctgggcgtgtgtgtgcaggacgaccccctctgcatgattactgactacatggagaacggcgacctcaaccagttcctcagtgcccaccagctggaggacaaggcagccgagggggcccctggggacgggcaggctgcgcaggggcccaccatcagctacccaatgctgctgcatgtggcagcccagatcgcctccggcatgcgctatctggccacactcaactttgtacatcgggacctggccacgcggaactgcctagttggggaaaatttcaccatcaaaatcgcagactttggcatgagccggaacctctatgctggggactattaccgtgtgcagggccgggcagtgctgcccatccgctggatggcctgggagtgcatcctcatggggaagttcacgactgcgagtgacgtgtgggcctttggtgtgaccctgtgggaggtgctgatgctctgtagggcccagccctttgggcagctcaccgacgagcaggtcatcgagaacgcgggggagttcttccgggaccagggccggcaggtgtacctgtcccggccgcctgcctgcccgcagggcctatatgagctgatgcttcggtgctggagccgggagtctgagcagcgaccacccttttcccagctgcatcggttcctggcagaggatgcactcaacacggtgtgaatcacacatccagctgcccctccctcagggagcgatccaggggaagccagtgacactaaaacaagaggacacaatggcacctctgcccttcccctcccgacagcccatcacctctaatagaggcagtgagactgcaggtgggctgggcccacccagggagctgatgccccttctccccttcctggacacactctcatgtccccttcctgttcttccttcctagaagcccctgtcgcccacccagctggtcctgtggatgggatcctctccaccctcctctagccatcccttggggaagggtggggagaaatataggatagacactggacatggcccattggagcacctgggccccactggacaacactgattcctggagaggtggctgcgcccccagcttctctctccctgtcacacactggaccccactggctgagaatctgggggtgaggaggacaagaaggagaggaaaatgtttccttgtgcctgctcctgtacttgtcctcagcttgggcttcttcctcctccatcacctgaaacactggacctgggggtagccccgccccagccctcagtcacccccacttcccacttgcagtcttgtagctagaacttctctaagcctatacgtttctgtggagtaaatattgggattggggggaaagagggagcaacggcccatagccttggggttggacatctctagtgtagctgccacattgatttttctataatcacttggggtttgtacatttttggggggagagacacagatttttacactaatatatggacctagcttgaggcaattttaatcccctgcactaggcaggtaataataaaggttgagttttccacaaaaaagaaagcaagagaagtcagtgcaacagaagaagcggggggcggcgagaataaagaagactcagtcgctgcagggggagcaccgtcataactaaggtaagcaccacgctgatgtggtaagcacgggcggggccccgatacctgcagactgatggaattacgaatggagacggggacgcctggctgcatacacatcctggcagaccgggacacccatggctacagcgagcgaagacgttgagagaggcgaccagtcctctgcgggggggaggacagtatgggaagacacctgggaccaaagaatgtaggacgcggaggcaaaaaagactaaggggtgcagggaaccacaggaaattgcgccaaaaaaggcacgcaaagggcagagaactatacgg

SEQ ID NO: 454107 - DNA, 3441 bp, Homo sapiens
cccgagccgccccagccctggctcctctccccggaacaggcccccgacagctgctctcgggagccgcctcccgacacccgagccccgccggcgcctcccgctcccggctcccggctcctggctccctccgcctcccccgcccctcgccccgccgccgaagaggccccgctcccgggtcggacgcctgggtctgccgggaagagcgatgagagagatgctgcccccacccccttaggcccgagggatcaggagctatgggaccagaggccctgtcatctttactgctgctgctcttggtggcaagtggagatgctgacatgaagggacattttgatcctgccaagtgccgctatgccctgggcatgcaggaccggaccatcccagacagtgacatctctgcttccagctcctggtcagattccactgccgcccgccacagcaggttggagagcagtgacggggatggggcctggtgccccgcagggtcggtgtttcccaaggaggaggagtacttgcaggtggatctacaacgactgcacctggtggctctggtgggcacccagggacggcatgccgggggcctgggcaaggagttctcccggagctaccggctgcgttactcccgggatggtcgccgctggatgggctggaaggaccgctggggtcaggaggtgatctcaggcaatgaggaccctgagggagtggtgctgaaggaccttgggccccccatggttgcccgactggttcgcttctacccccgggctgaccgggtcatgagcgtctgtctgcgggtagagctctatggctgcctctggagggatggactcctgtcttacaccgcccctgtggggcagacaatgtatttatctgaggccgtgtacctcaacgactccacctatgacggacataccgtgggcggactgcagtatgggggtctgggccagctggcagatggtgtggtggggctggatgactttaggaagagtcaggagctgcgggtctggccaggctatgactatgtgggatggagcaaccacagcttctccagtggctatgtggagatggagtttgagtttgaccggctgagggccttccaggctatgcaggtccactgtaacaacatgcacacgctgggagcccgtctgcctggcggggtggaatgtcgcttccggcgtggccctgccatggcctgggagggggagcccatgcgccacaacctagggggcaacctgggggaccccagagcccgggctgtctcagtgccccttggcggccgtgtggctcgctttctgcagtgccgcttcctctttgcggggccctggttactcttcagcgaaatctccttcatctctgatgtggtgaacaattcctctccggcactgggaggcaccttcccgccagccccctggtggccgcctggcccacctcccaccaacttcagcagcttggagctggagcccagaggccagcagcccgtggccaaggccgaggggagcccgaccgccatcctcatcggctgcctggtggccatcatcctgctcctgctgctcatcattgccctcatgctctggcggctgcactggcgcaggctcctcagcaaggctgaacggagggtgttggaagaggagctgacggttcacctctctgtccctggggacactatcctcatcaacaaccgcccaggtcctagagagccacccccgtaccaggagccccggcctcgtgggaatccgccccactccgctccctgtgtccccaatggctctgcgttgctgctctccaatccagcctaccgcctccttctggccacttacgcccgtccccctcgaggcccgggcccccccacacccgcctgggccaaacccaccaacacccaggcctacagtggggactatatggagcctgagaagccaggcgccccgcttctgcccccacctccccagaacagcgtcccccattatgccgaggctgacattgttaccctgcagggcgtcaccgggggcaacacctatgctgtgcctgcactgcccccaggggcagtcggggatgggccccccagagtggatttccctcgatctcgactccgcttcaaggagaagcttggcgagggccagtttggggaggtgcacctgtgtgaggtcgacagccctcaagatctggttagtcttgatttcccccttaatgtgcgtaagggacaccctttgctggtagctgtcaagatcttacggccagatgccaccaagaatgccaggaatgatttcctgaaagaggtgaagatcatgtcgaggctcaaggacccaaacatcattcggctgctgggcgtgtgtgtgcaggacgaccccctctgcatgattactgactacatggagaacggcgacctcaaccagttcctcagtgcccaccagctggaggacaaggcagccgagggggcccctggggacgggcaggctgcgcaggggcccaccatcagctacccaatgctgctgcatgtggcagcccagatcgcctccggcatgcgctatctggccacactcaactttgtacatcgggacctggccacgcggaactgcctagttggggaaaatttcaccatcaaaatcgcagactttggcatgagccggaacctctatgctggggactattaccgtgtgcagggccgggcagtgctgcccatccgctggatggcctgggagtgcatcctcatggggaagttcacgactgcgagtgacgtgtgggcctttggtgtgaccctgtgggaggtgctgatgctctgtagggcccagccctttgggcagctcaccgacgagcaggtcatcgagaacgcgggggagttcttccgggaccagggccggcaggtgtacctgtcccggccgcctgcctgcccgcagggcctatatgagctgatgcttcggtgctggagccgggagtctgagcagcgaccacccttttcccagctgcatcggttcctggcagaggatgcactcaacacggtgtgaatcacacatccagctgcccctccctcagggagcgatccaggggaagccagtgacactaaaacaagaggacacaatggcacctctgcccttcccctcccgacagcccatcacctctaatagaggcagtgagactgcaggtgggctgggcccacccagggagctgatgccccttctccccttcctggacacactctcatgtccccttcctgttcttccttcctagaagcccctgtcgcccacccagctggtcctgtggatgggatcctctccaccctcctctagccatcccttggggaagggtggggagaaatataggatagacactggacatggcccattggagcacctgggccccactggacaacactgattcctggagaggtggctgcgcccccagcttctctctccctgtcgggctagtcggtaagatcctgtagatcacccg

SEQ ID NO: 454108 - DNA, 3433 bp, Homo sapiens
cccgagccgccccagccctggctcctctccccggaacaggcccccgacagctgctctcgggagccgcctcccgacacccgagccccgccggcgcctcccgctcccggctcccggctcctggctccctccgcctcccccgcccctcgccccgccgccgaagaggccccgctcccgggtcggacgcctgggtctgccgggaagagcgatgagagagatgctgcccccacccccttaggcccgagggatcaggagctatgggaccagaggccctgtcatctttactgctgctgctcttggtggcaagtggagatgctgacatgaagggacattttgatcctgccaagtgccgctatgccctgggcatgcaggaccggaccatcccagacagtgacatctctgcttccagctcctggtcagattccactgccgcccgccacagcaggttggagagcagtgacggggatggggcctggtgccccgcagggtcggtgtttcccaaggaggaggagtacttgcaggtggatctacaacgactgcacctggtggctctggtgggcacccagggacggcatgccgggggcctgggcaaggagttctcccggagctaccggctgcgttactcccgggatggtcgccgctggatgggctggaaggaccgctggggtcaggaggtgatctcaggcaatgaggaccctgagggagtggtgctgaaggaccttgggccccccatggttgcccgactggttcgcttctacccccgggctgaccgggtcatgagcgtctgtctgcgggtagagctctatggctgcctctggagggatggactcctgtcttacaccgcccctgtggggcagacaatgtatttatctgaggccgtgtacctcaacgactccacctatgacggacataccgtgggcggactgcagtatgggggtctgggccagctggcagatggtgtggtggggctggatgactttaggaagagtcaggagctgcgggtctggccaggctatgactatgtgggatggagcaaccacagcttctccagtggctatgtggagatggagtttgagtttgaccggctgagggccttccaggctatgcaggtccactgtaacaacatgcacacgctgggagcccgtctgcctggcggggtggaatgtcgcttccggcgtggccctgccatggcctgggagggggagcccatgcgccacaacctagggggcaacctgggggaccccagagcccgggctgtctcagtgccccttggcggccgtgtggctcgctttctgcagtgccgcttcctctttgcggggccctggttactcttcagcgaaatctccttcatctctgatgtggtgaacaattcctctccggcactgggaggcaccttcccgccagccccctggtggccgcctggcccacctcccaccaacttcagcagcttggagctggagcccagaggccagcagcccgtggccaaggccgaggggagcccgaccgccatcctcatcggctgcctggtggccatcatcctgctcctgctgctcatcattgccctcatgctctggcggctgcactggcgcaggctcctcagcaaggctgaacggagggtgttggaagaggagctgacggttcacctctctgtccctggggacactatcctcatcaacaaccgcccaggtcctagagagccacccccgtaccaggagccccggcctcgtgggaatccgccccactccgctccctgtgtccccaatggctctgcgttgctgctctccaatccagcctaccgcctccttctggccacttacgcccgtccccctcgaggcccgggcccccccacacccgcctgggccaaacccaccaacacccaggcctacagtggggactatatggagcctgagaagccaggcgccccgcttctgcccccacctccccagaacagcgtcccccattatgccgaggctgacattgttaccctgcagggcgtcaccgggggcaacacctatgctgtgcctgcactgcccccaggggcagtcggggatgggccccccagagtggatttccctcgatctcgactccgcttcaaggagaagcttggcgagggccagtttggggaggtgcacctgtgtgaggtcgacagccctcaagatctggttagtcttgatttcccccttaatgtgcgtaagggacaccctttgctggtagctgtcaagatcttacggccagatgccaccaagaatgccaggaatgatttcctgaaagaggtgaagatcatgtcgaggctcaaggacccaaacatcattcggctgctgggcgtgtgtgtgcaggacgaccccctctgcatgattactgactacatggagaacggcgacctcaaccagttcctcagtgcccaccagctggaggacaaggcagccgagggggcccctggggacgggcaggctgcgcaggggcccaccatcagctacccaatgctgctgcatgtggcagcccagatcgcctccggcatgcgctatctggccacactcaactttgtacatcgggacctggccacgcggaactgcctagttggggaaaatttcaccatcaaaatcgcagactttggcatgagccggaacctctatgctggggactattaccgtgtgcagggccgggcagtgctgcccatccgctggatggcctgggagtgcatcctcatggggaagttcacgactgcgagtgacgtgtgggcctttggtgtgaccctgtgggaggtgctgatgctctgtagggcccagccctttgggcagctcaccgacgagcaggtcatcgagaacgcgggggagttcttccgggaccagggccggcaggtgtacctgtcccggccgcctgcctgcccgcagggcctatatgagctgatgcttcggtgctggagccgggagtctgagcagcgaccacccttttcccagctgcatcggttcctggcagaggatgcactcaacacggtgtgaatcacacatccagctgcccctccctcagggagcgatccaggggaagccagtgacactaaaacaagaggacacaatggcacctctgcccttcccctcccgacagcccatcacctctaatagaggcagtgagactgcaggtgggctgggcccacccagggagctgatgccccttctccccttcctggacacattctctaagcctatacgtttctgtggagtaaatattgggattggggggaaagagggagcaacggcccatagccttggggttggacatctctagtgtagctgccacattgatttttctataatcacttggggtttgtacatttttggggggagagacacagatttttacactaatatatggacctagcttgaggcaattttaatcccctgcactaggcaggtaataataaaggttgagttttccacaa

SEQ ID NO: 454109 - DNA, 1386 bp, Homo sapiens
cccgagccgccccagccctggctcctctccccggaacaggcccccgacagctgctctcgggagccgcctcccgacacccgagccccgccggcgcctcccgctcccggctcccggctcctggctccctccgcctcccccgcccctcgccccgccgccgaagaggccccgctcccgggtcggacgcctgggtctgccgggaagagcgatgagagagatgctgcccccacccccttaggcccgagggatcaggagctatgggaccagaggccctgtcatctttactgctgctgctcttggtggcaagtggagatgctgacatgaagggacattttgatcctgccaagtgccgctatgccctgggcatgcaggaccggaccatcccagacagtgacatctctgcttccagctcctggtcagattccactgccgcccgccacagcaggttggagagcagtgacggggatggggcctggtgccccgcagggtcggtgtttcccaaggaggaggagtacttgcaggtggatctacaacgactgcacctggtggctctggtgggcacccagggacggcatgccgggggcctgggcaaggagttctcccggagctaccggctgcgttactcccgggatggtcgccgctggatgggctggaaggaccgctggggtcaggaggtgatctcaggcaatgaggaccctgagggagtggtgctgaaggaccttgggccccccatggttgcccgactggttcgcttctacccccgggctgaccgggtcatgagcgtctgtctgcgggtagagctctatggctgcctctggagggatggactcctgtcttacaccgcccctgtggggcagacaatgtatttatctgaggccgtgtacctcaacgactccacctatgacggacataccgtgggcggactgcagtatgggggtctgggccagctggcagatggtgtggtggggctggatgactttaggaagagtcaggagctgcgggtctggccaggctatgactatgtgggatggagcaaccacagcttctccactcctccatcacctgaaacactggacctgggggtagccccgccccagccctcagtcacccccacttcccacttgcagtcttgtagctagaacttctctaagcctatacgtttctgtggagtaaatattgggattggggggaaagagggagcaacggcccatagccttggggttggacatctctagtgtagctgccacattgatttttctataatcacttggggtttgtacatttttggggggagagacacagatttttacactaatatatggacctagcttgaggcaattttaatcccctgcactaggcaggtaataataaaggttgagttttccacaa

SEQ ID NO: 454110 - DNA, 3119 bp, Homo sapiens
gcgcgcccgccagccaggctctccgcgcccgccgcccgcgccgcgctggcccgggctctcccgcccgcgcttcatggctgcacacgagtgggactggttccaacgcgaggagctcatcgggcagattagcgacatccgagtgcagaacctgcaagttgagagggaaaatgtgcagaagaggacctttacacgatggataaatctacatctagaaaagtgcaacccacctctagaagttaaagatttattcgtcgatatacaagatggcaaaatcctaatggctttgttagaagtcctgtctgggcggaatctgctgcacgaatacaaatcctcgtcgcatcgtatttttcggttgaacaacatagcgaaagcacttaagtttttggaagatagcaatgtaaaactggttagcattgatgcagcagaaatagcagatggcaacccttctttggttcttgggctgatatggaacataatcctcttcttccagattaaggagctcacaggcaacctcagcagaaactctccatcttccagcttgtcccctggctcagggggcacagactcagactcatccttcccacccacacccactgcagagaggagcgtggcaatatcggtgaaagaccagaggaaggctatcaaggccctgttggcgtgggtgcagaggaaaacgagaaagtatggcgtggcggtgcaggactttgcgggcagttggaggagtgggctggctttcctggcggtgatcaaggccattgaccccagcctggtggacatgaaacaggccctggaaaattccacacgagaaaatctagagaaggctttcagcatcgcacaggatgccctgcacatccccaggctcctggagccagaagacatcatggttgacacaccagacgagcagtctatcatgacttacgtggcacagtttctagaacgttttccggagttggaagccgaagatattttcgattcagataaagaagttcctatcgaatccacttttgttcgcatcaaagaaactccttctgaacaggagagcaaagtcttcgttctgactgaaaatggggagcgtacctacactgttaaccatgaaaccagccacccaccaccctccaaagtctttgtctgtgacaagcccgagagcatgaaggaattccgcctggatggtgtttccagccatgcgctgtcagacagctccaccgagttcatgcaccagattattgaccaggtcctgcaagggggcccaggtaagaccagcgacatcagtgagccatctccagaatcctccattttatcatccagaaaggagaacgggaggtccaactctttgccgatcaagaaaacagttcactttgaggctgacacctacaaggatcctttctgcagtaagaacctgtccctttgctttgaagggagcccaagagtggcaaaggaatcattgaggcaggatggacatgtcttggcagttgaggttgctgaggaaaaggaacagaaacaggaatcctcgaagattccagaatcctcctctgacaaggtcgctggtgacatttttttggtggagggcacaaacaataattctcagtcttcttcctgtaatggtgctttagagagtacagcccgccacgatgaagaaagtcactctctttcacccccaggagaaaatactgtgatggccgattccttccagatcaaggttaacctgatgactgtagaagctttagaggagggagactattttgaagccatcccattaaaagcctcaaaatttaacagcgacctaatagattttgcttctaccagccaggctttcaacaaagttccttcacctcatgagacaaaacctgacgaggatgctgaggcttttgagaatcatgctgaaaaactaggtaaaaggagtattaaatctgctcacaaaaagaaggattcgccagagcctcaagttaagatggacaaacatgaacctcatcaggactccggagaagaagctgaaggctgtccttcagccccagaagagacaccagtggataaaaagccagaggtgcatgaaaaggccaagagaaagtccacccgtcctcattatgaggaagagggagaagacgatgacctccagggtgtgggcgaggaattatcttccagccccccaagcagctgtgtcagcttggagacccttgggagtcacagcgaagaaggcctggatttcaagccctccccacccctctcaaaggtttccgtcattccccacgacctcttctatttcccacactatgaggttcccctggctgcagttttggaggcttatgtagaagacccggaggatctaaaaaatgaagaaatggatctcgaagagccagagggctatatgccagacctggactccagggaggaggaggccgatggctctcagagcagctccagttcctcggtgccaggagagagcctccccagtgccagcgaccaggtgctgtatctcagcaggggtggtgtgggtaccacaccagcctcagaacccgctccactggccccccatgaggaccaccagcaaagggagaccaaagagaatgaccccatggacagccatcagtcccaggaatccccaaacctggaaaacatagcaaaccccctagaagaaaatgtaacgaaagaatcaatcagtagtaaaaaaaaggaaaaaaggaaacatgtggaccacgtagaaagttcactatttgtagcaccaggaagtgttcaatcctcagatgacctagaagaagacagtagcgactacagcattccttccaggactagtcacagtgactccagcatttaccttcgacgacatactcataggtcttcggaatcggatcattttagctatgttcagttgaggaacgcagcagatctggatgacagaagaaaccgaatattaaccaggaaggccaacagctcaggagaagccatgtcactggggagccacagcccgcagagtgactccctgacacagcttgtccagcagccggatatgatgtattttattctcttcctgtggctcctggtgtactgcttgctgctcttcccacaactggatgttagcaggctctgatacgtgtgtctggataataaaaaagacaggaccctga

SEQ ID NO: 454111 - DNA, 2022 bp, Homo sapiens
agcgaaggaatttcgcagagctgaagatcaagcgcctgagaaagaagtttgcccaaaagatgcttcgaaaggcaaggaggaagcttatctatgaaaaagcaaagcactatcacaaggaatatattattgaccaggtcctgcaagggggcccaggtaagaccagcgacatcagtgagccatctccagaatcctccattttatcatccagaaaggagaacgggaggtccaactctttgccgatcaagaaaacagttcactttgaggctgacacctacaaggatcctttctgcagtaagaacctgtccctttgctttgaagggagcccaagagtggcaaaggaatcattgaggcaggatggacatgtcttggcagttgaggttgctgaggaaaaggaacagaaacaggaatcctcgaagattccagaatcctcctctgacaaggtcgctggtgacatttttttggtggagggcacaaacaataattctcagtcttcttcctgtaatggtgctttagagagtacagcccgccacgatgaagaaagtcactctctttcacccccaggagaaaatactgtgatggccgattccttccagatcaaggttaacctgatgactgtagaagctttagaggagggagactattttgaagccatcccattaaaagcctcaaaatttaacagcgacctaatagattttgcttctaccagccaggctttcaacaaagttccttcacctcatgagacaaaacctgacgaggatgctgaggcttttgagaatcatgctgaaaaactaggtaaaaggagtattaaatctgctcacaaaaagaaggattcgccagagcctcaagttaagatggacaaacatgaacctcatcaggactccggagaagaagctgaaggctgtccttcagccccagaagagacaccagtggataaaaagccagaggtgcatgaaaaggccaagagaaagtccacccgtcctcattatgaggaagagggagaagacgatgacctccagggtgtgggcgaggaattatcttccagccccccaagcagctgtgtcagcttggagacccttgggagtcacagcgaagaaggcctggatttcaagccctccccacccctctcaaaggtttccgtcattccccacgacctcttctatttcccacactatgaggttcccctggctgcagttttggaggcttatgtagaagacccggaggatctaaaaaatgaagaaatggatctcgaagagccagagggctatatgccagacctggactccagggaggaggaggccgatggctctcagagcagctccagttcctcggtgccaggagagagcctccccagtgccagcgaccaggtgctgtatctcagcaggggtggtgtgggtaccacaccagcctcagaacccgctccactggccccccatgaggaccaccagcaaagggagaccaaagagaatgaccccatggacagccatcagtcccaggaatccccaaacctggaaaacatagcaaaccccctagaagaaaatgtaacgaaagaatcaatcagtagtaaaaaaaaggaaaaaaggaaacatgtggaccacgtagaaagttcactatttgtagcaccaggaagtgttcaatcctcagatgacctagaagaagacagtagcgactacagcattccttccaggactagtcacagtgactccagcatttaccttcgacgacatactcataggtcttcggaatcggatcattttagctatgttcagttgaggaacgcagcagatctggatgacagaagaaaccgaatattaaccaggaaggccaacagctcaggagaagccatgtcactggggagccacagcccgcagagtgactccctgacacagcttgtccagcagccggatatgatgtattttattctcttcctgtggctcctggtgtactgcttgctgctcttcccacaactggatgttagcaggctctgatacgtgtgtctggataataaaaaagacaggaccctga

SEQ ID NO: 454112 - DNA, 400 bp, Homo sapiens
cggtattgagaaatgcccggcatgctcggctttgtgtgtttaaaatcgttttatcttctgtttcagagatttcatctttactaattgggttgcgggggcttttgtttataaatttcactgtaggatcattttagctatgttcagttgaggaacgcagcagatctggatgacagaagaaaccgaatattaaccaggaaggccaacagctcaggagaagccatgtcactggggagccacagcccgcagagtgactccctgacacagcttgtccagcagccggatatgatgtattttattctcttcctgtggctcctggtgtactgcttgctgctcttcccacaactggatgttagcaggctctgatacgtgtgtctggataataaaaaagacaggaccctga

SEQ ID NO: 454113 - DNA, 12715 bp, Homo sapiens
  misc_feature (7934)..(7934): n is a, c, g, or t
  misc_feature (7956)..(7956): n is a, c, g, or t
  misc_feature (8012)..(8012): n is a, c, g, or t
  misc_feature (9393)..(9393): n is a, c, g, or t
gcgcgcccgccagccaggctctccgcgcccgccgcccgcgccgcgctggcccgggctctcccgcccgcgcttcatggctgcacacgagtgggactggttccaacgcgaggagctcatcgggcagattagcgacatccgagtgcagaacctgcaagttgagagggaaaatgtgcagaagaggacctttacacgatggataaatctacatctagaaaagtgcaacccacctctagaagttaaagatttattcgtcgatatacaagatggcaaaatcctaatggctttgttagaagtcctgtctgggcggaatctgctgcacgaatacaaatcctcgtcgcatcgtatttttcggttgaacaacatagcgaaagcacttaagtttttggaagatagcaatgtaaaactggttagcattgatgcagcagaaatagcagatggcaacccttctttggttcttgggctgatatggaacataatcctcttcttccagattaaggagctcacaggcaacctcagcagaaactctccatcttccagcttgtcccctggctcagggggcacagactcagactcatccttcccacccacacccactgcagagaggagcgtggcaatatcggtgaaagaccagaggaaggctatcaaggccctgttggcgtgggtgcagaggaaaacgagaaagtatggcgtggcggtgcaggactttgcgggcagttggaggagtgggctggctttcctggcggtgatcaaggccattgaccccagcctggtggacatgaaacaggccctggaaaattccacacgagaaaatctagagaaggctttcagcatcgcacaggatgccctgcacatccccaggctcctggagccagaagacatcatggttgacacaccagacgagcagtctatcatgacttacgtggcacagtttctagaacgttttccggagttggaagccgaagatattttcgattcagataaagaagttcctatcgaatccacttttgttcgcatcaaagaaactccttctgaacaggagagcaaagtcttcgttctgactgaaaatggggagcgtacctacactgttaaccatgaaaccagccacccaccaccctccaaagtctttgtctgtgacaagcccgagagcatgaaggaattccgcctggatggtgtttccagccatgcgctgtcagacagctccaccgagttcatgcaccagattattgaccaggtcctgcaagggggcccaggtaagaccagcgacatcagtgagccatctccagaatcctccattttatcatccagaaaggagaacgggaggtccaactctttgccgatcaagaaaacagttcactttgaggctgacacctacaaggatcctttctgcagtaagaacctgtccctttgctttgaagggagcccaagagtggcaaaggaatcattgaggcaggatggacatgtcttggcagttgaggttgctgaggaaaaggaacagaaacaggaatcctcgaagattccagaatcctcctctgacaaggtcgctggtgacatttttttggtggagggcacaaacaataattctcagtcttcttcctgtaatggtgctttagagagtacagcccgccacgatgaagaaagtcactctctttcacccccaggagaaaatactgtgatggccgattccttccagatcaaggttaacctgatgactgtagaagctttagaggagggagactattttgaagccatcccattaaaagcctcaaaatttaacagcgacctaatagattttgcttctaccagccaggctttcaacaaagttccttcacctcatgagacaaaacctgacgaggatgctgaggcttttgagaatcatgctgaaaaactaggtaaaaggagtattaaatctgctcacaaaaagaaggattcgccagagcctcaagttaagatggacaaacatgaacctcatcaggactccggagaagaagctgaaggctgtccttcagccccagaagagacaccagtggataaaaagccagaggtgcatgaaaaggccaagagaaagtccacccgtcctcattatgaggaagagggagaagacgatgacctccagggtgtgggcgaggaattatcttccagccccccaagcagctgtgtcagcttggagacccttgggagtcacagcgaagaaggcctggatttcaagccctccccacccctctcaaaggtttccgtcattccccacgacctcttctatttcccacactatgaggttcccctggctgcagttttggaggcttatgtagaagacccggaggatctaaaaaatgaagaaatggatctcgaagagccagagggctatatgccagacctggactccagggaggaggaggccgatggctctcagagcagctccagttcctcggtgccaggagagagcctccccagtgccagcgaccaggtgctgtatctcagcaggggtggtgtgggtaccacaccagcctcagaacccgctccactggccccccatgaggaccaccagcaaagggagaccaaagagaatgaccccatggacagccatcagtcccaggaatccccaaacctggaaaacatagcaaaccccctagaagaaaatgtaacgaaagaatcaatcagtagtaaaaaaaaggaaaaaaggaaacatgtggaccacgtagaaagttcactatttgtagcaccaggaagtgttcaatcctcagatgacctagaagaagacagtagcgactacagcattccttccaggactagtcacagtgactccagcatttaccttcgacgacatactcataggtcttcggaatcggatcattttagctatgttcagttgaggaacgcagcagatctggatgacagaagaaaccgaatattaaccaggaaggccaacagctcaggagaagccatgtcactggggagccacagcccgcagagtgactccctgacacagcttgtccagcagccggatatgatgtattttattctcttcctgtggctcctggtgtactgcttgctgctcttcccacaactggatgttagcaggctctgatacgtgtgtctggataataaaaaagacaggaccctgaaaaggggcggggttacttcattttattttgggttctgggtggggcacttctacagacagttgaggacctccgaggaaacttagaccccctttctcgctattgtggttttttttttttttcaggtttccttttttttctggacaacctgagcatgcttttttctttggctgtgtactcaaaactcaggcatgcagctggatccgtaggtggggttttgtccttgtgtgccttgctgggttggatagggagcattgttagtgatcattagcccgcctggatcttagcacaccccacattgcaggttcacacgctggatgaacttgagtttcttacctctcagatgaagggctgcttaatgagaaagagggtgggcaccccaggccaagccccagctggggagagagctgccacgttttcctccaagcgtgggtgtttgagagaaggtgctggggtccatgcacctgtcgcagtccggtaactggttgcattcactaggggaaatccgagcagccagctctgtgtaagcacatccaggaatggcagaatccagggaggaaggtgaaagctgtgttgagagccactgtgtgctctttttcaccctgttttttttgttgtttttttgttttgttttttgtttgaggggagataacacttgaaattcagttttccattgattggattgagatagaaccatgattttcaaaccagatcgccagggcccagcagggccatataaaagccatgaggagtggctgggctggaatcagctcccagcagtgctggagctgggtggtggggtagcttcctgcccactaaagctttggtgcacacctccctcagaatgcatgtcttggaacgggcattctttgtggtcacttgtaatgggtttcttgaagaggctttctggacagcactccgggagcaggccagcacaggaggtttgtgaaagaagagaggcatctctagcacccctgcccccagtcttcctcagccccaggctccctctgctctctcctccctgccaagactcaggtccgtggtgagtctctgcattggttcctcctccccttgctctccccttcagaaagcatgtaccaggcaacccttataaaatcacaaatgagtcaggaggggactcagtgagcatcttgtctagctggacccagagagacagagcagcttgaccaagatcatatagccgaccaggggcagacttgcagtgagcacacaggcacctgatgccctgtccagagctgtcaccccttgtaggaaacttccactgggcacaccaatgtcctgagaaaaagataaaatgactagattaaaatgtccacattcaagcaaaaccaaaaagtttagaccaactatcgacatttgttttgttcttgtatttttcccatgaggaattcttactcaccttcaagctcatccccaattccttctgaaatacccttgacagctgcaacagcttgtcatttgacataccagcgtcgctcttactccaggaatcacgtttctttctttgctagccaaggacttgctcatttcaagcagtgggtttcaagtttacagaattccagcatggccagaagaatttacatagcacatctgagtcgatgacagccaaaatctggcctctaaaccagtctgattatagtctgtctcccctcctgaaagaatttcagccttccaaccagaaagctgctgggagcttggagtgattccatctggaaggccaagagccccatggaaaatgagctaattaatgagctccctggcatcaatgaaagctcaaaggtacagataataaagattatgtgatagtttataactctgggcaccatgcagtccttgcctaaattagatgctcgaagagcctgggaagagccaacccaaatgtgaatcatttcattttatgggtctagaccttgttcagaaaaacctctgcaagatacttctctcacctattacaacttgtaatattgtttaaaacatctactggcaagatgcctgaaagtcatttggttcaggttggcagtcaactgatattttgcaaaggaaaaaaaaatctcatttgagtataggcttctatggaagaagctggatatagaaaatggatgtggaagtctgcaggacaaaccaccccattgcttgtaaattttttttaaattaaaagaaatacaataaggcttttaacaagaactagcagtcccctaagtctcgctgcttagaagtaaccactttcaactctcttatgtttgcatttctacataacgtgcttacactttattttttaatttagaaacatctactggcttgctgtcacagtagaggaggatttcactcttaccataccgtgctttggttttccagtatagctagatcacatcatttagtacatttctattaggtgttgacattacctggagcacttaaggattgttgactcccaagcccagcagtgtgttatggttacatgtcctttctcctccaaatgtccccattaatttgctattctctctctttactttttttttttttttggtgtggcacattctttaataacttcctgaggaagagaacatgggaagtaaatatggttgtaaatattttgagatttttgcatgacttaagatgtctgtattctgcccttaacagaaatgtggctgagcatagaatgacaggtggaaaataataccctcccctagcccctcccaagcgtgctggttgagatttctgatgccattctgattcccgtacctttatatgtgacttaggtttttttatccacccttcctggaaacatttaagatctctttattcttggtgttctgaactgtcatgatggtgttgtatcccgggtgttaaaccttgtgctgggccttcatgggaaatttcttaaattttcttgtgattatttacattctttctttctggaccacctattatttcaatgttggaccctcccctacacccaggctgatgctctaatattttttatcttttctatttttcgtctatgtttctgatctgctttcaggaagaattattcatttttatcttcccaatctgaatgttttattgaatttttattttccaagttaataaaacctttggttattatcctgtctttgttttacagtgtcctgctcttgatgcgtggatgcagattttgtctctctgtggacgttaatgattgtggtctgaggggaagtcttttctgctccctgtgttgccctcattttctctgagttctctttattttggtggtctcagtctctatctttcacgttgtgaatttttctcaaatatatggtgatcctatggatctgttcatgttttaagagtgaggcatccaaaagctgattggaagttgtgtgtgccaactggtgagcttttccactagggtcaccaggtgggcacctggactcatcattggagaacactgcctgtcagtatttgcacgtgttttctctggggctcattctgtttcttgagagatattcccactactctccttcctgggaaacgggcatacacagggcttttagcctatgctgagtactcatgtggtttcaaaaatggtgtcccatctgggcagaagtccccatgagcacttggcttgactggcaaaggacaccttttgccccttcctccagacatacccagctctgagcttggacaatgctcgaggaacaatgaaaaggctagattttaactcctaattgccctctttagccaagtgcctctgtgcaatgcacaactgtaggaccatatccagagaccctggtctatactcagtgtgcccgagtcctgaccgctgagcaggcagcctcatcacccgtgagtatttagactttcattaagttgcttcaacctttgctgtgcctggtgtccctgagttggagctgctctgatttctccatggagtaggagcacagtggtcatctggctgcatgggaaggacaggggacctcagagccaataaatgccctggtcttcagccccatgtctcaccccatccctcctattccaatccccaagcctctcctggaggccacagggcatctctgctgaccactctgtggcctcccctctgcaggcatgtggttttaggatccccctccctgctcacttttccatcagttccattcctgcataaataggttgctagctcttgcttactgttctcttctgtattctgtgttcatggttgtattaatataactttcattcctctgctcctattttcatggggtttcatgagggaagaaacaggctcatgtgttcagtataccatcttgatccataaaccccatttgagttatctcacaggttgcttagggggcttgctgctctgactggtttgtgaacgtgccctgagtccagctgggactgcagcaacatccatcctgttgagctgtggtctgctaagtgattttgtgtaatgctgtgccaagtgcaggagagggatacatagcatggctaagctctgcttgaatgccatgattagttattaccttccttccttccccctggttttgctgcctattgtcagtaaatgatcttagatctcctgcctccccaaagatatagtctatgtggtggtctgggttctaggttttctttaccacccttgcttcacttaagaaacagaaaactggctaggcacagtagtggctcacacctataatcccagccctttgggaggccaaggcaggaggatcgcttgaggccaggaattcaagaccagcctgcacaacatagcaagactccatctctacaaaaagttaaatttaaattagtggtggcatncacttatagtcccagctactcnggaggatgaggcaggagaattgtttgagcccatgactttgaggttactgtgagctntgatcctgctattttactccacctgagtgacagagcgagacgctgtctcaaaaataaagaaacaagtagtccacacaggtgtttgccagcaaacaaacagcgcggattctctgttgaacgtggccaacattgcctcgtcgaagtttgtatcttgccatagttgatgatcaggtggtcggggcttcctggtcagacctgacctttgtggggagatgttctcccaccaaggctcagaagcaggacactcttgctgcccctcgggcagccacccagaacatgggcgtctccatttctgaggttcagcatagttccccccaccctcttcccatgcagtgcatgcctgctctttatcaggatggaacagagggaaggcagaggcactgggggcagcctgtgttgttgatctctgtaagtcacagactgttcgaaaacctcaggaattatgtaagcgttcagtgcctcatttaagagatgaaaaactgaagattagaaagaggaaacgactagtcgccctgctagttgatgacctccagatagccatcttcattcccagttaagtttactacaaaaccacagcctcagctgctgaagctaacctccctacccaccatcgctagggactcagaacaccatggagctcatctctccaacaaaagtcagaattagcaagtacagatgtgtcttacgaaaatgtcagaatccatcatggctgctttggtgaggagctgttctccttccgtggtcatgccattggaaggcagttgtatgacaagaatgctttcacatgagctccgattttcttaactctccagaaggacttcagaagcctctggagttttgagacacggcctctctctcccttctgcttggagacaccttcctgggggtctccactgcattccccgccggtattcctctgtggagccttgcgccctcaggtcccagaaatgggctgtgtgggagcttccagtcagcctggtatctcgggaccttctcagccaggaaatgagactgcacaaagccctgtgaggcccagctgtgttatttctccttccccgacattgcataatcactgctgacacagcatttggggaagatttaacgtcttgggccagcagctgccatctggaaccatcaccacatagcaggttgttctgtcccatccaactgatgagggggctgccctaatgacaaggtccaggacctgggttgggtggtggaaggctgggagctggagtgggcattattgtgcttctgtgctgaaaattgctatggctcttttcccctaacagccagcgtgggagaaccaaacatgagacacaagcatccccttgagctccacagatcttgcgccttgctctcatcaggcatttccttgganaacagcagtcagcagctcatggaagtgagcccggtgcacagactttgcatggactttgcacaggttccatttccatcgtgtgcagacacctgtatctttgggctccacgtgagcacctgccctcttcactctgattttttttttaagagacagcatcttactctgtcaccgaggctggagtacagtggtgtgatcacagctcactgcagcctgaaactcctgggctcaggcaatcctcctgcctcagcctcccgagtggctggtagtacaggtgcatgccaccacgcccacctaatttttttatcttttatagatacaggtctcactgttgctcaggctggtctcgaactcctggcctcaagtgatcctcctgccttggcctaccaaaatgctgggattataggcatgaaccactgtgcctggccttcactctgatttttcttaagagtcctacaggaccttcaggtcttgtcacttctctaccattgtgtgtgagacagggcatggggtgagcttggtcaggtgtgggtcaaaagcctggagactcagagctgctggttccccaagagcccacaaaagttatcagagtttctgagctgagtgttctgcagttgccagaccccacaatgctgggaatactggcttctttgtgtttagaacttgttctgagaaccttgatgagaacacatcaagcaagcagttcctcccagccagggctggagcaacatgccaaaaaacattcttgtctatgggaaaaagacaaccagtattttgtactgtttgaccaagttgtttttaaatatacacatgcctcaacaatccacggcctcaatcgcactgctaatttgtttaaatccctgacactcagatgtcaagaatagcttcatctagcagtgttctctttaaaggaacccttttttttgttttcattttaatcactgccttcttctctgggaggtattgtgggctagagaaagaagtcaggtttgggagtcagccagatttagattggagtcccagctctgtcaccagatctctgggtgatcttggcaaactaacttctgagcttctgtgcattataggcattcagcacatatttgttggatgaaaaatacttttcttgaaagtttatgaagttgtaggatgcccagcagcccccttttctctatttccttcctcttgaagcaagcgttgactatacctctttccctaacccttagtgtaccatagcttcttccaacctctctccaatccattacttttttctgagctaccctgtctcaaatctaactcaggcctttttgcaagaggaagtttaagccattgtttactcattaactcacttgacccttagaacaatcgtgggaggtgtttatttcggaaaggaagctaaagcacaggacagaaaaataaggtcatagcgtgaactagtaagtagcagaactgggaacataggactgttattttcaaacactctaaacttcactgcagttgcaaatttgcaaccaaaatggccgccttgaaagggtcttttgcagtaaaatctcagtgtccaacatcaaagacagttcttcagggcctccaattaactatacatcctgcccccagctgctcatctctgcacctctaacacgtacttcacagagtaggaaattgggctttctccttcaaaaagaaaagtagagaaggcctgagggcagtgtaattaaaatggagaagtagagaccacgaattacttggatgaattcataactggttggtctctgaggcagggattattatttttcctgtattttaagcttaaaagtagtgatttttgcattgttacaaaaaacaaaatagcaaaatatcatttgatacttgtattctgtttgcaatagctaccacttcctttagccccagcaaaaatcaataggtgtgtattctctacaagcccatgctgtgccagaatgccagtattgctaaatgtcatgcaaggatttagacacttttttaaaggaaactctgggagtgcctgttgtctggagagttgacattgtccaaagcaggccaacactggtatgggtatggagaacccacgtcctagctgtggctcacctgcagatgccttgaatttacctctctgggttggaagtgggaagacttcttttaaaagtcctttctaagtttaaaaatccaaaggttacgaaggtagtttttatttatctcaataagtggcctatttgcttaaagcaagtgtacctctgtatatcagcccaaagcttagggcagtgcttcttggctttagtatctgagaaaggtgcctttgggaagagtttggtcagacagaaggtagtctgaatcttaaaggtttcagatgaatgtttgaagtagaacctgggaaatctgcttcctagggctgttagaaggaaattggtctccttaaattacgtcagcatctgaggcagtttcctaagggaatttcttttaaattcaaaagttcaactgcaggaataaatagctgtacaggactagatcttcccatccctcatcttttccccttccccgagtaacgactcaaaaaggcttctgaaattctactcagaatcggagccgtttgcattccaacaaggatcccttaagccaaatgctggtgtgtttgtgtagaatgtccctggggtaggggcggtagctgtggggagggaatgtggtgcaggggacacctgccctctgcccttgaaattgcaccataagatgctgcctatgtcactcacagtggtgctgatactatccgccaaagacaaattgtgaacacggaaaaatggtcgttccctactgtacatcctcaggacagacttaactaaacttggagacaggagattgttcagaccatattgtagtgggtggtgatcattgttttattttgggggagtctggtctattgagcagattgaatgtttccttattgtgcagggcttaattgactatgtctgaaagtttttactgagagctctaagaaaactattgaggaaaatgaaatgttattttgtagtacaaggattatttttgtctatttaggatatacatagctgtagctttgtaaaaaaaaagatctttataaacaatatatgaatgtgccgtcttatttattgattactgtaaattaagatataaatggctatttgcataatttatacctgtgggaattaactggagtatttgttatttgactgttttctattaaggaatattaggcttggtgctatgatgaatgatcttgtaaaatcatgtgtattcttaagaaaatttttgaatataaatttcttgaactgaaaaaaacgtt

SEQ ID NO: 454114 - DNA, 12661 bp, Homo sapiens
  misc_feature (7880)..(7880): n is a, c, g, or t
  misc_feature (7902)..(7902): n is a, c, g, or t
  misc_feature (7958)..(7958): n is a, c, g, or t
  misc_feature (9339)..(9339): n is a, c, g, or t
gcgcgcccgccagccaggctctccgcgcccgccgcccgcgccgcgctggcccgggctctcccgcccgcgcttcatggctgcacacgagtgggactggttccaacgcgaggagctcatcgggcagattagcgacatccgagtgcagaacctgcaagttgagagggaaaatgtgcagaagaggacctttacacgatggataaatctacatctagaaaagtgcaacccacctctagaagttaaagatttattcgtcgatatacaagatggcaaaatcctaatggctttgttagaagtcctgtctgggcggaatctgctgcacgaatacaaatcctcgtcgcatcgtatttttcggttgaacaacatagcgaaagcacttaagtttttggaagatagcaatgtaaaactggttagcattgatgcagcagaaatagcagatggcaacccttctttggttcttgggctgatatggaacataatcctcttcttccagattaaggagctcacaggcaacctcagcagaaactctccatcttccagcttgtcccctggctcagggggcacagactcagactcatccttcccacccacacccactgcagagaggagcgtggcaatatcggtgaaagaccagaggaaggctatcaaggccctgttggcgtgggtgcagaggaaaacgagaaagtatggcgtggcggtgcaggactttgcgggcagttggaggagtgggctggctttcctggcggtgatcaaggccattgaccccagcctggtggacatgaaacaggccctggaaaattccacacgagaaaatctagagaaggctttcagcatcgcacaggatgccctgcacatccccaggctcctggagccagaagacatcatggttgacacaccagacgagcagtctatcatgacttacgtggcacagtttctagaacgttttccggagttggaagccgaagatattttcgattcagataaagaagttcctatcgaatccacttttgttcgcatcaaagaaactccttctgaacaggagagcaaagtcttcgttctgactgaaaatggggagcgtacctacactgttaaccatgaaaccagccacccaccaccctccaaagtctttgtctgtgacaagcccgagagcatgaaggaattccgcctggatggtgtttccagccatgcgctgtcagacagctccaccgagttcatgcaccagattattgaccaggtcctgcaagggggcccaggtaagaccagcgacatcagtgagccatctccagaatcctccattttatcatccagaaaggagaacgggaggtccaactctttgccgatcaagaaaacagttcactttgaggctgacacctacaaggatcctttctgcagtaagaacctgtccctttgctttgaagggagcccaagagtggcaaaggaatcattgaggcaggatggacatgtcttggcagttgaggttgctgaggaaaaggaacagaaacaggaatcctcgaagattccagaatcctcctctgacaaggtcgctggtgacatttttttggtggagggcacaaacaataattctcagtcttcttcctgtaatggtgctttagagagtacagcccgccacgatgaagaaagtcactctctttcacccccaggagaaaatactgtgatggccgattccttccagatcaaggttaacctgatgactgtagaagctttagaggagggagactattttgaagccatcccattaaaagcctcaaaatttaacagcgacctaatagattttgcttctaccagccaggctttcaacaaagttccttcacctcatgagacaaaacctgacgaggatgctgaggcttttgagaatcatgctgaaaaactaggtaaaaggagtattaaatctgctcacaaaaagaaggattcgccagagcctcaagttaagatggacaaacatgaacctcatcaggactccggagaagaagctgaaggctgtccttcagccccagaagagacaccagtggataaaaagccagaggtgcatgaaaaggccaagagaaagtccacccgtcctcattatgaggaagagggagaagacgatgacctccagggtgtgggcgaggaattatcttccagccccccaagcagctgtgtcagcttggagacccttgggagtcacagcgaagaaggcctggatttcaagccctccccacccctctcaaaggtttccgtcattccccacgacctcttctatttcccacactatgaggttcccctggctgcagttttggaggcttatgtagaagacccggaggatctaaaaaatgaagaaatggatctcgaagagccagagggctatatgccagacctggactccagggaggaggaggccgatggctctcagagcagctccagttcctcggtgccaggagagagcctccccagtgccagcgaccaggtgctgtatctcagcaggggtggtgtgggtaccacaccagcctcagaacccgctccactggccccccatgaggaccaccagcaaagggagaccaaagagaatgaccccatggacagccatcagtcccaggaatccccaaacctggaaaacatagcaaaccccctagaagaaaatgtaacgaaagaatcaatcagtagtaaaaaaaaggaaaaaaggaaacatgtggaccacgtagaaagttcactatttgtagcaccaggaagtgttcaatcctcagatgacctagaagaagacagtagcgactacagcattccttccaggactagtcacagtgactccagcatttaccttcgacgacatactcataggtcttcggaatcggatcattttagctatgttcagttgaggaacgcagcagatctggatgacagaagaaaccgaatattaaccaggaaggccaacagctcaggagaagccatgtcactggggagccacagcccgcagagtgactccctgacacagcttgtccagcagccggatatgatgtattttattctcttcctgtggctcctggtgtactgcttgctgctcttcccacaactggatgttagcaggctctgatacgtgtgtctggataataaaaaagacaggaccctgaaaaggggcggggttacttcattttattttgggttctgggtggggcacttctacagacagttgaggacctccgaggaaacttagaccccctttctcgctattgtggttttttttttttttcaggtttccttttttttctggacaacctgagcatgcttttttctttggctgtgtactcaaaactcaggcatgcagctggatccgtaggtggggttttgtccttgtgtgccttgctgggttggatagggagcattgttagtgatcattagcccgcctggatcttagcacaccccacattgcaggttcacacgctggatgaacttgagtttcttacctctcagatgaagggctgcttaatgagaaagagggtgggcaccccaggccaagccccagctggggagagagctgccacgttttcctccaagcgtgggtgtttgagagaaggtgctggggtccatgcacctgtcgcagtccggtaactggttgcattcactaggggaaatccgagcagccagctctgtgtaagcacatccaggaatggcagaatccagggaggaaggtgaaagctgtgttgagagccactgtgtgctctttttcaccctgttttttttgttgtttttttgttttgttttttgtttgaggggagataacacttgaaattcagttttccattgattggattgagatagaaccatgattttcaaaccagatcgccagggcccagcagggccatataaaagccatgaggagtggctgggctggaatcagctcccagcagtgctggagctgggtggtggggtagcttcctgcccactaaagctttggtgcacacctccctcagaatgcatgtcttggaacgggcattctttgtggtcacttgtaatgggtttcttgaagaggctttctggacagcactccgggagcaggccagcacaggaggtttgtgaaagaagagaggcatctctagcacccctgcccccagtcttcctcagccccaggctccctctgctctctcctccctgccaagactcaggtccgtggtgagtctctgcattggttcctcctccccttgctctccccttcagaaagcatgtaccaggcaacccttataaaatcacaaatgagtcaggaggggactcagtgagcatcttgtctagctggacccagagagacagagcagcttgaccaagatcatatagccgaccaggggcagacttgcagtgagcacacaggcacctgatgccctgtccagagctgtcaccccttgtaggaaacttccactgggcacaccaatgtcctgagaaaaagataaaatgactagattaaaatgtccacattcaagcaaaaccagaattcttactcaccttcaagctcatccccaattccttctgaaatacccttgacagctgcaacagcttgtcatttgacataccagcgtcgctcttactccaggaatcacgtttctttctttgctagccaaggacttgctcatttcaagcagtgggtttcaagtttacagaattccagcatggccagaagaatttacatagcacatctgagtcgatgacagccaaaatctggcctctaaaccagtctgattatagtctgtctcccctcctgaaagaatttcagccttccaaccagaaagctgctgggagcttggagtgattccatctggaaggccaagagccccatggaaaatgagctaattaatgagctccctggcatcaatgaaagctcaaaggtacagataataaagattatgtgatagtttataactctgggcaccatgcagtccttgcctaaattagatgctcgaagagcctgggaagagccaacccaaatgtgaatcatttcattttatgggtctagaccttgttcagaaaaacctctgcaagatacttctctcacctattacaacttgtaatattgtttaaaacatctactggcaagatgcctgaaagtcatttggttcaggttggcagtcaactgatattttgcaaaggaaaaaaaaatctcatttgagtataggcttctatggaagaagctggatatagaaaatggatgtggaagtctgcaggacaaaccaccccattgcttgtaaattttttttaaattaaaagaaatacaataaggcttttaacaagaactagcagtcccctaagtctcgctgcttagaagtaaccactttcaactctcttatgtttgcatttctacataacgtgcttacactttattttttaatttagaaacatctactggcttgctgtcacagtagaggaggatttcactcttaccataccgtgctttggttttccagtatagctagatcacatcatttagtacatttctattaggtgttgacattacctggagcacttaaggattgttgactcccaagcccagcagtgtgttatggttacatgtcctttctcctccaaatgtccccattaatttgctattctctctctttactttttttttttttttggtgtggcacattctttaataacttcctgaggaagagaacatgggaagtaaatatggttgtaaatattttgagatttttgcatgacttaagatgtctgtattctgcccttaacagaaatgtggctgagcatagaatgacaggtggaaaataataccctcccctagcccctcccaagcgtgctggttgagatttctgatgccattctgattcccgtacctttatatgtgacttaggtttttttatccacccttcctggaaacatttaagatctctttattcttggtgttctgaactgtcatgatggtgttgtatcccgggtgttaaaccttgtgctgggccttcatgggaaatttcttaaattttcttgtgattatttacattctttctttctggaccacctattatttcaatgttggaccctcccctacacccaggctgatgctctaatattttttatcttttctatttttcgtctatgtttctgatctgctttcaggaagaattattcatttttatcttcccaatctgaatgttttattgaatttttattttccaagttaataaaacctttggttattatcctgtctttgttttacagtgtcctgctcttgatgcgtggatgcagattttgtctctctgtggacgttaatgattgtggtctgaggggaagtcttttctgctccctgtgttgccctcattttctctgagttctctttattttggtggtctcagtctctatctttcacgttgtgaatttttctcaaatatatggtgatcctatggatctgttcatgttttaagagtgaggcatccaaaagctgattggaagttgtgtgtgccaactggtgagcttttccactagggtcaccaggtgggcacctggactcatcattggagaacactgcctgtcagtatttgcacgtgttttctctggggctcattctgtttcttgagagatattcccactactctccttcctgggaaacgggcatacacagggcttttagcctatgctgagtactcatgtggtttcaaaaatggtgtcccatctgggcagaagtccccatgagcacttggcttgactggcaaaggacaccttttgccccttcctccagacatacccagctctgagcttggacaatgctcgaggaacaatgaaaaggctagattttaactcctaattgccctctttagccaagtgcctctgtgcaatgcacaactgtaggaccatatccagagaccctggtctatactcagtgtgcccgagtcctgaccgctgagcaggcagcctcatcacccgtgagtatttagactttcattaagttgcttcaacctttgctgtgcctggtgtccctgagttggagctgctctgatttctccatggagtaggagcacagtggtcatctggctgcatgggaaggacaggggacctcagagccaataaatgccctggtcttcagccccatgtctcaccccatccctcctattccaatccccaagcctctcctggaggccacagggcatctctgctgaccactctgtggcctcccctctgcaggcatgtggttttaggatccccctccctgctcacttttccatcagttccattcctgcataaataggttgctagctcttgcttactgttctcttctgtattctgtgttcatggttgtattaatataactttcattcctctgctcctattttcatggggtttcatgagggaagaaacaggctcatgtgttcagtataccatcttgatccataaaccccatttgagttatctcacaggttgcttagggggcttgctgctctgactggtttgtgaacgtgccctgagtccagctgggactgcagcaacatccatcctgttgagctgtggtctgctaagtgattttgtgtaatgctgtgccaagtgcaggagagggatacatagcatggctaagctctgcttgaatgccatgattagttattaccttccttccttccccctggttttgctgcctattgtcagtaaatgatcttagatctcctgcctccccaaagatatagtctatgtggtggtctgggttctaggttttctttaccacccttgcttcacttaagaaacagaaaactggctaggcacagtagtggctcacacctataatcccagccctttgggaggccaaggcaggaggatcgcttgaggccaggaattcaagaccagcctgcacaacatagcaagactccatctctacaaaaagttaaatttaaattagtggtggcatncacttatagtcccagctactcnggaggatgaggcaggagaattgtttgagcccatgactttgaggttactgtgagctntgatcctgctattttactccacctgagtgacagagcgagacgctgtctcaaaaataaagaaacaagtagtccacacaggtgtttgccagcaaacaaacagcgcggattctctgttgaacgtggccaacattgcctcgtcgaagtttgtatcttgccatagttgatgatcaggtggtcggggcttcctggtcagacctgacctttgtggggagatgttctcccaccaaggctcagaagcaggacactcttgctgcccctcgggcagccacccagaacatgggcgtctccatttctgaggttcagcatagttccccccaccctcttcccatgcagtgcatgcctgctctttatcaggatggaacagagggaaggcagaggcactgggggcagcctgtgttgttgatctctgtaagtcacagactgttcgaaaacctcaggaattatgtaagcgttcagtgcctcatttaagagatgaaaaactgaagattagaaagaggaaacgactagtcgccctgctagttgatgacctccagatagccatcttcattcccagttaagtttactacaaaaccacagcctcagctgctgaagctaacctccctacccaccatcgctagggactcagaacaccatggagctcatctctccaacaaaagtcagaattagcaagtacagatgtgtcttacgaaaatgtcagaatccatcatggctgctttggtgaggagctgttctccttccgtggtcatgccattggaaggcagttgtatgacaagaatgctttcacatgagctccgattttcttaactctccagaaggacttcagaagcctctggagttttgagacacggcctctctctcccttctgcttggagacaccttcctgggggtctccactgcattccccgccggtattcctctgtggagccttgcgccctcaggtcccagaaatgggctgtgtgggagcttccagtcagcctggtatctcgggaccttctcagccaggaaatgagactgcacaaagccctgtgaggcccagctgtgttatttctccttccccgacattgcataatcactgctgacacagcatttggggaagatttaacgtcttgggccagcagctgccatctggaaccatcaccacatagcaggttgttctgtcccatccaactgatgagggggctgccctaatgacaaggtccaggacctgggttgggtggtggaaggctgggagctggagtgggcattattgtgcttctgtgctgaaaattgctatggctcttttcccctaacagccagcgtgggagaaccaaacatgagacacaagcatccccttgagctccacagatcttgcgccttgctctcatcaggcatttccttgganaacagcagtcagcagctcatggaagtgagcccggtgcacagactttgcatggactttgcacaggttccatttccatcgtgtgcagacacctgtatctttgggctccacgtgagcacctgccctcttcactctgattttttttttaagagacagcatcttactctgtcaccgaggctggagtacagtggtgtgatcacagctcactgcagcctgaaactcctgggctcaggcaatcctcctgcctcagcctcccgagtggctggtagtacaggtgcatgccaccacgcccacctaatttttttatcttttatagatacaggtctcactgttgctcaggctggtctcgaactcctggcctcaagtgatcctcctgccttggcctaccaaaatgctgggattataggcatgaaccactgtgcctggccttcactctgatttttcttaagagtcctacaggaccttcaggtcttgtcacttctctaccattgtgtgtgagacagggcatggggtgagcttggtcaggtgtgggtcaaaagcctggagactcagagctgctggttccccaagagcccacaaaagttatcagagtttctgagctgagtgttctgcagttgccagaccccacaatgctgggaatactggcttctttgtgtttagaacttgttctgagaaccttgatgagaacacatcaagcaagcagttcctcccagccagggctggagcaacatgccaaaaaacattcttgtctatgggaaaaagacaaccagtattttgtactgtttgaccaagttgtttttaaatatacacatgcctcaacaatccacggcctcaatcgcactgctaatttgtttaaatccctgacactcagatgtcaagaatagcttcatctagcagtgttctctttaaaggaacccttttttttgttttcattttaatcactgccttcttctctgggaggtattgtgggctagagaaagaagtcaggtttgggagtcagccagatttagattggagtcccagctctgtcaccagatctctgggtgatcttggcaaactaacttctgagcttctgtgcattataggcattcagcacatatttgttggatgaaaaatacttttcttgaaagtttatgaagttgtaggatgcccagcagcccccttttctctatttccttcctcttgaagcaagcgttgactatacctctttccctaacccttagtgtaccatagcttcttccaacctctctccaatccattacttttttctgagctaccctgtctcaaatctaactcaggcctttttgcaagaggaagtttaagccattgtttactcattaactcacttgacccttagaacaatcgtgggaggtgtttatttcggaaaggaagctaaagcacaggacagaaaaataaggtcatagcgtgaactagtaagtagcagaactgggaacataggactgttattttcaaacactctaaacttcactgcagttgcaaatttgcaaccaaaatggccgccttgaaagggtcttttgcagtaaaatctcagtgtccaacatcaaagacagttcttcagggcctccaattaactatacatcctgcccccagctgctcatctctgcacctctaacacgtacttcacagagtaggaaattgggctttctccttcaaaaagaaaagtagagaaggcctgagggcagtgtaattaaaatggagaagtagagaccacgaattacttggatgaattcataactggttggtctctgaggcagggattattatttttcctgtattttaagcttaaaagtagtgatttttgcattgttacaaaaaacaaaatagcaaaatatcatttgatacttgtattctgtttgcaatagctaccacttcctttagccccagcaaaaatcaataggtgtgtattctctacaagcccatgctgtgccagaatgccagtattgctaaatgtcatgcaaggatttagacacttttttaaaggaaactctgggagtgcctgttgtctggagagttgacattgtccaaagcaggccaacactggtatgggtatggagaacccacgtcctagctgtggctcacctgcagatgccttgaatttacctctctgggttggaagtgggaagacttcttttaaaagtcctttctaagtttaaaaatccaaaggttacgaaggtagtttttatttatctcaataagtggcctatttgcttaaagcaagtgtacctctgtatatcagcccaaagcttagggcagtgcttcttggctttagtatctgagaaaggtgcctttgggaagagtttggtcagacagaaggtagtctgaatcttaaaggtttcagatgaatgtttgaagtagaacctgggaaatctgcttcctagggctgttagaaggaaattggtctccttaaattacgtcagcatctgaggcagtttcctaagggaatttcttttaaattcaaaagttcaactgcaggaataaatagctgtacaggactagatcttcccatccctcatcttttccccttccccgagtaacgactcaaaaaggcttctgaaattctactcagaatcggagccgtttgcattccaacaaggatcccttaagccaaatgctggtgtgtttgtgtagaatgtccctggggtaggggcggtagctgtggggagggaatgtggtgcaggggacacctgccctctgcccttgaaattgcaccataagatgctgcctatgtcactcacagtggtgctgatactatccgccaaagacaaattgtgaacacggaaaaatggtcgttccctactgtacatcctcaggacagacttaactaaacttggagacaggagattgttcagaccatattgtagtgggtggtgatcattgttttattttgggggagtctggtctattgagcagattgaatgtttccttattgtgcagggcttaattgactatgtctgaaagtttttactgagagctctaagaaaactattgaggaaaatgaaatgttattttgtagtacaaggattatttttgtctatttaggatatacatagctgtagctttgtaaaaaaaaagatctttataaacaatatatgaatgtgccgtcttatttattgattactgtaaattaagatataaatggctatttgcataatttatacctgtgggaattaactggagtatttgttatttgactgttttctattaaggaatattaggcttggtgctatgatgaatgatcttgtaaaatcatgtgtattcttaagaaaatttttgaatataaatttcttgaactgaaaaaaacgtt

SEQ ID NO: 454115 - DNA, 12758 bp, Homo sapiens
  misc_feature (7977)..(7977): n is a, c, g, or t
  misc_feature (7999)..(7999): n is a, c, g, or t
  misc_feature (8055)..(8055): n is a, c, g, or t
  misc_feature (9436)..(9436): n is a, c, g, or t
gcgcgcccgccagccaggctctccgcgcccgccgcccgcgccgcgctggcccgggctctcccgcccgcgcttcatggctgcacacgagtgggactggttccaacgcgaggagctcatcgggcagattagcgacatccgagtgcagaacctgcaagttgagagggaaaatgtgcagaagaggacctttacacgatggataaatctacatctagaaaagtgcaacccacctctagaagttaaagatttattcgtcgatatacaagatggcaaaatcctaatggctttgttagaagtcctgtctgggcggaatctgctgcacgaatacaaatcctcgtcgcatcgtatttttcggttgaacaacatagcgaaagcacttaagtttttggaagatagcaatgtaaaactggttagcattgatgcagcagaaatagcagatggcaacccttctttggttcttgggctgatatggaacataatcctcttcttccagattaaggagctcacaggcaacctcagcagaaactctccatcttccagcttgtcccctggctcagggggcacagactcagactcatccttcccacccacacccactgcagagaggagcgtggcaatatcggtgaaagaccagaggaaggctatcaaggccctgttggcgtgggtgcagaggaaaacgagaaagtatggcgtggcggtgcaggactttgcgggcagttggaggagtgggctggctttcctggcggtgatcaaggccattgaccccagcctggtggacatgaaacaggccctggaaaattccacacgagaaaatctagagaaggctttcagcatcgcacaggatgccctgcacatccccaggctcctggagccagaagacatcatggttgacacaccagacgagcagtctatcatgacttacgtggcacagtttctagaacgttttccggagttggaagccgaagatattttcgattcagataaagaagttcctatcgaatccacttttgttcgcatcaaagaaactccttctgaacaggagagcaaagtcttcgttctgactgaaaatggggagcgtacctacactgttaaccatgaaaccagccacccaccaccctccaaagtctttgtctgtgacaagcccgagagcatgaaggaattccgcctggatggtgtttccagccatgcgctgtcagacagctccaccgagttcatgcaccagattattgaccaggtcctgcaagggggcccaggtaagaccagcgacatcagtgagccatctccagaatcctccattttatcatccagaaaggagaacgggaggtccaactctttgccgatcaagaaaacagttcactttgaggctgacacctacaaggatcctttctgcagtaagaacctgtccctttgctttgaagggagcccaagagtggcaaaggaatcattgaggcaggatggacatgtcttggcagttgaggttgctgaggaaaaggaacagaaacaggaatcctcgaagattccagaatcctcctctgacaaggtcgctggtgacatttttttggtggagggcacaaacaataattctcagtcttcttcctgtaatggtgctttagagagtacagcccgccacgatgaagaaagtcactctctttcacccccaggagaaaatactgtgatggccgattccttccagatcaaggttaacctgatgactgtagaagctttagaggagggagactattttgaagccatcccattaaaagcctcaaaatttaacagcgacctaatagattttgcttctaccagccaggctttcaacaaagttccttcacctcatgagacaaaacctgacgaggatgctgaggcttttgagaatcatgctgaaaaactaggtaaaaggagtattaaatctgctcacaaaaagaaggattcgccagagcctcaagttaagatggacaaacatgaacctcatcaggactccggagaagaagctgaaggctgtccttcagccccagaagagacaccagtggataaaaagccagaggtgcatgaaaaggccaagagaaagtccacccgtcctcattatgaggaagagggagaagacgatgacctccagggtgtgggcgaggaattatcttccagccccccaagcagctgtgtcagcttggagacccttgggagtcacagcgaagaaggcctggatttcaagccctccccacccctctcaaaggtttccgtcattccccacgacctcttctatttcccacactatgaggttcccctggctgcagttttggaggcttatgtagaagacccggaggatctaaaaaatgaagaaatggatctcgaagagccagagggctatatgccagacctggactccagggaggaggaggccgatggctctcagagcagctccagttcctcggtgccaggagagagcctccccagtgccagcgaccaggtgctgtatctcagcaggggtggtgtgggtaccacaccagcctcagaacccgctccactggccccccatgaggaccaccagcaaagggagaccaaagagaatgaccccatggacagccatcagtcccaggaatccccaaacctggaaaacatagcaaaccccctagaagaaaatgtaacgaaagaatcaatcagtagtaaaaaaaaggaaaaaaggaaacatgtggaccacgtagaaagttcactatttgtagcaccaggaagtgttcaatcctcagatgacctagaagaagacagtagcgactacagcattccttccaggactagtcacagtgactccagcatttaccttcgacgacatactcataggtcttcggaatcggatcattttagctatgttcagttgaggaacgcagcagatctggatgacagaagaaaccgaatattaaccaggtacagtactcagaagcttactgagctgattttacagttttatggcatcagagcagacatgaagagggaaagcaaacatgccaggatgtctatgaaagaaggccaacagctcaggagaagccatgtcactggggagccacagcccgcagagtgactccctgacacagcttgtccagcagccggatatgatgtattttattctcttcctgtggctcctggtgtactgcttgctgctcttcccacaactggatgttagcaggctctgatacgtgtgtctggataataaaaaagacaggaccctgaaaaggggcggggttacttcattttattttgggttctgggtggggcacttctacagacagttgaggacctccgaggaaacttagaccccctttctcgctattgtggttttttttttttttcaggtttccttttttttctggacaacctgagcatgcttttttctttggctgtgtactcaaaactcaggcatgcagctggatccgtaggtggggttttgtccttgtgtgccttgctgggttggatagggagcattgttagtgatcattagcccgcctggatcttagcacaccccacattgcaggttcacacgctggatgaacttgagtttcttacctctcagatgaagggctgcttaatgagaaagagggtgggcaccccaggccaagccccagctggggagagagctgccacgttttcctccaagcgtgggtgtttgagagaaggtgctggggtccatgcacctgtcgcagtccggtaactggttgcattcactaggggaaatccgagcagccagctctgtgtaagcacatccaggaatggcagaatccagggaggaaggtgaaagctgtgttgagagccactgtgtgctctttttcaccctgttttttttgttgtttttttgttttgttttttgtttgaggggagataacacttgaaattcagttttccattgattggattgagatagaaccatgattttcaaaccagatcgccagggcccagcagggccatataaaagccatgaggagtggctgggctggaatcagctcccagcagtgctggagctgggtggtggggtagcttcctgcccactaaagctttggtgcacacctccctcagaatgcatgtcttggaacgggcattctttgtggtcacttgtaatgggtttcttgaagaggctttctggacagcactccgggagcaggccagcacaggaggtttgtgaaagaagagaggcatctctagcacccctgcccccagtcttcctcagccccaggctccctctgctctctcctccctgccaagactcaggtccgtggtgagtctctgcattggttcctcctccccttgctctccccttcagaaagcatgtaccaggcaacccttataaaatcacaaatgagtcaggaggggactcagtgagcatcttgtctagctggacccagagagacagagcagcttgaccaagatcatatagccgaccaggggcagacttgcagtgagcacacaggcacctgatgccctgtccagagctgtcaccccttgtaggaaacttccactgggcacaccaatgtcctgagaaaaagataaaatgactagattaaaatgtccacattcaagcaaaaccagaattcttactcaccttcaagctcatccccaattccttctgaaatacccttgacagctgcaacagcttgtcatttgacataccagcgtcgctcttactccaggaatcacgtttctttctttgctagccaaggacttgctcatttcaagcagtgggtttcaagtttacagaattccagcatggccagaagaatttacatagcacatctgagtcgatgacagccaaaatctggcctctaaaccagtctgattatagtctgtctcccctcctgaaagaatttcagccttccaaccagaaagctgctgggagcttggagtgattccatctggaaggccaagagccccatggaaaatgagctaattaatgagctccctggcatcaatgaaagctcaaaggtacagataataaagattatgtgatagtttataactctgggcaccatgcagtccttgcctaaattagatgctcgaagagcctgggaagagccaacccaaatgtgaatcatttcattttatgggtctagaccttgttcagaaaaacctctgcaagatacttctctcacctattacaacttgtaatattgtttaaaacatctactggcaagatgcctgaaagtcatttggttcaggttggcagtcaactgatattttgcaaaggaaaaaaaaatctcatttgagtataggcttctatggaagaagctggatatagaaaatggatgtggaagtctgcaggacaaaccaccccattgcttgtaaattttttttaaattaaaagaaatacaataaggcttttaacaagaactagcagtcccctaagtctcgctgcttagaagtaaccactttcaactctcttatgtttgcatttctacataacgtgcttacactttattttttaatttagaaacatctactggcttgctgtcacagtagaggaggatttcactcttaccataccgtgctttggttttccagtatagctagatcacatcatttagtacatttctattaggtgttgacattacctggagcacttaaggattgttgactcccaagcccagcagtgtgttatggttacatgtcctttctcctccaaatgtccccattaatttgctattctctctctttactttttttttttttttggtgtggcacattctttaataacttcctgaggaagagaacatgggaagtaaatatggttgtaaatattttgagatttttgcatgacttaagatgtctgtattctgcccttaacagaaatgtggctgagcatagaatgacaggtggaaaataataccctcccctagcccctcccaagcgtgctggttgagatttctgatgccattctgattcccgtacctttatatgtgacttaggtttttttatccacccttcctggaaacatttaagatctctttattcttggtgttctgaactgtcatgatggtgttgtatcccgggtgttaaaccttgtgctgggccttcatgggaaatttcttaaattttcttgtgattatttacattctttctttctggaccacctattatttcaatgttggaccctcccctacacccaggctgatgctctaatattttttatcttttctatttttcgtctatgtttctgatctgctttcaggaagaattattcatttttatcttcccaatctgaatgttttattgaatttttattttccaagttaataaaacctttggttattatcctgtctttgttttacagtgtcctgctcttgatgcgtggatgcagattttgtctctctgtggacgttaatgattgtggtctgaggggaagtcttttctgctccctgtgttgccctcattttctctgagttctctttattttggtggtctcagtctctatctttcacgttgtgaatttttctcaaatatatggtgatcctatggatctgttcatgttttaagagtgaggcatccaaaagctgattggaagttgtgtgtgccaactggtgagcttttccactagggtcaccaggtgggcacctggactcatcattggagaacactgcctgtcagtatttgcacgtgttttctctggggctcattctgtttcttgagagatattcccactactctccttcctgggaaacgggcatacacagggcttttagcctatgctgagtactcatgtggtttcaaaaatggtgtcccatctgggcagaagtccccatgagcacttggcttgactggcaaaggacaccttttgccccttcctccagacatacccagctctgagcttggacaatgctcgaggaacaatgaaaaggctagattttaactcctaattgccctctttagccaagtgcctctgtgcaatgcacaactgtaggaccatatccagagaccctggtctatactcagtgtgcccgagtcctgaccgctgagcaggcagcctcatcacccgtgagtatttagactttcattaagttgcttcaacctttgctgtgcctggtgtccctgagttggagctgctctgatttctccatggagtaggagcacagtggtcatctggctgcatgggaaggacaggggacctcagagccaataaatgccctggtcttcagccccatgtctcaccccatccctcctattccaatccccaagcctctcctggaggccacagggcatctctgctgaccactctgtggcctcccctctgcaggcatgtggttttaggatccccctccctgctcacttttccatcagttccattcctgcataaataggttgctagctcttgcttactgttctcttctgtattctgtgttcatggttgtattaatataactttcattcctctgctcctattttcatggggtttcatgagggaagaaacaggctcatgtgttcagtataccatcttgatccataaaccccatttgagttatctcacaggttgcttagggggcttgctgctctgactggtttgtgaacgtgccctgagtccagctgggactgcagcaacatccatcctgttgagctgtggtctgctaagtgattttgtgtaatgctgtgccaagtgcaggagagggatacatagcatggctaagctctgcttgaatgccatgattagttattaccttccttccttccccctggttttgctgcctattgtcagtaaatgatcttagatctcctgcctccccaaagatatagtctatgtggtggtctgggttctaggttttctttaccacccttgcttcacttaagaaacagaaaactggctaggcacagtagtggctcacacctataatcccagccctttgggaggccaaggcaggaggatcgcttgaggccaggaattcaagaccagcctgcacaacatagcaagactccatctctacaaaaagttaaatttaaattagtggtggcatncacttatagtcccagctactcnggaggatgaggcaggagaattgtttgagcccatgactttgaggttactgtgagctntgatcctgctattttactccacctgagtgacagagcgagacgctgtctcaaaaataaagaaacaagtagtccacacaggtgtttgccagcaaacaaacagcgcggattctctgttgaacgtggccaacattgcctcgtcgaagtttgtatcttgccatagttgatgatcaggtggtcggggcttcctggtcagacctgacctttgtggggagatgttctcccaccaaggctcagaagcaggacactcttgctgcccctcgggcagccacccagaacatgggcgtctccatttctgaggttcagcatagttccccccaccctcttcccatgcagtgcatgcctgctctttatcaggatggaacagagggaaggcagaggcactgggggcagcctgtgttgttgatctctgtaagtcacagactgttcgaaaacctcaggaattatgtaagcgttcagtgcctcatttaagagatgaaaaactgaagattagaaagaggaaacgactagtcgccctgctagttgatgacctccagatagccatcttcattcccagttaagtttactacaaaaccacagcctcagctgctgaagctaacctccctacccaccatcgctagggactcagaacaccatggagctcatctctccaacaaaagtcagaattagcaagtacagatgtgtcttacgaaaatgtcagaatccatcatggctgctttggtgaggagctgttctccttccgtggtcatgccattggaaggcagttgtatgacaagaatgctttcacatgagctccgattttcttaactctccagaaggacttcagaagcctctggagttttgagacacggcctctctctcccttctgcttggagacaccttcctgggggtctccactgcattccccgccggtattcctctgtggagccttgcgccctcaggtcccagaaatgggctgtgtgggagcttccagtcagcctggtatctcgggaccttctcagccaggaaatgagactgcacaaagccctgtgaggcccagctgtgttatttctccttccccgacattgcataatcactgctgacacagcatttggggaagatttaacgtcttgggccagcagctgccatctggaaccatcaccacatagcaggttgttctgtcccatccaactgatgagggggctgccctaatgacaaggtccaggacctgggttgggtggtggaaggctgggagctggagtgggcattattgtgcttctgtgctgaaaattgctatggctcttttcccctaacagccagcgtgggagaaccaaacatgagacacaagcatccccttgagctccacagatcttgcgccttgctctcatcaggcatttccttgganaacagcagtcagcagctcatggaagtgagcccggtgcacagactttgcatggactttgcacaggttccatttccatcgtgtgcagacacctgtatctttgggctccacgtgagcacctgccctcttcactctgattttttttttaagagacagcatcttactctgtcaccgaggctggagtacagtggtgtgatcacagctcactgcagcctgaaactcctgggctcaggcaatcctcctgcctcagcctcccgagtggctggtagtacaggtgcatgccaccacgcccacctaatttttttatcttttatagatacaggtctcactgttgctcaggctggtctcgaactcctggcctcaagtgatcctcctgccttggcctaccaaaatgctgggattataggcatgaaccactgtgcctggccttcactctgatttttcttaagagtcctacaggaccttcaggtcttgtcacttctctaccattgtgtgtgagacagggcatggggtgagcttggtcaggtgtgggtcaaaagcctggagactcagagctgctggttccccaagagcccacaaaagttatcagagtttctgagctgagtgttctgcagttgccagaccccacaatgctgggaatactggcttctttgtgtttagaacttgttctgagaaccttgatgagaacacatcaagcaagcagttcctcccagccagggctggagcaacatgccaaaaaacattcttgtctatgggaaaaagacaaccagtattttgtactgtttgaccaagttgtttttaaatatacacatgcctcaacaatccacggcctcaatcgcactgctaatttgtttaaatccctgacactcagatgtcaagaatagcttcatctagcagtgttctctttaaaggaacccttttttttgttttcattttaatcactgccttcttctctgggaggtattgtgggctagagaaagaagtcaggtttgggagtcagccagatttagattggagtcccagctctgtcaccagatctctgggtgatcttggcaaactaacttctgagcttctgtgcattataggcattcagcacatatttgttggatgaaaaatacttttcttgaaagtttatgaagttgtaggatgcccagcagcccccttttctctatttccttcctcttgaagcaagcgttgactatacctctttccctaacccttagtgtaccatagcttcttccaacctctctccaatccattacttttttctgagctaccctgtctcaaatctaactcaggcctttttgcaagaggaagtttaagccattgtttactcattaactcacttgacccttagaacaatcgtgggaggtgtttatttcggaaaggaagctaaagcacaggacagaaaaataaggtcatagcgtgaactagtaagtagcagaactgggaacataggactgttattttcaaacactctaaacttcactgcagttgcaaatttgcaaccaaaatggccgccttgaaagggtcttttgcagtaaaatctcagtgtccaacatcaaagacagttcttcagggcctccaattaactatacatcctgcccccagctgctcatctctgcacctctaacacgtacttcacagagtaggaaattgggctttctccttcaaaaagaaaagtagagaaggcctgagggcagtgtaattaaaatggagaagtagagaccacgaattacttggatgaattcataactggttggtctctgaggcagggattattatttttcctgtattttaagcttaaaagtagtgatttttgcattgttacaaaaaacaaaatagcaaaatatcatttgatacttgtattctgtttgcaatagctaccacttcctttagccccagcaaaaatcaataggtgtgtattctctacaagcccatgctgtgccagaatgccagtattgctaaatgtcatgcaaggatttagacacttttttaaaggaaactctgggagtgcctgttgtctggagagttgacattgtccaaagcaggccaacactggtatgggtatggagaacccacgtcctagctgtggctcacctgcagatgccttgaatttacctctctgggttggaagtgggaagacttcttttaaaagtcctttctaagtttaaaaatccaaaggttacgaaggtagtttttatttatctcaataagtggcctatttgcttaaagcaagtgtacctctgtatatcagcccaaagcttagggcagtgcttcttggctttagtatctgagaaaggtgcctttgggaagagtttggtcagacagaaggtagtctgaatcttaaaggtttcagatgaatgtttgaagtagaacctgggaaatctgcttcctagggctgttagaaggaaattggtctccttaaattacgtcagcatctgaggcagtttcctaagggaatttcttttaaattcaaaagttcaactgcaggaataaatagctgtacaggactagatcttcccatccctcatcttttccccttccccgagtaacgactcaaaaaggcttctgaaattctactcagaatcggagccgtttgcattccaacaaggatcccttaagccaaatgctggtgtgtttgtgtagaatgtccctggggtaggggcggtagctgtggggagggaatgtggtgcaggggacacctgccctctgcccttgaaattgcaccataagatgctgcctatgtcactcacagtggtgctgatactatccgccaaagacaaattgtgaacacggaaaaatggtcgttccctactgtacatcctcaggacagacttaactaaacttggagacaggagattgttcagaccatattgtagtgggtggtgatcattgttttattttgggggagtctggtctattgagcagattgaatgtttccttattgtgcagggcttaattgactatgtctgaaagtttttactgagagctctaagaaaactattgaggaaaatgaaatgttattttgtagtacaaggattatttttgtctatttaggatatacatagctgtagctttgtaaaaaaaaagatctttataaacaatatatgaatgtgccgtcttatttattgattactgtaaattaagatataaatggctatttgcataatttatacctgtgggaattaactggagtatttgttatttgactgttttctattaaggaatattaggcttggtgctatgatgaatgatcttgtaaaatcatgtgtattcttaagaaaatttttgaatataaatttcttgaactgaaaaaaacgtt

SEQ ID NO: 454116 - DNA, 12685 bp, Homo sapiens
  misc_feature (7904)..(7904): n is a, c, g, or t
  misc_feature (7926)..(7926): n is a, c, g, or t
  misc_feature (7982)..(7982): n is a, c, g, or t
  misc_feature (9363)..(9363): n is a, c, g, or t
gggttggggacccctgttgtaaggtttaaagatgaatggaaacaaagtgtccgggacgcagtgagtgcttggcggatggcagtcgcccttggcagtgaaagatctttgctaagaagcctctttggttgagagggaaaatgtgcagaagaggacctttacacgatggataaatctacatctagaaaagtgcaacccacctctagaagttaaagatttattcgtcgatatacaagatggcaaaatcctaatggctttgttagaagtcctgtctgggcggaatctgctgcacgaatacaaatcctcgtcgcatcgtatttttcggttgaacaacatagcgaaagcacttaagtttttggaagatagcaatgtaaaactggttagcattgatgcagcagaaatagcagatggcaacccttctttggttcttgggctgatatggaacataatcctcttcttccagattaaggagctcacaggcaacctcagcagaaactctccatcttccagcttgtcccctggctcagggggcacagactcagactcatccttcccacccacacccactgcagagaggagcgtggcaatatcggtgaaagaccagaggaaggctatcaaggccctgttggcgtgggtgcagaggaaaacgagaaagtatggcgtggcggtgcaggactttgcgggcagttggaggagtgggctggctttcctggcggtgatcaaggccattgaccccagcctggtggacatgaaacaggccctggaaaattccacacgagaaaatctagagaaggctttcagcatcgcacaggatgccctgcacatccccaggctcctggagccagaagacatcatggttgacacaccagacgagcagtctatcatgacttacgtggcacagtttctagaacgttttccggagttggaagccgaagatattttcgattcagataaagaagttcctatcgaatccacttttgttcgcatcaaagaaactccttctgaacaggagagcaaagtcttcgttctgactgaaaatggggagcgtacctacactgttaaccatgaaaccagccacccaccaccctccaaagtctttgtctgtgacaagcccgagagcatgaaggaattccgcctggatggtgtttccagccatgcgctgtcagacagctccaccgagttcatgcaccagattattgaccaggtcctgcaagggggcccaggtaagaccagcgacatcagtgagccatctccagaatcctccattttatcatccagaaaggagaacgggaggtccaactctttgccgatcaagaaaacagttcactttgaggctgacacctacaaggatcctttctgcagtaagaacctgtccctttgctttgaagggagcccaagagtggcaaaggaatcattgaggcaggatggacatgtcttggcagttgaggttgctgaggaaaaggaacagaaacaggaatcctcgaagattccagaatcctcctctgacaaggtcgctggtgacatttttttggtggagggcacaaacaataattctcagtcttcttcctgtaatggtgctttagagagtacagcccgccacgatgaagaaagtcactctctttcacccccaggagaaaatactgtgatggccgattccttccagatcaaggttaacctgatgactgtagaagctttagaggagggagactattttgaagccatcccattaaaagcctcaaaatttaacagcgacctaatagattttgcttctaccagccaggctttcaacaaagttccttcacctcatgagacaaaacctgacgaggatgctgaggcttttgagaatcatgctgaaaaactaggtaaaaggagtattaaatctgctcacaaaaagaaggattcgccagagcctcaagttaagatggacaaacatgaacctcatcaggactccggagaagaagctgaaggctgtccttcagccccagaagagacaccagtggataaaaagccagaggtgcatgaaaaggccaagagaaagtccacccgtcctcattatgaggaagagggagaagacgatgacctccagggtgtgggcgaggaattatcttccagccccccaagcagctgtgtcagcttggagacccttgggagtcacagcgaagaaggcctggatttcaagccctccccacccctctcaaaggtttccgtcattccccacgacctcttctatttcccacactatgaggttcccctggctgcagttttggaggcttatgtagaagacccggaggatctaaaaaatgaagaaatggatctcgaagagccagagggctatatgccagacctggactccagggaggaggaggccgatggctctcagagcagctccagttcctcggtgccaggagagagcctccccagtgccagcgaccaggtgctgtatctcagcaggggtggtgtgggtaccacaccagcctcagaacccgctccactggccccccatgaggaccaccagcaaagggagaccaaagagaatgaccccatggacagccatcagtcccaggaatccccaaacctggaaaacatagcaaaccccctagaagaaaatgtaacgaaagaatcaatcagtagtaaaaaaaaggaaaaaaggaaacatgtggaccacgtagaaagttcactatttgtagcaccaggaagtgttcaatcctcagatgacctagaagaagacagtagcgactacagcattccttccaggactagtcacagtgactccagcatttaccttcgacgacatactcataggtcttcggaatcggatcattttagctatgttcagttgaggaacgcagcagatctggatgacagaagaaaccgaatattaaccaggaaggccaacagctcaggagaagccatgtcactggggagccacagcccgcagagtgactccctgacacagcttgtccagcagccggatatgatgtattttattctcttcctgtggctcctggtgtactgcttgctgctcttcccacaactggatgttagcaggctctgatacgtgtgtctggataataaaaaagacaggaccctgaaaaggggcggggttacttcattttattttgggttctgggtggggcacttctacagacagttgaggacctccgaggaaacttagaccccctttctcgctattgtggttttttttttttttcaggtttccttttttttctggacaacctgagcatgcttttttctttggctgtgtactcaaaactcaggcatgcagctggatccgtaggtggggttttgtccttgtgtgccttgctgggttggatagggagcattgttagtgatcattagcccgcctggatcttagcacaccccacattgcaggttcacacgctggatgaacttgagtttcttacctctcagatgaagggctgcttaatgagaaagagggtgggcaccccaggccaagccccagctggggagagagctgccacgttttcctccaagcgtgggtgtttgagagaaggtgctggggtccatgcacctgtcgcagtccggtaactggttgcattcactaggggaaatccgagcagccagctctgtgtaagcacatccaggaatggcagaatccagggaggaaggtgaaagctgtgttgagagccactgtgtgctctttttcaccctgttttttttgttgtttttttgttttgttttttgtttgaggggagataacacttgaaattcagttttccattgattggattgagatagaaccatgattttcaaaccagatcgccagggcccagcagggccatataaaagccatgaggagtggctgggctggaatcagctcccagcagtgctggagctgggtggtggggtagcttcctgcccactaaagctttggtgcacacctccctcagaatgcatgtcttggaacgggcattctttgtggtcacttgtaatgggtttcttgaagaggctttctggacagcactccgggagcaggccagcacaggaggtttgtgaaagaagagaggcatctctagcacccctgcccccagtcttcctcagccccaggctccctctgctctctcctccctgccaagactcaggtccgtggtgagtctctgcattggttcctcctccccttgctctccccttcagaaagcatgtaccaggcaacccttataaaatcacaaatgagtcaggaggggactcagtgagcatcttgtctagctggacccagagagacagagcagcttgaccaagatcatatagccgaccaggggcagacttgcagtgagcacacaggcacctgatgccctgtccagagctgtcaccccttgtaggaaacttccactgggcacaccaatgtcctgagaaaaagataaaatgactagattaaaatgtccacattcaagcaaaaccaaaaagtttagaccaactatcgacatttgttttgttcttgtatttttcccatgaggaattcttactcaccttcaagctcatccccaattccttctgaaatacccttgacagctgcaacagcttgtcatttgacataccagcgtcgctcttactccaggaatcacgtttctttctttgctagccaaggacttgctcatttcaagcagtgggtttcaagtttacagaattccagcatggccagaagaatttacatagcacatctgagtcgatgacagccaaaatctggcctctaaaccagtctgattatagtctgtctcccctcctgaaagaatttcagccttccaaccagaaagctgctgggagcttggagtgattccatctggaaggccaagagccccatggaaaatgagctaattaatgagctccctggcatcaatgaaagctcaaaggtacagataataaagattatgtgatagtttataactctgggcaccatgcagtccttgcctaaattagatgctcgaagagcctgggaagagccaacccaaatgtgaatcatttcattttatgggtctagaccttgttcagaaaaacctctgcaagatacttctctcacctattacaacttgtaatattgtttaaaacatctactggcaagatgcctgaaagtcatttggttcaggttggcagtcaactgatattttgcaaaggaaaaaaaaatctcatttgagtataggcttctatggaagaagctggatatagaaaatggatgtggaagtctgcaggacaaaccaccccattgcttgtaaattttttttaaattaaaagaaatacaataaggcttttaacaagaactagcagtcccctaagtctcgctgcttagaagtaaccactttcaactctcttatgtttgcatttctacataacgtgcttacactttattttttaatttagaaacatctactggcttgctgtcacagtagaggaggatttcactcttaccataccgtgctttggttttccagtatagctagatcacatcatttagtacatttctattaggtgttgacattacctggagcacttaaggattgttgactcccaagcccagcagtgtgttatggttacatgtcctttctcctccaaatgtccccattaatttgctattctctctctttactttttttttttttttggtgtggcacattctttaataacttcctgaggaagagaacatgggaagtaaatatggttgtaaatattttgagatttttgcatgacttaagatgtctgtattctgcccttaacagaaatgtggctgagcatagaatgacaggtggaaaataataccctcccctagcccctcccaagcgtgctggttgagatttctgatgccattctgattcccgtacctttatatgtgacttaggtttttttatccacccttcctggaaacatttaagatctctttattcttggtgttctgaactgtcatgatggtgttgtatcccgggtgttaaaccttgtgctgggccttcatgggaaatttcttaaattttcttgtgattatttacattctttctttctggaccacctattatttcaatgttggaccctcccctacacccaggctgatgctctaatattttttatcttttctatttttcgtctatgtttctgatctgctttcaggaagaattattcatttttatcttcccaatctgaatgttttattgaatttttattttccaagttaataaaacctttggttattatcctgtctttgttttacagtgtcctgctcttgatgcgtggatgcagattttgtctctctgtggacgttaatgattgtggtctgaggggaagtcttttctgctccctgtgttgccctcattttctctgagttctctttattttggtggtctcagtctctatctttcacgttgtgaatttttctcaaatatatggtgatcctatggatctgttcatgttttaagagtgaggcatccaaaagctgattggaagttgtgtgtgccaactggtgagcttttccactagggtcaccaggtgggcacctggactcatcattggagaacactgcctgtcagtatttgcacgtgttttctctggggctcattctgtttcttgagagatattcccactactctccttcctgggaaacgggcatacacagggcttttagcctatgctgagtactcatgtggtttcaaaaatggtgtcccatctgggcagaagtccccatgagcacttggcttgactggcaaaggacaccttttgccccttcctccagacatacccagctctgagcttggacaatgctcgaggaacaatgaaaaggctagattttaactcctaattgccctctttagccaagtgcctctgtgcaatgcacaactgtaggaccatatccagagaccctggtctatactcagtgtgcccgagtcctgaccgctgagcaggcagcctcatcacccgtgagtatttagactttcattaagttgcttcaacctttgctgtgcctggtgtccctgagttggagctgctctgatttctccatggagtaggagcacagtggtcatctggctgcatgggaaggacaggggacctcagagccaataaatgccctggtcttcagccccatgtctcaccccatccctcctattccaatccccaagcctctcctggaggccacagggcatctctgctgaccactctgtggcctcccctctgcaggcatgtggttttaggatccccctccctgctcacttttccatcagttccattcctgcataaataggttgctagctcttgcttactgttctcttctgtattctgtgttcatggttgtattaatataactttcattcctctgctcctattttcatggggtttcatgagggaagaaacaggctcatgtgttcagtataccatcttgatccataaaccccatttgagttatctcacaggttgcttagggggcttgctgctctgactggtttgtgaacgtgccctgagtccagctgggactgcagcaacatccatcctgttgagctgtggtctgctaagtgattttgtgtaatgctgtgccaagtgcaggagagggatacatagcatggctaagctctgcttgaatgccatgattagttattaccttccttccttccccctggttttgctgcctattgtcagtaaatgatcttagatctcctgcctccccaaagatatagtctatgtggtggtctgggttctaggttttctttaccacccttgcttcacttaagaaacagaaaactggctaggcacagtagtggctcacacctataatcccagccctttgggaggccaaggcaggaggatcgcttgaggccaggaattcaagaccagcctgcacaacatagcaagactccatctctacaaaaagttaaatttaaattagtggtggcatncacttatagtcccagctactcnggaggatgaggcaggagaattgtttgagcccatgactttgaggttactgtgagctntgatcctgctattttactccacctgagtgacagagcgagacgctgtctcaaaaataaagaaacaagtagtccacacaggtgtttgccagcaaacaaacagcgcggattctctgttgaacgtggccaacattgcctcgtcgaagtttgtatcttgccatagttgatgatcaggtggtcggggcttcctggtcagacctgacctttgtggggagatgttctcccaccaaggctcagaagcaggacactcttgctgcccctcgggcagccacccagaacatgggcgtctccatttctgaggttcagcatagttccccccaccctcttcccatgcagtgcatgcctgctctttatcaggatggaacagagggaaggcagaggcactgggggcagcctgtgttgttgatctctgtaagtcacagactgttcgaaaacctcaggaattatgtaagcgttcagtgcctcatttaagagatgaaaaactgaagattagaaagaggaaacgactagtcgccctgctagttgatgacctccagatagccatcttcattcccagttaagtttactacaaaaccacagcctcagctgctgaagctaacctccctacccaccatcgctagggactcagaacaccatggagctcatctctccaacaaaagtcagaattagcaagtacagatgtgtcttacgaaaatgtcagaatccatcatggctgctttggtgaggagctgttctccttccgtggtcatgccattggaaggcagttgtatgacaagaatgctttcacatgagctccgattttcttaactctccagaaggacttcagaagcctctggagttttgagacacggcctctctctcccttctgcttggagacaccttcctgggggtctccactgcattccccgccggtattcctctgtggagccttgcgccctcaggtcccagaaatgggctgtgtgggagcttccagtcagcctggtatctcgggaccttctcagccaggaaatgagactgcacaaagccctgtgaggcccagctgtgttatttctccttccccgacattgcataatcactgctgacacagcatttggggaagatttaacgtcttgggccagcagctgccatctggaaccatcaccacatagcaggttgttctgtcccatccaactgatgagggggctgccctaatgacaaggtccaggacctgggttgggtggtggaaggctgggagctggagtgggcattattgtgcttctgtgctgaaaattgctatggctcttttcccctaacagccagcgtgggagaaccaaacatgagacacaagcatccccttgagctccacagatcttgcgccttgctctcatcaggcatttccttgganaacagcagtcagcagctcatggaagtgagcccggtgcacagactttgcatggactttgcacaggttccatttccatcgtgtgcagacacctgtatctttgggctccacgtgagcacctgccctcttcactctgattttttttttaagagacagcatcttactctgtcaccgaggctggagtacagtggtgtgatcacagctcactgcagcctgaaactcctgggctcaggcaatcctcctgcctcagcctcccgagtggctggtagtacaggtgcatgccaccacgcccacctaatttttttatcttttatagatacaggtctcactgttgctcaggctggtctcgaactcctggcctcaagtgatcctcctgccttggcctaccaaaatgctgggattataggcatgaaccactgtgcctggccttcactctgatttttcttaagagtcctacaggaccttcaggtcttgtcacttctctaccattgtgtgtgagacagggcatggggtgagcttggtcaggtgtgggtcaaaagcctggagactcagagctgctggttccccaagagcccacaaaagttatcagagtttctgagctgagtgttctgcagttgccagaccccacaatgctgggaatactggcttctttgtgtttagaacttgttctgagaaccttgatgagaacacatcaagcaagcagttcctcccagccagggctggagcaacatgccaaaaaacattcttgtctatgggaaaaagacaaccagtattttgtactgtttgaccaagttgtttttaaatatacacatgcctcaacaatccacggcctcaatcgcactgctaatttgtttaaatccctgacactcagatgtcaagaatagcttcatctagcagtgttctctttaaaggaacccttttttttgttttcattttaatcactgccttcttctctgggaggtattgtgggctagagaaagaagtcaggtttgggagtcagccagatttagattggagtcccagctctgtcaccagatctctgggtgatcttggcaaactaacttctgagcttctgtgcattataggcattcagcacatatttgttggatgaaaaatacttttcttgaaagtttatgaagttgtaggatgcccagcagcccccttttctctatttccttcctcttgaagcaagcgttgactatacctctttccctaacccttagtgtaccatagcttcttccaacctctctccaatccattacttttttctgagctaccctgtctcaaatctaactcaggcctttttgcaagaggaagtttaagccattgtttactcattaactcacttgacccttagaacaatcgtgggaggtgtttatttcggaaaggaagctaaagcacaggacagaaaaataaggtcatagcgtgaactagtaagtagcagaactgggaacataggactgttattttcaaacactctaaacttcactgcagttgcaaatttgcaaccaaaatggccgccttgaaagggtcttttgcagtaaaatctcagtgtccaacatcaaagacagttcttcagggcctccaattaactatacatcctgcccccagctgctcatctctgcacctctaacacgtacttcacagagtaggaaattgggctttctccttcaaaaagaaaagtagagaaggcctgagggcagtgtaattaaaatggagaagtagagaccacgaattacttggatgaattcataactggttggtctctgaggcagggattattatttttcctgtattttaagcttaaaagtagtgatttttgcattgttacaaaaaacaaaatagcaaaatatcatttgatacttgtattctgtttgcaatagctaccacttcctttagccccagcaaaaatcaataggtgtgtattctctacaagcccatgctgtgccagaatgccagtattgctaaatgtcatgcaaggatttagacacttttttaaaggaaactctgggagtgcctgttgtctggagagttgacattgtccaaagcaggccaacactggtatgggtatggagaacccacgtcctagctgtggctcacctgcagatgccttgaatttacctctctgggttggaagtgggaagacttcttttaaaagtcctttctaagtttaaaaatccaaaggttacgaaggtagtttttatttatctcaataagtggcctatttgcttaaagcaagtgtacctctgtatatcagcccaaagcttagggcagtgcttcttggctttagtatctgagaaaggtgcctttgggaagagtttggtcagacagaaggtagtctgaatcttaaaggtttcagatgaatgtttgaagtagaacctgggaaatctgcttcctagggctgttagaaggaaattggtctccttaaattacgtcagcatctgaggcagtttcctaagggaatttcttttaaattcaaaagttcaactgcaggaataaatagctgtacaggactagatcttcccatccctcatcttttccccttccccgagtaacgactcaaaaaggcttctgaaattctactcagaatcggagccgtttgcattccaacaaggatcccttaagccaaatgctggtgtgtttgtgtagaatgtccctggggtaggggcggtagctgtggggagggaatgtggtgcaggggacacctgccctctgcccttgaaattgcaccataagatgctgcctatgtcactcacagtggtgctgatactatccgccaaagacaaattgtgaacacggaaaaatggtcgttccctactgtacatcctcaggacagacttaactaaacttggagacaggagattgttcagaccatattgtagtgggtggtgatcattgttttattttgggggagtctggtctattgagcagattgaatgtttccttattgtgcagggcttaattgactatgtctgaaagtttttactgagagctctaagaaaactattgaggaaaatgaaatgttattttgtagtacaaggattatttttgtctatttaggatatacatagctgtagctttgtaaaaaaaaagatctttataaacaatatatgaatgtgccgtcttatttattgattactgtaaattaagatataaatggctatttgcataatttatacctgtgggaattaactggagtatttgttatttgactgttttctattaaggaatattaggcttggtgctatgatgaatgatcttgtaaaatcatgtgtattcttaagaaaatttttgaatataaatttcttgaactgaaaaaaacgtt

SEQ ID NO: 454117 - DNA, 12662 bp, Homo sapiens
  misc_feature (7934)..(7934): n is a, c, g, or t
  misc_feature (7956)..(7956): n is a, c, g, or t
  misc_feature (8012)..(8012): n is a, c, g, or t
  misc_feature (9393)..(9393): n is a, c, g, or t
gcgcgcccgccagccaggctctccgcgcccgccgcccgcgccgcgctggcccgggctctcccgcccgcgcttcatggctgcacacgagtgggactggttccaacgcgaggagctcatcgggcagattagcgacatccgagtgcagaacctgcaagttgagagggaaaatgtgcagaagaggacctttacacgatggataaatctacatctagaaaagtgcaacccacctctagaagttaaagatttattcgtcgatatacaagatggcaaaatcctaatggctttgttagaagtcctgtctgggcggaatctgctgcacgaatacaaatcctcgtcgcatcgtatttttcggttgaacaacatagcgaaagcacttaagtttttggaagatagcaatgtaaaactggttagcattgatgcagcagaaatagcagatggcaacccttctttggttcttgggctgatatggaacataatcctcttcttccagattaaggagctcacaggcaacctcagcagaaactctccatcttccagcttgtcccctggctcagggggcacagactcagactcatccttcccacccacacccactgcagagaggagcgtggcaatatcggtgaaagaccagaggaaggctatcaaggccctgttggcgtgggtgcagaggaaaacgagaaagtatggcgtggcggtgcaggactttgcgggcagttggaggagtgggctggctttcctggcggtgatcaaggccattgaccccagcctggtggacatgaaacaggccctggaaaattccacacgagaaaatctagagaaggctttcagcatcgcacaggatgccctgcacatccccaggctcctggagccagaagacatcatggttgacacaccagacgagcagtctatcatgacttacgtggcacagtttctagaacgttttccggagttggaagccgaagatattttcgattcagataaagaagttcctatcgaatccacttttgttcgcatcaaagaaactccttctgaacaggagagcaaagtcttcgttctgactgaaaatggggagcgtacctacactgttaaccatgaaaccagccacccaccaccctccaaagtctttgtctgtgacaagcccgagagcatgaaggaattccgcctggatggtgtttccagccatgcgctgtcagacagctccaccgagttcatgcaccagattattgaccaggtcctgcaagggggcccaggtaagaccagcgacatcagtgagccatctccagaatcctccattttatcatccagaaaggagaacgggaggtccaactctttgccgatcaagaaaacagttcactttgaggctgacacctacaaggatcctttctgcagtaagaacctgtccctttgctttgaagggagcccaagagtggcaaaggaatcattgaggcaggatggacatgtcttggcagttgaggttgctgaggaaaaggaacagaaacaggaatcctcgaagattccagaatcctcctctgacaaggtcgctggtgacatttttttggtggagggcacaaacaataattctcagtcttcttcctgtaatggtgctttagagagtacagcccgccacgatgaagaaagtcactctctttcacccccaggagaaaatactgtgatggccgattccttccagatcaaggttaacctgatgactgtagaagctttagaggagggagactattttgaagccatcccattaaaagcctcaaaatttaacagcgacctaatagattttgcttctaccagccaggctttcaacaaagttccttcacctcatgagacaaaacctgacgaggatgctgaggcttttgagaatcatgctgaaaaactaggtaaaaggagtattaaatctgctcacaaaaagaaggattcgccagagcctcaagttaagatggacaaacatgaacctcatcaggactccggagaagaagctgaaggctgtccttcagccccagaagagacaccagtggataaaaagccagaggtgcatgaaaaggccaagagaaagtccacccgtcctcattatgaggaagagggagaagacgatgacctccagggtgtgggcgaggaattatcttccagccccccaagcagctgtgtcagcttggagacccttgggagtcacagcgaagaaggcctggatttcaagccctccccacccctctcaaaggtttccgtcattccccacgacctcttctatttcccacactatgaggttcccctggctgcagttttggaggcttatgtagaagacccggaggatctaaaaaatgaagaaatggatctcgaagagccagagggctatatgccagacctggactccagggaggaggaggccgatggctctcagagcagctccagttcctcggtgccaggagagagcctccccagtgccagcgaccaggtgctgtatctcagcaggggtggtgtgggtaccacaccagcctcagaacccgctccactggccccccatgaggaccaccagcaaagggagaccaaagagaatgaccccatggacagccatcagtcccaggaatccccaaacctggaaaacatagcaaaccccctagaagaaaatgtaacgaaagaatcaatcagtagtaaaaaaaaggaaaaaaggaaacatgtggaccacgtagaaagttcactatttgtagcaccaggaagtgttcaatcctcagatgacctagaagaagacagtagcgactacagcattccttccaggactagtcacagtgactccagcatttaccttcgacgacatactcataggtcttcggaatcggatcattttagctatgttcagttgaggaacgcagcagatctggatgacagaagaaaccgaatattaaccaggaaggccaacagctcaggagaagccatgtcactggggagccacagcccgcagagtgactccctgacacagcttgtccagcagccggatatgatgtattttattctcttcctgtggctcctggtgtactgcttgctgctcttcccacaactggatgttagcaggctctgatacgtgtgtctggataataaaaaagacaggaccctgaaaaggggcggggttacttcattttattttgggttctgggtggggcacttctacagacagttgaggacctccgaggaaacttagaccccctttctcgctattgtggttttttttttttttcaggtttccttttttttctggacaacctgagcatgcttttttctttggctgtgtactcaaaactcaggcatgcagctggatccgtaggtggggttttgtccttgtgtgccttgctgggttggatagggagcattgttagtgatcattagcccgcctggatcttagcacaccccacattgcaggttcacacgctggatgaacttgagtttcttacctctcagatgaagggctgcttaatgagaaagagggtgggcaccccaggccaagccccagctggggagagagctgccacgttttcctccaagcgtgggtgtttgagagaaggtgctggggtccatgcacctgtcgcagtccggtaactggttgcattcactaggggaaatccgagcagccagctctgtgtaagcacatccaggaatggcagaatccagggaggaaggtgaaagctgtgttgagagccactgtgtgctctttttcaccctgttttttttgttgtttttttgttttgttttttgtttgaggggagataacacttgaaattcagttttccattgattggattgagatagaaccatgattttcaaaccagatcgccagggcccagcagggccatataaaagccatgaggagtggctgggctggaatcagctcccagcagtgctggagctgggtggtggggtagcttcctgcccactaaagctttggtgcacacctccctcagaatgcatgtcttggaacgggcattctttgtggtcacttgtaatgggtttcttgaagaggctttctggacagcactccgggagcaggccagcacaggaggtttgtgaaagaagagaggcatctctagcacccctgcccccagtcttcctcagccccaggctccctctgctctctcctccctgccaagactcaggtccgtggtgagtctctgcattggttcctcctccccttgctctccccttcagaaagcatgtaccaggcaacccttataaaatcacaaatgagtcaggaggggactcagtgagcatcttgtctagctggacccagagagacagagcagcttgaccaagatcatatagccgaccaggggcagacttgcagtgagcacacaggcacctgatgccctgtccagagctgtcaccccttgtaggaaacttccactgggcacaccaatgtcctgagaaaaagataaaatgactagattaaaatgtccacattcaagcaaaaccaaaaagtttagaccaactatcgacatttgttttgttcttgtatttttcccatgaggaattcttactcaccttcaagctcatccccaattccttctgaaatacccttgacagctgcaacagcttgtcatttgacataccagcgtcgctcttactccaggaatcacgtttctttctttgctagccaaggacttgctcatttcaagcagtgggtttcaagtttacagaattccagcatggccagaagaatttacatagcacatctgagtcgatgacagccaaaatctggcctctaaaccagtctgattatagtctgtctcccctcctgaaagaatttcagccttccaaccagaaagctgctgggagcttggagtgattccatctggaaggccaagagccccatggaaaatgagctaattaatgagctccctggcatcaatgaaagctcaaaggtacagataataaagattatgtgatagtttataactctgggcaccatgcagtccttgcctaaattagatgctcgaagagcctgggaagagccaacccaaatgtgaatcatttcattttatgggtctagaccttgttcagaaaaacctctgcaagatacttctctcacctattacaacttgtaatattgtttaaaacatctactggcaagatgcctgaaagtcatttggttcaggttggcagtcaactgatattttgcaaaggaaaaaaaaatctcatttgagtataggcttctatggaagaagctggatatagaaaatggatgtggaagtctgcaggacaaaccaccccattgcttgtaaattttttttaaattaaaagaaatacaataaggcttttaacaagaactagcagtcccctaagtctcgctgcttagaagtaaccactttcaactctcttatgtttgcatttctacataacgtgcttacactttattttttaatttagaaacatctactggcttgctgtcacagtagaggaggatttcactcttaccataccgtgctttggttttccagtatagctagatcacatcatttagtacatttctattaggtgttgacattacctggagcacttaaggattgttgactcccaagcccagcagtgtgttatggttacatgtcctttctcctccaaatgtccccattaatttgctattctctctctttactttttttttttttttggtgtggcacattctttaataacttcctgaggaagagaacatgggaagtaaatatggttgtaaatattttgagatttttgcatgacttaagatgtctgtattctgcccttaacagaaatgtggctgagcatagaatgacaggtggaaaataataccctcccctagcccctcccaagcgtgctggttgagatttctgatgccattctgattcccgtacctttatatgtgacttaggtttttttatccacccttcctggaaacatttaagatctctttattcttggtgttctgaactgtcatgatggtgttgtatcccgggtgttaaaccttgtgctgggccttcatgggaaatttcttaaattttcttgtgattatttacattctttctttctggaccacctattatttcaatgttggaccctcccctacacccaggctgatgctctaatattttttatcttttctatttttcgtctatgtttctgatctgctttcaggaagaattattcatttttatcttcccaatctgaatgttttattgaatttttattttccaagttaataaaacctttggttattatcctgtctttgttttacagtgtcctgctcttgatgcgtggatgcagattttgtctctctgtggacgttaatgattgtggtctgaggggaagtcttttctgctccctgtgttgccctcattttctctgagttctctttattttggtggtctcagtctctatctttcacgttgtgaatttttctcaaatatatggtgatcctatggatctgttcatgttttaagagtgaggcatccaaaagctgattggaagttgtgtgtgccaactggtgagcttttccactagggtcaccaggtgggcacctggactcatcattggagaacactgcctgtcagtatttgcacgtgttttctctggggctcattctgtttcttgagagatattcccactactctccttcctgggaaacgggcatacacagggcttttagcctatgctgagtactcatgtggtttcaaaaatggtgtcccatctgggcagaagtccccatgagcacttggcttgactggcaaaggacaccttttgccccttcctccagacatacccagctctgagcttggacaatgctcgaggaacaatgaaaaggctagattttaactcctaattgccctctttagccaagtgcctctgtgcaatgcacaactgtaggaccatatccagagaccctggtctatactcagtgtgcccgagtcctgaccgctgagcaggcagcctcatcacccgtgagtatttagactttcattaagttgcttcaacctttgctgtgcctggtgtccctgagttggagctgctctgatttctccatggagtaggagcacagtggtcatctggctgcatgggaaggacaggggacctcagagccaataaatgccctggtcttcagccccatgtctcaccccatccctcctattccaatccccaagcctctcctggaggccacagggcatctctgctgaccactctgtggcctcccctctgcaggcatgtggttttaggatccccctccctgctcacttttccatcagttccattcctgcataaataggttgctagctcttgcttactgttctcttctgtattctgtgttcatggttgtattaatataactttcattcctctgctcctattttcatggggtttcatgagggaagaaacaggctcatgtgttcagtataccatcttgatccataaaccccatttgagttatctcacaggttgcttagggggcttgctgctctgactggtttgtgaacgtgccctgagtccagctgggactgcagcaacatccatcctgttgagctgtggtctgctaagtgattttgtgtaatgctgtgccaagtgcaggagagggatacatagcatggctaagctctgcttgaatgccatgattagttattaccttccttccttccccctggttttgctgcctattgtcagtaaatgatcttagatctcctgcctccccaaagatatagtctatgtggtggtctgggttctaggttttctttaccacccttgcttcacttaagaaacagaaaactggctaggcacagtagtggctcacacctataatcccagccctttgggaggccaaggcaggaggatcgcttgaggccaggaattcaagaccagcctgcacaacatagcaagactccatctctacaaaaagttaaatttaaattagtggtggcatncacttatagtcccagctactcnggaggatgaggcaggagaattgtttgagcccatgactttgaggttactgtgagctntgatcctgctattttactccacctgagtgacagagcgagacgctgtctcaaaaataaagaaacaagtagtccacacaggtgtttgccagcaaacaaacagcgcggattctctgttgaacgtggccaacattgcctcgtcgaagtttgtatcttgccatagttgatgatcaggtggtcggggcttcctggtcagacctgacctttgtggggagatgttctcccaccaaggctcagaagcaggacactcttgctgcccctcgggcagccacccagaacatgggcgtctccatttctgaggttcagcatagttccccccaccctcttcccatgcagtgcatgcctgctctttatcaggatggaacagagggaaggcagaggcactgggggcagcctgtgttgttgatctctgtaagtcacagactgttcgaaaacctcaggaattatgtaagcgttcagtgcctcatttaagagatgaaaaactgaagattagaaagaggaaacgactagtcgccctgctagttgatgacctccagatagccatcttcattcccagttaagtttactacaaaaccacagcctcagctgctgaagctaacctccctacccaccatcgctagggactcagaacaccatggagctcatctctccaacaaaagtcagaattagcaagtacagatgtgtcttacgaaaatgtcagaatccatcatggctgctttggtgaggagctgttctccttccgtggtcatgccattggaaggcagttgtatgacaagaatgctttcacatgagctccgattttcttaactctccagaaggacttcagaagcctctggagttttgagacacggcctctctctcccttctgcttggagacaccttcctgggggtctccactgcattccccgccggtattcctctgtggagccttgcgccctcaggtcccagaaatgggctgtgtgggagcttccagtcagcctggtatctcgggaccttctcagccaggaaatgagactgcacaaagccctgtgaggcccagctgtgttatttctccttccccgacattgcataatcactgctgacacagcatttggggaagatttaacgtcttgggccagcagctgccatctggaaccatcaccacatagcaggttgttctgtcccatccaactgatgagggggctgccctaatgacaaggtccaggacctgggttgggtggtggaaggctgggagctggagtgggcattattgtgcttctgtgctgaaaattgctatggctcttttcccctaacagccagcgtgggagaaccaaacatgagacacaagcatccccttgagctccacagatcttgcgccttgctctcatcaggcatttccttgganaacagcagtcagcagctcatggaagtgagcccggtgcacagactttgcatggactttgcacaggttccatttccatcgtgtgcagacacctgtatctttgggctccacgtgagcacctgccctcttcactctgattttttttttaagagacagcatcttactctgtcaccgaggctggagtacagtggtgtgatcacagctcactgcagcctgaaactcctgggctcaggcaatcctcctgcctcagcctcccgagtggctggtagtacaggtgcatgccaccacgcccacctaatttttttatcttttatagatacaggtctcactgttgctcaggctggtctcgaactcctggcctcaagtgatcctcctgccttggcctaccaaaatgctgggattataggcatgaaccactgtgcctggccttcactctgatttttcttaagagtcctacaggaccttcaggtcttgtcacttctctaccattgtgtgtgagacagggcatggggtgagcttggtcaggtgtgggtcaaaagcctggagactcagagctgctggttccccaagagcccacaaaagttatcagagtttctgagctgagtgttctgcagttgccagaccccacaatgctgggaatactggcttctttgtgtttagaacttgttctgagaaccttgatgagaacacatcaagcaagcagttcctcccagccagggctggagcaacatgccaaaaaacattcttgtctatgggaaaaagacaaccagtattttgtactgtttgaccaagttgtttttaaatatacacatgcctcaacaatccacggcctcaatcgcactgctaatttgtttaaatccctgacactcagatgtcaagaatagcttcatctagcagtgttctctttaaaggaacccttttttttgttttcattttaatcactgccttcttctctgggaggtattgtgggctagagaaagaagtcaggtttgggagtcagccagatttagattggagtcccagctctgtcaccagatctctgggtgatcttggcaaactaacttctgagcttctgtgcattataggcattcagcacatatttgttggatgaaaaatacttttcttgaaagtttatgaagttgtaggatgcccagcagcccccttttctctatttccttcctcttgaagcaagcgttgactatacctctttccctaacccttagtgtaccatagcttcttccaacctctctccaatccattacttttttctgagctaccctgtctcaaatctaactcaggcctttttgcaagaggaagtttaagccattgtttactcattaactcacttgacccttagaacaatcgtgggaggtgtttatttcggaaaggaagctaaagcacaggacagaaaaataaggtcatagcgtgaactagtaagtagcagaactgggaacataggactgttattttcaaacactctaaacttcactgcagttgcaaatttgcaaccaaaatggccgccttgaaagggtcttttgcagtaaaatctcagtgtccaacatcaaagacagttcttcagggcctccaattaactatacatcctgcccccagctgctcatctctgcacctctaacacgtacttcacagagtaggaaattgggctttctccttcaaaaagaaaagtagagaaggcctgagggcagtgtaattaaaatggagaagtagagaccacgaattacttggatgaattcataactggttggtctctgaggcagggattattatttttcctgtattttaagcttaaaagtagtgatttttgcattgttacaaaaaacaaaatagcaaaatatcatttgatacttgtattctgtttgcaatagctaccacttcctttagccccagcaaaaatcaataggtgtgtattctctacaagcccatgctgtgccagaatgccagtattgctaaatgtcatgcaaggatttagacacttttttaaaggaaactctgggagtgcctgttgtctggagagttgacattgtccaaagcaggccaacactggtatgggtatggagaacccacgtcctagctgtggctcacctgcagatgccttgaatttacctctctgggttggaagtgggaagacttcttttaaaagtcctttctaagtttaaaaatccaaaggttacgaaggtagtttttatttatctcaataagtggcctatttgcttaaagcaagtgtacctctgtatatcagcccaaagcttagggcagtgcttcttggctttagtatctgagaaaggtgcctttgggaagagtttggtcagacagaaggtagtctgaatcttaaaggtttcagatgaatgtttgaagtagaacctgggaaatctgcttcctagggctgttagaaggaaattggtctccttaaattacgtcagcatctgaggcagtttcctaagggaatttcttttaaattcaaaagttcaactgcaggaataaatagctgtacaggactagatcttcccatccctcatcttttccccttccccgagtaacgactcgatcccttaagccaaatgctggtgtgtttgtgtagaatgtccctggggtaggggcggtagctgtggggagggaatgtggtgcaggggacacctgccctctgcccttgaaattgcaccataagatgctgcctatgtcactcacagtggtgctgatactatccgccaaagacaaattgtgaacacggaaaaatggtcgttccctactgtacatcctcaggacagacttaactaaacttggagacaggagattgttcagaccatattgtagtgggtggtgatcattgttttattttgggggagtctggtctattgagcagattgaatgtttccttattgtgcagggcttaattgactatgtctgaaagtttttactgagagctctaagaaaactattgaggaaaatgaaatgttattttgtagtacaaggattatttttgtctatttaggatatacatagctgtagctttgtaaaaaaaaagatctttataaacaatatatgaatgtgccgtcttatttattgattactgtaaattaagatataaatggctatttgcataatttatacctgtgggaattaactggagtatttgttatttgactgttttctattaaggaatattaggcttggtgctatgatgaatgatcttgtaaaatcatgtgtattcttaagaaaatttttgaatataaatttcttgaactgaaaaaaacgtt

SEQ ID NO: 454118 - DNA, 12235 bp, Homo sapiens
  misc_feature (7934)..(7934): n is a, c, g, or t
  misc_feature (7956)..(7956): n is a, c, g, or t
  misc_feature (8012)..(8012): n is a, c, g, or t
  misc_feature (9393)..(9393): n is a, c, g, or t
gcgcgcccgccagccaggctctccgcgcccgccgcccgcgccgcgctggcccgggctctcccgcccgcgcttcatggctgcacacgagtgggactggttccaacgcgaggagctcatcgggcagattagcgacatccgagtgcagaacctgcaagttgagagggaaaatgtgcagaagaggacctttacacgatggataaatctacatctagaaaagtgcaacccacctctagaagttaaagatttattcgtcgatatacaagatggcaaaatcctaatggctttgttagaagtcctgtctgggcggaatctgctgcacgaatacaaatcctcgtcgcatcgtatttttcggttgaacaacatagcgaaagcacttaagtttttggaagatagcaatgtaaaactggttagcattgatgcagcagaaatagcagatggcaacccttctttggttcttgggctgatatggaacataatcctcttcttccagattaaggagctcacaggcaacctcagcagaaactctccatcttccagcttgtcccctggctcagggggcacagactcagactcatccttcccacccacacccactgcagagaggagcgtggcaatatcggtgaaagaccagaggaaggctatcaaggccctgttggcgtgggtgcagaggaaaacgagaaagtatggcgtggcggtgcaggactttgcgggcagttggaggagtgggctggctttcctggcggtgatcaaggccattgaccccagcctggtggacatgaaacaggccctggaaaattccacacgagaaaatctagagaaggctttcagcatcgcacaggatgccctgcacatccccaggctcctggagccagaagacatcatggttgacacaccagacgagcagtctatcatgacttacgtggcacagtttctagaacgttttccggagttggaagccgaagatattttcgattcagataaagaagttcctatcgaatccacttttgttcgcatcaaagaaactccttctgaacaggagagcaaagtcttcgttctgactgaaaatggggagcgtacctacactgttaaccatgaaaccagccacccaccaccctccaaagtctttgtctgtgacaagcccgagagcatgaaggaattccgcctggatggtgtttccagccatgcgctgtcagacagctccaccgagttcatgcaccagattattgaccaggtcctgcaagggggcccaggtaagaccagcgacatcagtgagccatctccagaatcctccattttatcatccagaaaggagaacgggaggtccaactctttgccgatcaagaaaacagttcactttgaggctgacacctacaaggatcctttctgcagtaagaacctgtccctttgctttgaagggagcccaagagtggcaaaggaatcattgaggcaggatggacatgtcttggcagttgaggttgctgaggaaaaggaacagaaacaggaatcctcgaagattccagaatcctcctctgacaaggtcgctggtgacatttttttggtggagggcacaaacaataattctcagtcttcttcctgtaatggtgctttagagagtacagcccgccacgatgaagaaagtcactctctttcacccccaggagaaaatactgtgatggccgattccttccagatcaaggttaacctgatgactgtagaagctttagaggagggagactattttgaagccatcccattaaaagcctcaaaatttaacagcgacctaatagattttgcttctaccagccaggctttcaacaaagttccttcacctcatgagacaaaacctgacgaggatgctgaggcttttgagaatcatgctgaaaaactaggtaaaaggagtattaaatctgctcacaaaaagaaggattcgccagagcctcaagttaagatggacaaacatgaacctcatcaggactccggagaagaagctgaaggctgtccttcagccccagaagagacaccagtggataaaaagccagaggtgcatgaaaaggccaagagaaagtccacccgtcctcattatgaggaagagggagaagacgatgacctccagggtgtgggcgaggaattatcttccagccccccaagcagctgtgtcagcttggagacccttgggagtcacagcgaagaaggcctggatttcaagccctccccacccctctcaaaggtttccgtcattccccacgacctcttctatttcccacactatgaggttcccctggctgcagttttggaggcttatgtagaagacccggaggatctaaaaaatgaagaaatggatctcgaagagccagagggctatatgccagacctggactccagggaggaggaggccgatggctctcagagcagctccagttcctcggtgccaggagagagcctccccagtgccagcgaccaggtgctgtatctcagcaggggtggtgtgggtaccacaccagcctcagaacccgctccactggccccccatgaggaccaccagcaaagggagaccaaagagaatgaccccatggacagccatcagtcccaggaatccccaaacctggaaaacatagcaaaccccctagaagaaaatgtaacgaaagaatcaatcagtagtaaaaaaaaggaaaaaaggaaacatgtggaccacgtagaaagttcactatttgtagcaccaggaagtgttcaatcctcagatgacctagaagaagacagtagcgactacagcattccttccaggactagtcacagtgactccagcatttaccttcgacgacatactcataggtcttcggaatcggatcattttagctatgttcagttgaggaacgcagcagatctggatgacagaagaaaccgaatattaaccaggaaggccaacagctcaggagaagccatgtcactggggagccacagcccgcagagtgactccctgacacagcttgtccagcagccggatatgatgtattttattctcttcctgtggctcctggtgtactgcttgctgctcttcccacaactggatgttagcaggctctgatacgtgtgtctggataataaaaaagacaggaccctgaaaaggggcggggttacttcattttattttgggttctgggtggggcacttctacagacagttgaggacctccgaggaaacttagaccccctttctcgctattgtggttttttttttttttcaggtttccttttttttctggacaacctgagcatgcttttttctttggctgtgtactcaaaactcaggcatgcagctggatccgtaggtggggttttgtccttgtgtgccttgctgggttggatagggagcattgttagtgatcattagcccgcctggatcttagcacaccccacattgcaggttcacacgctggatgaacttgagtttcttacctctcagatgaagggctgcttaatgagaaagagggtgggcaccccaggccaagccccagctggggagagagctgccacgttttcctccaagcgtgggtgtttgagagaaggtgctggggtccatgcacctgtcgcagtccggtaactggttgcattcactaggggaaatccgagcagccagctctgtgtaagcacatccaggaatggcagaatccagggaggaaggtgaaagctgtgttgagagccactgtgtgctctttttcaccctgttttttttgttgtttttttgttttgttttttgtttgaggggagataacacttgaaattcagttttccattgattggattgagatagaaccatgattttcaaaccagatcgccagggcccagcagggccatataaaagccatgaggagtggctgggctggaatcagctcccagcagtgctggagctgggtggtggggtagcttcctgcccactaaagctttggtgcacacctccctcagaatgcatgtcttggaacgggcattctttgtggtcacttgtaatgggtttcttgaagaggctttctggacagcactccgggagcaggccagcacaggaggtttgtgaaagaagagaggcatctctagcacccctgcccccagtcttcctcagccccaggctccctctgctctctcctccctgccaagactcaggtccgtggtgagtctctgcattggttcctcctccccttgctctccccttcagaaagcatgtaccaggcaacccttataaaatcacaaatgagtcaggaggggactcagtgagcatcttgtctagctggacccagagagacagagcagcttgaccaagatcatatagccgaccaggggcagacttgcagtgagcacacaggcacctgatgccctgtccagagctgtcaccccttgtaggaaacttccactgggcacaccaatgtcctgagaaaaagataaaatgactagattaaaatgtccacattcaagcaaaaccaaaaagtttagaccaactatcgacatttgttttgttcttgtatttttcccatgaggaattcttactcaccttcaagctcatccccaattccttctgaaatacccttgacagctgcaacagcttgtcatttgacataccagcgtcgctcttactccaggaatcacgtttctttctttgctagccaaggacttgctcatttcaagcagtgggtttcaagtttacagaattccagcatggccagaagaatttacatagcacatctgagtcgatgacagccaaaatctggcctctaaaccagtctgattatagtctgtctcccctcctgaaagaatttcagccttccaaccagaaagctgctgggagcttggagtgattccatctggaaggccaagagccccatggaaaatgagctaattaatgagctccctggcatcaatgaaagctcaaaggtacagataataaagattatgtgatagtttataactctgggcaccatgcagtccttgcctaaattagatgctcgaagagcctgggaagagccaacccaaatgtgaatcatttcattttatgggtctagaccttgttcagaaaaacctctgcaagatacttctctcacctattacaacttgtaatattgtttaaaacatctactggcaagatgcctgaaagtcatttggttcaggttggcagtcaactgatattttgcaaaggaaaaaaaaatctcatttgagtataggcttctatggaagaagctggatatagaaaatggatgtggaagtctgcaggacaaaccaccccattgcttgtaaattttttttaaattaaaagaaatacaataaggcttttaacaagaactagcagtcccctaagtctcgctgcttagaagtaaccactttcaactctcttatgtttgcatttctacataacgtgcttacactttattttttaatttagaaacatctactggcttgctgtcacagtagaggaggatttcactcttaccataccgtgctttggttttccagtatagctagatcacatcatttagtacatttctattaggtgttgacattacctggagcacttaaggattgttgactcccaagcccagcagtgtgttatggttacatgtcctttctcctccaaatgtccccattaatttgctattctctctctttactttttttttttttttggtgtggcacattctttaataacttcctgaggaagagaacatgggaagtaaatatggttgtaaatattttgagatttttgcatgacttaagatgtctgtattctgcccttaacagaaatgtggctgagcatagaatgacaggtggaaaataataccctcccctagcccctcccaagcgtgctggttgagatttctgatgccattctgattcccgtacctttatatgtgacttaggtttttttatccacccttcctggaaacatttaagatctctttattcttggtgttctgaactgtcatgatggtgttgtatcccgggtgttaaaccttgtgctgggccttcatgggaaatttcttaaattttcttgtgattatttacattctttctttctggaccacctattatttcaatgttggaccctcccctacacccaggctgatgctctaatattttttatcttttctatttttcgtctatgtttctgatctgctttcaggaagaattattcatttttatcttcccaatctgaatgttttattgaatttttattttccaagttaataaaacctttggttattatcctgtctttgttttacagtgtcctgctcttgatgcgtggatgcagattttgtctctctgtggacgttaatgattgtggtctgaggggaagtcttttctgctccctgtgttgccctcattttctctgagttctctttattttggtggtctcagtctctatctttcacgttgtgaatttttctcaaatatatggtgatcctatggatctgttcatgttttaagagtgaggcatccaaaagctgattggaagttgtgtgtgccaactggtgagcttttccactagggtcaccaggtgggcacctggactcatcattggagaacactgcctgtcagtatttgcacgtgttttctctggggctcattctgtttcttgagagatattcccactactctccttcctgggaaacgggcatacacagggcttttagcctatgctgagtactcatgtggtttcaaaaatggtgtcccatctgggcagaagtccccatgagcacttggcttgactggcaaaggacaccttttgccccttcctccagacatacccagctctgagcttggacaatgctcgaggaacaatgaaaaggctagattttaactcctaattgccctctttagccaagtgcctctgtgcaatgcacaactgtaggaccatatccagagaccctggtctatactcagtgtgcccgagtcctgaccgctgagcaggcagcctcatcacccgtgagtatttagactttcattaagttgcttcaacctttgctgtgcctggtgtccctgagttggagctgctctgatttctccatggagtaggagcacagtggtcatctggctgcatgggaaggacaggggacctcagagccaataaatgccctggtcttcagccccatgtctcaccccatccctcctattccaatccccaagcctctcctggaggccacagggcatctctgctgaccactctgtggcctcccctctgcaggcatgtggttttaggatccccctccctgctcacttttccatcagttccattcctgcataaataggttgctagctcttgcttactgttctcttctgtattctgtgttcatggttgtattaatataactttcattcctctgctcctattttcatggggtttcatgagggaagaaacaggctcatgtgttcagtataccatcttgatccataaaccccatttgagttatctcacaggttgcttagggggcttgctgctctgactggtttgtgaacgtgccctgagtccagctgggactgcagcaacatccatcctgttgagctgtggtctgctaagtgattttgtgtaatgctgtgccaagtgcaggagagggatacatagcatggctaagctctgcttgaatgccatgattagttattaccttccttccttccccctggttttgctgcctattgtcagtaaatgatcttagatctcctgcctccccaaagatatagtctatgtggtggtctgggttctaggttttctttaccacccttgcttcacttaagaaacagaaaactggctaggcacagtagtggctcacacctataatcccagccctttgggaggccaaggcaggaggatcgcttgaggccaggaattcaagaccagcctgcacaacatagcaagactccatctctacaaaaagttaaatttaaattagtggtggcatncacttatagtcccagctactcnggaggatgaggcaggagaattgtttgagcccatgactttgaggttactgtgagctntgatcctgctattttactccacctgagtgacagagcgagacgctgtctcaaaaataaagaaacaagtagtccacacaggtgtttgccagcaaacaaacagcgcggattctctgttgaacgtggccaacattgcctcgtcgaagtttgtatcttgccatagttgatgatcaggtggtcggggcttcctggtcagacctgacctttgtggggagatgttctcccaccaaggctcagaagcaggacactcttgctgcccctcgggcagccacccagaacatgggcgtctccatttctgaggttcagcatagttccccccaccctcttcccatgcagtgcatgcctgctctttatcaggatggaacagagggaaggcagaggcactgggggcagcctgtgttgttgatctctgtaagtcacagactgttcgaaaacctcaggaattatgtaagcgttcagtgcctcatttaagagatgaaaaactgaagattagaaagaggaaacgactagtcgccctgctagttgatgacctccagatagccatcttcattcccagttaagtttactacaaaaccacagcctcagctgctgaagctaacctccctacccaccatcgctagggactcagaacaccatggagctcatctctccaacaaaagtcagaattagcaagtacagatgtgtcttacgaaaatgtcagaatccatcatggctgctttggtgaggagctgttctccttccgtggtcatgccattggaaggcagttgtatgacaagaatgctttcacatgagctccgattttcttaactctccagaaggacttcagaagcctctggagttttgagacacggcctctctctcccttctgcttggagacaccttcctgggggtctccactgcattccccgccggtattcctctgtggagccttgcgccctcaggtcccagaaatgggctgtgtgggagcttccagtcagcctggtatctcgggaccttctcagccaggaaatgagactgcacaaagccctgtgaggcccagctgtgttatttctccttccccgacattgcataatcactgctgacacagcatttggggaagatttaacgtcttgggccagcagctgccatctggaaccatcaccacatagcaggttgttctgtcccatccaactgatgagggggctgccctaatgacaaggtccaggacctgggttgggtggtggaaggctgggagctggagtgggcattattgtgcttctgtgctgaaaattgctatggctcttttcccctaacagccagcgtgggagaaccaaacatgagacacaagcatccccttgagctccacagatcttgcgccttgctctcatcaggcatttccttgganaacagcagtcagcagctcatggaagtgagcccggtgcacagactttgcatggactttgcacaggttccatttccatcgtgtgcagacacctgtatctttgggctccacgtgagcacctgccctcttcactctgattttttttttaagagacagcatcttactctgtcaccgaggctggagtacagtggtgtgatcacagctcactgcagcctgaaactcctgggctcaggcaatcctcctgcctcagcctcccgagtggctggtagtacaggtgcatgccaccacgcccacctaatttttttatcttttatagatacaggtctcactgttgctcaggctggtctcgaactcctggcctcaagtgatcctcctgccttggcctaccaaaatgctgggattataggcatgaaccactgtgcctggccttcactctgatttttcttaagagtcctacaggaccttcaggtcttgtcacttctctaccattgtgtgtgagacagggcatggggtgagcttggtcaggtgtgggtcaaaagcctggagactcagagctgctggttccccaagagcccacaaaagttatcagagtttctgagctgagtgttctgcagttgccagaccccacaatgctgggaatactggcttctttgtgtttagaacttgttctgagaaccttgatgagaacacatcaagcaagcagttcctcccagccagggctggagcaacatgccaaaaaacattcttgtctatgggaaaaagacaaccagtattttgtactgtttgaccaagttgtttttaaatatacacatgcctcaacaatccacggcctcaatcgcactgctaatttgtttaaatccctgacactcagatgtcaagaatagcttcatctagcagtgttctctttaaaggaacccttttttttgttttcattttaatcactgccttcttctctgggaggtattgtgggctagagaaagaagtcaggtttgggagtcagccagatttagattggagtcccagctctgtcaccagatctctgggtgatcttggcaaactaacttctgagcttctgtgcattataggcattcagcacatatttgttggatgaaaaatacttttcttgaaagtttatgaagttgtaggatgcccagcagcccccttttctctatttccttcctcttgaagcaagcgttgactatacctctttccctaacccttagtgtaccatagcttcttccaacctctctccaatccattacttttttctgagctaccctgtctcaaatctaactcaggcctttttgcaagaggaagtttaagccattgtttactcattaactcacttgacccttagaacaatcgtgggaggtgtttatttcggaaaggaagctaaagcacaggacagaaaaataaggtcatagcgtgaactagtaagtagcagaactgggaacataggactgttattttcaaacactctaaacttcactgcagttgcaaatttgcaaccaaaatggccgccttgaaagggtcttttgcagtaaaatctcagtgtccaacatcaaagacagttcttcagggcctccaattaactatacatcctgcccccagctgctcatctctgcacctctaacacgtacttcacagagtaggaaattgggctttctccttcaaaaagaaaagtagagaaggcctgagggcagtgtaattaaaatggagaagtagagaccacgaattacttggatgaattcataactggttggtctctgaggcagggattattatttttcctgtattttaagcttaaaagtagtgatttttgcattgttacaaaaaacaaaatagcaaaatatcatttgatacttgtattctgtttgcaatagctaccacttcctttagccccagcaaaaatcaataggtgtgtattctctacaagcccatgctgtgccagaatgccagtattgctaaatgtcatgcaaggatttagacacttttttaaaggaaactctgggagtgcctgttgtctggagagttgacattgtccaaagcaggccaacactggtatgggtatggagaacccacgtcctagctgtggctcacctgcagatgccttgaatttacctctctgggttggaagtgggaagacttcttttaaaagtcctttctaagtttaaaaatccaaaggttacgaaggtagtttttatttatctcaataagtggcctatttgcttaaagcaagtgtacctctgtatatcagcccaaagcttagggcagtgcttcttggctttagtatctgagaaaggtgcctttgggaagagtttggtcagacagaaggtagtctgaatcttaaaggtttcagatgaatgtttgaagtagaacctgggaaatctgcttcctagggctgttagaaggaaattggtctccttaaattacgtcagcatctgaggcagtttcctaagggaatttcttttaaattcaaaagttcaactgcaggaataaatagctgtacaggactagatcttcccatccctcatcttttccccttccccgagtaacgactcaaaaaggcttctgaaattctactcagaatcggagccgtttgcattccaacaaggatcccttaagccaaatgctggtgtgtttgtgtagaatgtccctggggtaggggcggtagctgtggggagggaatgtggtgcaggggacacctgccctctgcccttgaaattgcaccataagatgctgcctatgtcactcacagtggtgctgatactatccgccaaagacaaattgtgattgtcataccatattgaatggttgtgaccattgttattttggggaatctgct

SEQ ID NO: 454119 - DNA, 9651 bp, Homo sapiens
  misc_feature (6329)..(6329): n is a, c, g, or t
gcgcgcccgccagccaggctctccgcgcccgccgcccgcgccgcgctggcccgggctctcccgcccgcgcttcatggctgcacacgagtgggactggttccaacgcgaggagctcatcgggcagattagcgacatccgagtgcagaacctgcaagttgagagggaaaatgtgcagaagaggacctttacacgatggataaatctacatctagaaaagtgcaacccacctctagaagttaaagatttattcgtcgatatacaagatggcaaaatcctaatggctttgttagaagtcctgtctgggcggaatctgctgcacgaatacaaatcctcgtcgcatcgtatttttcggttgaacaacatagcgaaagcacttaagtttttggaagatagcaatgtaaaactggttagcattgatgcagcagaaatagcagatggcaacccttctttggttcttgggctgatatggaacataatcctcttcttccagattaaggagctcacaggcaacctcagcagaaactctccatcttccagcttgtcccctggctcagggggcacagactcagactcatccttcccacccacacccactgcagagaggagcgtggcaatatcggtgaaagaccagaggaaggctatcaaggccctgttggcgtgggtgcagaggaaaacgagaaagtatggcgtggcggtgcaggactttgcgggcagttggaggagtgggctggctttcctggcggtgatcaaggccattgaccccagcctggtggacatgaaacaggccctggaaaattccacacgagaaaatctagagaaggctttcagcatcgcacaggatgccctgcacatccccaggctcctggagccagaagacatcatggttgacacaccagacgagcagtctatcatgacttacgtggcacagtttctagaacgttttccggagttggaagccgaagatattttcgattcagataaagaagttcctatcgaatccacttttgttcgcatcaaagaaactccttctgaacaggagagcaaagtcttcgttctgactgaaaatggggagcgtacctacactgttaaccatgaaaccagccacccaccaccctccaaagtctttgtctgtgacaagcccgagagcatgaaggaattccgcctggatggtgtttccagccatgcgctgtcagacagctccaccgagttcatgcaccagattattgaccaggtcctgcaagggggcccaggtaagaccagcgacatcagtgagccatctccagaatcctccattttatcatccagaaaggagaacgggaggtccaactctttgccgatcaagaaaacagttcactttgaggctgacacctacaaggatcctttctgcagtaagaacctgtccctttgctttgaagggagcccaagagtggcaaaggaatcattgaggcaggatggacatgtcttggcagttgaggttgctgaggaaaaggaacagaaacaggaatcctcgaagattccagaatcctcctctgacaaggtcgctggtgacatttttttggtggagggcacaaacaataattctcagtcttcttcctgtaatggtgctttagagagtacagcccgccacgatgaagaaagtcactctctttcacccccaggagaaaatactgtgatggccgattccttccagatcaaggttaacctgatgactgtagaagctttagaggagggagactattttgaagccatcccattaaaagcctcaaaatttaacagcgacctaatagattttgcttctaccagccaggctttcaacaaagttccttcacctcatgagacaaaacctgacgaggatgctgaggcttttgagaatcatgctgaaaaactaggtaaaaggagtattaaatctgctcacaaaaagaaggattcgccagagcctcaagttaagatggacaaacatgaacctcatcaggactccggagaagaagctgaaggctgtccttcagccccagaagagacaccagtggataaaaagccagaggtgcatgaaaaggccaagagaaagtccacccgtcctcattatgaggaagagggagaagacgatgacctccagggtgtgggcgaggaattatcttccagccccccaagcagctgtgtcagcttggagacccttgggagtcacagcgaagaaggcctggatttcaagccctccccacccctctcaaaggtttccgtcattccccacgacctcttctatttcccacactatgaggttcccctggctgcagttttggaggcttatgtagaagacccggaggatctaaaaaatgaagaaatggatctcgaagagccagagggctatatgccagacctggactccagggaggaggaggccgatggctctcagagcagctccagttcctcggtgccaggagagagcctccccagtgccagcgaccaggtgctgtatctcagcaggggtggtgtgggtaccacaccagcctcagaacccgctccactggccccccatgaggaccaccagcaaagggagaccaaagagaatgaccccatggacagccatcagtcccaggaatccccaaacctggaaaacatagcaaaccccctagaagaaaatgtaacgaaagaatcaatcagtagtaaaaaaaaggaaaaaaggaaacatgtggaccacgtagaaagttcactatttgtagcaccaggaagtgttcaatcctcagatgacctagaagaagacagtagcgactacagcattccttccaggactagtcacagtgactccagcatttaccttcgacgacatactcataggtcttcggaatcggatcattttagctatgttcagttgaggaacgcagcagatctggatgacagaagaaaccgaatattaaccaggaaggccaacagctcaggagaagccatgtcactggggagccacagcccgcagagtgactccctgacacagcttgtccagcagccggatatgatgtattttattctcttcctgtggctcctggtgtactgcttgctgctcttcccacaactggatgttagcaggctctgatacgtgtgtctggataataaaaaagacaggaccctgaaaaggggcggggttacttcattttattttgggttctgggtggggcacttctacagacagttgaggacctccgaggaaacttagaccccctttctcgctattgtggttttttttttttttcaggtttccttttttttctggacaacctgagcatgcttttttctttggctgtgtactcaaaactcaggcatgcagctggatccgtaggtggggttttgtccttgtgtgccttgctgggttggatagggagcattgttagtgatcattagcccgcctggatcttagcacaccccacattgcaggttcacacgctggatgaacttgagtttcttacctctcagatgaagggctgcttaatgagaaagagggtgggcaccccaggccaagccccagctggggagagagctgccacgttttcctccaagcgtgggtgtttgagagaaggtgctggggtccatgcacctgtcgcagtccggtaactggttgcattcactaggggaaatccgagcagccagctctgtgtaagcacatccaggaatggcagaatccagggaggaaggtgaaagctgtgttgagagccactgtgtgctctttttcaccctgttttttttgttgtttttttgttttgttttttgtttgaggggagataacacttgaaattcagttttccattgattggattgagatagaaccatgattttcaaaccagatcgccagggcccagcagggccatataaaagccatgaggagtggctgggctggaatcagctcccagcagtgctggagctgggtggtggggtagcttcctgcccactaaagctttggtgcacacctccctcagaatgcatgtcttggaacgggcattctttgtggtcacttgtaatgggtttcttgaagaggctttctggacagcactccgggagcaggccagcacaggaggtttgtgaaagaagagaggcatctctagcacccctgcccccagtcttcctcagccccaggctccctctgctctctcctccctgccaagactcaggtccgtggtgagtctctgcattggttcctcctccccttgctctccccttcagaaagcatgtaccaggcaacccttataaaatcacaaatgagtcaggaggggactcagtgagcatcttgtctagctggacccagagagacagagcagcttgaccaagatcatatagccgaccaggggcagacttgcagtgagcacacaggcacctgatgccctgtccagagctgtcaccccttgtaggaaacttccactgggcacaccaatgtcctgagaaaaagataaaatgactagattaaaatgtccacattcaagcaaaaccagaattcttactcaccttcaagctcatccccaattccttctgaaatacccttgacagctgcaacagcttgtcatttgacataccagcgtcgctcttactccaggaatcacgtttctttctttgctagccaaggacttgctcatttcaagcagtgggtttcaagtttacagaattccagcatggccagaagaatttacatagcacatctgagtcgatgacagccaaaatctggcctctaaaccagtctgattatagtctgtctcccctcctgaaagaatttcagccttccaaccagaaagctgctgggagcttggagtgattccatctggaaggccaagagccccatggaaaatgagctaattaatgagctccctggcatcaatgaaagctcaaaggtacagataataaagattatgtgatagtttataactctgggcaccatgcagtccttgcctaaattagatgctcgaagagcctgggaagagccaacccaaatgtgaatcatttcattttatgggtctagaccttgttcagaaaaacctctgcaagatacttctctcacctattacaacttgtaatattgtttaaaacatctactggcaagatgcctgaaagtcatttggttcaggttggcagtcaactgatattttgcaaaggaaaaaaaaatctcatttgagtataggcttctatggaagaagctggatatagaaaatggatgtggaagtctgcaggacaaaccaccccattgcttgtaaattttttttaaattaaaagaaatacaataaggcttttaacaagaactagcagtcccctaagtctcgctgcttagaagtaaccactttcaactctcttatgtttgcatttctacataacgtgcttacactttattttttaatttagaaacatctactggcttgctgtcacagtagaggaggatttcactcttaccataccgtgctttggttttccagtatagctagatcacatcatttagtacatttctattaggtgttgacattacctggagcacttaaggattgttgactcccaagcccagcagtgtgttatggttacatgtcctttctcctccaaatgtccccattaatttgctattctctctctttactttttttttttttttggtgtggcacattctttaataacttcgaaaatgtcagaatccatcatggctgctttggtgaggagctgttctccttccgtggtcatgccattggaaggcagttgtatgacaagaatgctttcacatgagctccgattttcttaactctccagaaggacttcagaagcctctggagttttgagacacggcctctctctcccttctgcttggagacaccttcctgggggtctccactgcattccccgccggtattcctctgtggagccttgcgccctcaggtcccagaaatgggctgtgtgggagcttccagtcagcctggtatctcgggaccttctcagccaggaaatgagactgcacaaagccctgtgaggcccagctgtgttatttctccttccccgacattgcataatcactgctgacacagcatttggggaagatttaacgtcttgggccagcagctgccatctggaaccatcaccacatagcaggttgttctgtcccatccaactgatgagggggctgccctaatgacaaggtccaggacctgggttgggtggtggaaggctgggagctggagtgggcattattgtgcttctgtgctgaaaattgctatggctcttttcccctaacagccagcgtgggagaaccaaacatgagacacaagcatccccttgagctccacagatcttgcgccttgctctcatcaggcatttccttgganaacagcagtcagcagctcatggaagtgagcccggtgcacagactttgcatggactttgcacaggttccatttccatcgtgtgcagacacctgtatctttgggctccacgtgagcacctgccctcttcactctgattttttttttaagagacagcatcttactctgtcaccgaggctggagtacagtggtgtgatcacagctcactgcagcctgaaactcctgggctcaggcaatcctcctgcctcagcctcccgagtggctggtagtacaggtgcatgccaccacgcccacctaatttttttatcttttatagatacaggtctcactgttgctcaggctggtctcgaactcctggcctcaagtgatcctcctgccttggcctaccaaaatgctgggattataggcatgaaccactgtgcctggccttcactctgatttttcttaagagtcctacaggaccttcaggtcttgtcacttctctaccattgtgtgtgagacagggcatggggtgagcttggtcaggtgtgggtcaaaagcctggagactcagagctgctggttccccaagagcccacaaaagttatcagagtttctgagctgagtgttctgcagttgccagaccccacaatgctgggaatactggcttctttgtgtttagaacttgttctgagaaccttgatgagaacacatcaagcaagcagttcctcccagccagggctggagcaacatgccaaaaaacattcttgtctatgggaaaaagacaaccagtattttgtactgtttgaccaagttgtttttaaatatacacatgcctcaacaatccacggcctcaatcgcactgctaatttgtttaaatccctgacactcagatgtcaagaatagcttcatctagcagtgttctctttaaaggaacccttttttttgttttcattttaatcactgccttcttctctgggaggtattgtgggctagagaaagaagtcaggtttgggagtcagccagatttagattggagtcccagctctgtcaccagatctctgggtgatcttggcaaactaacttctgagcttctgtgcattataggcattcagcacatatttgttggatgaaaaatacttttcttgaaagtttatgaagttgtaggatgcccagcagcccccttttctctatttccttcctcttgaagcaagcgttgactatacctctttccctaacccttagtgtaccatagcttcttccaacctctctccaatccattacttttttctgagctaccctgtctcaaatctaactcaggcctttttgcaagaggaagtttaagccattgtttactcattaactcacttgacccttagaacaatcgtgggaggtgtttatttcggaaaggaagctaaagcacaggacagaaaaataaggtcatagcgtgaactagtaagtagcagaactgggaacataggactgttattttcaaacactctaaacttcactgcagttgcaaatttgcaaccaaaatggccgccttgaaagggtcttttgcagtaaaatctcagtgtccaacatcaaagacagttcttcagggcctccaattaactatacatcctgcccccagctgctcatctctgcacctctaacacgtacttcacagagtaggaaattgggctttctccttcaaaaagaaaagtagagaaggcctgagggcagtgtaattaaaatggagaagtagagaccacgaattacttggatgaattcataactggttggtctctgaggcagggattattatttttcctgtattttaagcttaaaagtagtgatttttgcattgttacaaaaaacaaaatagcaaaatatcatttgatacttgtattctgtttgcaatagctaccacttcctttagccccagcaaaaatcaataggtgtgtattctctacaagcccatgctgtgccagaatgccagtattgctaaatgtcatgcaaggatttagacacttttttaaaggaaactctgggagtgcctgttgtctggagagttgacattgtccaaagcaggccaacactggtatgggtatggagaacccacgtcctagctgtggctcacctgcagatgccttgaatttacctctctgggttggaagtgggaagacttcttttaaaagtcctttctaagtttaaaaatccaaaggttacgaaggtagtttttatttatctcaataagtggcctatttgcttaaagcaagtgtacctctgtatatcagcccaaagcttagggcagtgcttcttggctttagtatctgagaaaggtgcctttgggaagagtttggtcagacagaaggtagtctgaatcttaaaggtttcagatgaatgtttgaagtagaacctgggaaatctgcttcctagggctgttagaaggaaattggtctccttaaattacgtcagcatctgaggcagtttcctaagggaatttcttttaaattcaaaagttcaactgcaggaataaatagctgtacaggactagatcttcccatccctcatcttttccccttccccgagtaacgactcaaaaaggcttctgaaattctactcagaatcggagccgtttgcattccaacaaggatcccttaagccaaatgctggtgtgtttgtgtagaatgtccctggggtaggggcggtagctgtggggagggaatgtggtgcaggggacacctgccctctgcccttgaaattgcaccataagatgctgcctatgtcactcacagtggtgctgatactatccgccaaagacaaattgtgaacacggaaaaatggtcgttccctactgtacatcctcaggacagacttaactaaacttggagacaggagattgttcagaccatattgtagtgggtggtgatcattgttttattttgggggagtctggtctattgagcagattgaatgtttccttattgtgcagggcttaattgactatgtctgaaagtttttactgagagctctaagaaaactattgaggaaaatgaaatgttattttgtagtacaaggattatttttgtctatttaggatatacatagctgtagctttgtaaaaaaaaagatctttataaacaatatatgaatgtgccgtcttatttattgattactgtaaattaagatataaatggctatttgcataatttatacctgtgggaattaactggagtatttgttatttgactgttttctattaaggaatattaggcttggtgctatgatgaatgatcttgtaaaatcatgtgtattcttaagaaaatttttgaatataaatttcttgaactgaaaaaaacgtt

SEQ ID NO: 454120 - DNA, 8578 bp, Homo sapiens
  misc_feature (5256)..(5256): n is a, c, g, or t
gcgcgcccgccagccaggctctccgcgcccgccgcccgcgccgcgctggcccgggctctcccgcccgcgcttcatggctgcacacgagtgggactggttccaacgcgaggagctcatcgggcagattagcgacatccgagtgcagaacctgcaagttgagagggaaaatgtgcagaagaggacctttacacgatggataaatctacatctagaaaagtgcaacccacctctagaagttaaagatttattcgtcgatatacaagatggcaaaatcctaatggctttgttagaagtcctgtctgggcggaatctgctgcacgaatacaaatcctcgtcgcatcgtatttttcggttgaacaacatagcgaaagcacttaagtttttggaagatagcaatgtaaaactggttagcattgatgcagcagaaatagcagatggcaacccttctttggttcttgggctgatatggaacataatcctcttcttccagattaaggagctcacaggcaacctcagcagaaactctccatcttccagcttgtcccctggctcagggggcacagactcagactcatccttcccacccacacccactgcagagaggagcgtggcaatatcggtgaaagaccagaggaaggctatcaaggccctgttggcgtgggtgcagaggaaaacgagaaagtatggcgtggcggtgcaggactttgcgggcagttggaggagtgggctggctttcctggcggtgatcaaggccattgaccccagcctggtggacatgaaacaggccctggaaaattccacacgagaaaatctagagaaggctttcagcatcgcacaggatgccctgcacatccccaggctcctggagccagaagacatcatggttgacacaccagacgagcagtctatcatgacttacgtggcacagtttctagaacgttttccggagttggaagccgaagatattttcgattcagataaagaagttcctatcgaatccacttttgttcgcatcaaagaaactccttctgaacaggagagcaaagtcttcgttctgactgaaaatggggagcgtacctacactgttaaccatgaaaccagccacccaccaccctccaaagtctttgtctgtgacaagcccgagagcatgaaggaattccgcctggatggtgtttccagccatgcgctgtcagacagctccaccgagttcatgcaccagattattgaccaggtcctgcaagggggcccaggtaagaccagcgacatcagtgagccatctccagaatcctccattttatcatccagaaaggagaacgggaggtccaactctttgccgatcaagaaaacagttcactttgaggctgacacctacaaggatcctttctgcagtaagaacctgtccctttgctttgaagggagcccaagagtggcaaaggaatcattgaggcaggatggacatgtcttggcagttgaggttgctgaggaaaaggaacagaaacaggaatcctcgaagattccagaatcctcctctgacaaggtcgctggtgacatttttttggtggagggcacaaacaataattctcagtcttcttcctgtaatggtgctttagagagtacagcccgccacgatgaagaaagtcactctctttcacccccaggagaaaatactgtgatggccgattccttccagatcaaggttaacctgatgactgtagaagctttagaggagggagactattttgaagccatcccattaaaagcctcaaaatttaacagcgacctaatagattttgcttctaccagccaggctttcaacaaagttccttcacctcatgagacaaaacctgacgaggatgctgaggcttttgagaatcatgctgaaaaactaggtaaaaggagtattaaatctgctcacaaaaagaaggattcgccagagcctcaagttaagatggacaaacatgaacctcatcaggactccggagaagaagctgaaggctgtccttcagccccagaagagacaccagtggataaaaagccagaggtgcatgaaaaggccaagagaaagtccacccgtcctcattatgaggaagagggagaagacgatgacctccagggtgtgggcgaggaattatcttccagccccccaagcagctgtgtcagcttggagacccttgggagtcacagcgaagaaggcctggatttcaagccctccccacccctctcaaaggtttccgtcattccccacgacctcttctatttcccacactatgaggttcccctggctgcagttttggaggcttatgtagaagacccggaggatctaaaaaatgaagaaatggatctcgaagagccagagggctatatgccagacctggactccagggaggaggaggccgatggctctcagagcagctccagttcctcggtgccaggagagagcctccccagtgccagcgaccaggtgctgtatctcagcaggggtggtgtgggtaccacaccagcctcagaacccgctccactggccccccatgaggaccaccagcaaagggagaccaaagagaatgaccccatggacagccatcagtcccaggaatccccaaacctggaaaacatagcaaaccccctagaagaaaatgtaacgaaagaatcaatcagtagtaaaaaaaaggaaaaaaggaaacatgtggaccacgtagaaagttcactatttgtagcaccaggaagtgttcaatcctcagatgacctagaagaagacagtagcgactacagcattccttccaggactagtcacagtgactccagcatttaccttcgacgacatactcataggtcttcggaatcggatcattttagctatgttcagttgaggaacgcagcagatctggatgacagaagaaaccgaatattaaccaggaaggccaacagctcaggagaagccatgtcactggggagccacagcccgcagagtgactccctgacacagcttgtccagcagccggatatgatgtattttattctcttcctgtggctcctggtgtactgcttgctgctcttcccacaactggatgttagcaggctctgatacgtgtgtctggataataaaaaagacaggaccctgaaaaggggcggggttacttcattttattttgggttctgggtggggcacttctacagacagttgaggacctccgaggaaacttagaccccctttctcgctattgtggttttttttttttttcaggtttccttttttttctggacaacctgagcatgcttttttctttggctgtgtactcaaaactcaggcatgcagctggatccgtaggtggggttttgtccttgtgtgccttgctgggttggatagggagcattgttagtgatcattagcccgcctggatcttagcacaccccacattgcaggttcacacgctggatgaacttgagtttcttacctctcagatgaagggctgcttaatgagaaagagggtgggcaccccaggccaagccccagctggggagagagctgccacgttttcctccaagcgtgggtgtttgagagaaggtgctggggtccatgcacctgtcgcagtccggtaactggttgcattcactaggggaaatccgagcagccagctctgtgtaagcacatccaggaatggcagaatccagggaggaaggtgaaagctgtgttgagagccactgtgtgctctttttcaccctgttttttttgttgtttttttgttttgttttttgtttgaggggagataacacttgaaattcagttttccattgattggattgagatagaaccatgattttcaaaccagatcgccagggcccagcagggccatataaaagccatgaggagtggctgggctggaatcagctcccagcagtgctggagctgggtggtggggtagcttcctgcccactaaagctttggtgcacacctccctcagaatgcatgtcttggaacgggcattctttgtggtcacttgtaatgggtttcttgaagaggctttctggacagcactccgggagcaggccagcacaggaggtttgtgaaagaagagaggcatctctagcacccctgcccccagtcttcctcagccccaggctccctctgctctctcctccctgccaagactcaggtccgtggtgagtctctgcattggttcctcctccccttgctctccccttcagaaagcatgtaccaggcaacccttataaaatcacaaatgagtcaggaggggactcagtgagcatcttgtctagctggacccagagagacagagcagcttgaccaagatcatatagccgaccaggggcagacttgcagtgagcacacaggcacctgatgccctgtccagagctgtcaccccttgtaggaaacttccactgggcacaccaatgtcctggagcacttaaggattgttgactcccaagcccagcagtgtgttatggttacatgtcctttctcctccaaatgtccccattaatttgctattctctctctttactttttttttttttttggtgtggcacattctttaataacttcgaaaatgtcagaatccatcatggctgctttggtgaggagctgttctccttccgtggtcatgccattggaaggcagttgtatgacaagaatgctttcacatgagctccgattttcttaactctccagaaggacttcagaagcctctggagttttgagacacggcctctctctcccttctgcttggagacaccttcctgggggtctccactgcattccccgccggtattcctctgtggagccttgcgccctcaggtcccagaaatgggctgtgtgggagcttccagtcagcctggtatctcgggaccttctcagccaggaaatgagactgcacaaagccctgtgaggcccagctgtgttatttctccttccccgacattgcataatcactgctgacacagcatttggggaagatttaacgtcttgggccagcagctgccatctggaaccatcaccacatagcaggttgttctgtcccatccaactgatgagggggctgccctaatgacaaggtccaggacctgggttgggtggtggaaggctgggagctggagtgggcattattgtgcttctgtgctgaaaattgctatggctcttttcccctaacagccagcgtgggagaaccaaacatgagacacaagcatccccttgagctccacagatcttgcgccttgctctcatcaggcatttccttgganaacagcagtcagcagctcatggaagtgagcccggtgcacagactttgcatggactttgcacaggttccatttccatcgtgtgcagacacctgtatctttgggctccacgtgagcacctgccctcttcactctgattttttttttaagagacagcatcttactctgtcaccgaggctggagtacagtggtgtgatcacagctcactgcagcctgaaactcctgggctcaggcaatcctcctgcctcagcctcccgagtggctggtagtacaggtgcatgccaccacgcccacctaatttttttatcttttatagatacaggtctcactgttgctcaggctggtctcgaactcctggcctcaagtgatcctcctgccttggcctaccaaaatgctgggattataggcatgaaccactgtgcctggccttcactctgatttttcttaagagtcctacaggaccttcaggtcttgtcacttctctaccattgtgtgtgagacagggcatggggtgagcttggtcaggtgtgggtcaaaagcctggagactcagagctgctggttccccaagagcccacaaaagttatcagagtttctgagctgagtgttctgcagttgccagaccccacaatgctgggaatactggcttctttgtgtttagaacttgttctgagaaccttgatgagaacacatcaagcaagcagttcctcccagccagggctggagcaacatgccaaaaaacattcttgtctatgggaaaaagacaaccagtattttgtactgtttgaccaagttgtttttaaatatacacatgcctcaacaatccacggcctcaatcgcactgctaatttgtttaaatccctgacactcagatgtcaagaatagcttcatctagcagtgttctctttaaaggaacccttttttttgttttcattttaatcactgccttcttctctgggaggtattgtgggctagagaaagaagtcaggtttgggagtcagccagatttagattggagtcccagctctgtcaccagatctctgggtgatcttggcaaactaacttctgagcttctgtgcattataggcattcagcacatatttgttggatgaaaaatacttttcttgaaagtttatgaagttgtaggatgcccagcagcccccttttctctatttccttcctcttgaagcaagcgttgactatacctctttccctaacccttagtgtaccatagcttcttccaacctctctccaatccattacttttttctgagctaccctgtctcaaatctaactcaggcctttttgcaagaggaagtttaagccattgtttactcattaactcacttgacccttagaacaatcgtgggaggtgtttatttcggaaaggaagctaaagcacaggacagaaaaataaggtcatagcgtgaactagtaagtagcagaactgggaacataggactgttattttcaaacactctaaacttcactgcagttgcaaatttgcaaccaaaatggccgccttgaaagggtcttttgcagtaaaatctcagtgtccaacatcaaagacagttcttcagggcctccaattaactatacatcctgcccccagctgctcatctctgcacctctaacacgtacttcacagagtaggaaattgggctttctccttcaaaaagaaaagtagagaaggcctgagggcagtgtaattaaaatggagaagtagagaccacgaattacttggatgaattcataactggttggtctctgaggcagggattattatttttcctgtattttaagcttaaaagtagtgatttttgcattgttacaaaaaacaaaatagcaaaatatcatttgatacttgtattctgtttgcaatagctaccacttcctttagccccagcaaaaatcaataggtgtgtattctctacaagcccatgctgtgccagaatgccagtattgctaaatgtcatgcaaggatttagacacttttttaaaggaaactctgggagtgcctgttgtctggagagttgacattgtccaaagcaggccaacactggtatgggtatggagaacccacgtcctagctgtggctcacctgcagatgccttgaatttacctctctgggttggaagtgggaagacttcttttaaaagtcctttctaagtttaaaaatccaaaggttacgaaggtagtttttatttatctcaataagtggcctatttgcttaaagcaagtgtacctctgtatatcagcccaaagcttagggcagtgcttcttggctttagtatctgagaaaggtgcctttgggaagagtttggtcagacagaaggtagtctgaatcttaaaggtttcagatgaatgtttgaagtagaacctgggaaatctgcttcctagggctgttagaaggaaattggtctccttaaattacgtcagcatctgaggcagtttcctaagggaatttcttttaaattcaaaagttcaactgcaggaataaatagctgtacaggactagatcttcccatccctcatcttttccccttccccgagtaacgactcaaaaaggcttctgaaattctactcagaatcggagccgtttgcattccaacaaggatcccttaagccaaatgctggtgtgtttgtgtagaatgtccctggggtaggggcggtagctgtggggagggaatgtggtgcaggggacacctgccctctgcccttgaaattgcaccataagatgctgcctatgtcactcacagtggtgctgatactatccgccaaagacaaattgtgaacacggaaaaatggtcgttccctactgtacatcctcaggacagacttaactaaacttggagacaggagattgttcagaccatattgtagtgggtggtgatcattgttttattttgggggagtctggtctattgagcagattgaatgtttccttattgtgcagggcttaattgactatgtctgaaagtttttactgagagctctaagaaaactattgaggaaaatgaaatgttattttgtagtacaaggattatttttgtctatttaggatatacatagctgtagctttgtaaaaaaaaagatctttataaacaatatatgaatgtgccgtcttatttattgattactgtaaattaagatataaatggctatttgcataatttatacctgtgggaattaactggagtatttgttatttgactgttttctattaaggaatattaggcttggtgctatgatgaatgatcttgtaaaatcatgtgtattcttaagaaaatttttgaatataaatttcttgaactgaaaaaaacgtt

SEQ ID NO: 454121 - DNA, 3262 bp, Homo sapiens
gcgcgcccgccagccaggctctccgcgcccgccgcccgcgccgcgctggcccgggctctcccgcccgcgcttcatggctgcacacgagtgggactggttccaacgcgaggagctcatcgggcagattagcgacatccgagtgcagaacctgcaagttgagagggaaaatgtgcagaagaggacctttacacgatggataaatctacatctagaaaagtgcaacccacctctagaagttaaagatttattcgtcgatatacaagatggcaaaatcctaatggctttgttagaagtcctgtctgggcggaatctgctgcacgaatacaaatcctcgtcgcatcgtatttttcggttgaacaacatagcgaaagcacttaagtttttggaagatagcaatgtaaaactggttagcattgatgcagcagaaatagcagatggcaacccttctttggttcttgggctgatatggaacataatcctcttcttccagattaaggagctcacaggcaacctcagcagaaactctccatcttccagcttgtcccctggctcagggggcacagactcagactcatccttcccacccacacccactgcagagaggagcgtggcaatatcggtgaaagaccagaggaaggctatcaaggccctgttggcgtgggtgcagaggaaaacgagaaagtatggcgtggcggtgcaggactttgcgggcagttggaggagtgggctggctttcctggcggtgatcaaggccattgaccccagcctggtggacatgaaacaggccctggaaaattccacacgagaaaatctagagaaggctttcagcatcgcacaggatgccctgcacatccccaggctcctggagccagaagacatcatggttgacacaccagacgagcagtctatcatgacttacgtggcacagtttctagaacgttttccggagttggaagccgaagatattttcgattcagataaagaagttcctatcgaatccacttttgttcgcatcaaagaaactccttctgaacaggagagcaaagtcttcgttctgactgaaaatggggagcgtacctacactgttaaccatgaaaccagccacccaccaccctccaaagtctttgtctgtgacaagcccgagagcatgaaggaattccgcctggatggtgtttccagccatgcgctgtcagacagctccaccgagttcatgcaccagattattgaccaggtcctgcaagggggcccaggtaagaccagcgacatcagtgagccatctccagaatcctccattttatcatccagaaaggagaacgggaggtccaactctttgccgatcaagaaaacagttcactttgaggctgacacctacaaggatcctttctgcagtaagaacctgtccctttgctttgaagggagcccaagagtggcaaaggaatcattgaggcaggatggacatgtcttggcagttgaggttgctgaggaaaaggaacagaaacaggaatcctcgaagattccagaatcctcctctgacaaggtcgctggtgacatttttttggtggagggcacaaacaataattctcagtcttcttcctgtaatggtgctttagagagtacagcccgccacgatgaagaaagtcactctctttcacccccaggagaaaatactgtgatggccgattccttccagatcaaggttaacctgatgactgtagaagctttagaggagggagactattttgaagccatcccattaaaagcctcaaaatttaacagcgacctaatagattttgcttctaccagccaggctttcaacaaagttccttcacctcatgagacaaaacctgacgaggatgctgaggcttttgagaatcatgctgaaaaactaggtaaaaggagtattaaatctgctcacaaaaagaaggattcgccagagcctcaagttaagatggacaaacatgaacctcatcaggactccggagaagaagctgaaggctgtccttcagccccagaagagacaccagtggataaaaagccagaggtgcatgaaaaggccaagagaaagtccacccgtcctcattatgaggaagagggagaagacgatgacctccagggtgtgggcgaggaattatcttccagccccccaagcagctgtgtcagcttggagacccttgggagtcacagcgaagaaggcctggatttcaagccctccccacccctctcaaaggtttccgtcattccccacgacctcttctatttcccacactatgaggttcccctggctgcagttttggaggcttatgtagaagacccggaggatctaaaaaatgaagaaatggatctcgaagagccagagggctatatgccagacctggactccagggaggaggaggccgatggctctcagagcagctccagttcctcggtgccaggagagagcctccccagtgccagcgaccaggtgctgtatctcagcaggggtggtgtgggtaccacaccagcctcagaacccgctccactggccccccatgaggaccaccagcaaagggagaccaaagagaatgaccccatggacagccatcagtcccaggaatccccaaacctggaaaacatagcaaaccccctagaagaaaatgtaacgaaagaatcaatcagtagtaaaaaaaaggaaaaaaggaaacatgtggaccacgtagaaagttcactatttgtagcaccaggaagtgttcaatcctcagatgacctagaagaagacagtagcgactacagcattccttccaggactagtcacagtgactccagcatttaccttcgacgacatactcataggtcttcggaatcggatcattttagctatgttcagttgaggaacgcagcagatctggatgacagaagaaaccgaatattaaccaggtacagtactcagaagcttactgagctgattttacagttttatggcatcagagcagacatgaagagggaaagcaaacatgccaggatgtctatgaaagtatttcttgctgtcggagaactgttggcctggcctaatgttgctgaattgctggaaacctgcccatttaaaacataggaaaccagaaaaacgtctcaaattcttacaattctgagacgtccccattcctgttgaagtcatagagttgctttattatgtttttatttttaaaaaattttatttactcgccacagatttgaattggcttggaaggatttagattactggaatcggaagcctctgtctgaatat

SEQ ID NO: 454122 - DNA, 10057 bp, Homo sapiens
  misc_feature (5276)..(5276): n is a, c, g, or t
  misc_feature (5298)..(5298): n is a, c, g, or t
  misc_feature (5354)..(5354): n is a, c, g, or t
  misc_feature (6735)..(6735): n is a, c, g, or t
ccttatcattaagcacagtccgatcggatatccggtttgggcaataagagatgtaaataaagtgaggattttaaagcccaaaggcctccttgctataaaaacgcacccaaaacgcctcacctggaccccgcgcgcacccagaaggatcacgttcagagacagaggtgcaacatgagtcaagagatttcatctttactaattgggttgcgggggcttttgtttataaatttcactgtaggatcattttagctatgttcagttgaggaacgcagcagatctggatgacagaagaaaccgaatattaaccaggaaggccaacagctcaggagaagccatgtcactggggagccacagcccgcagagtgactccctgacacagcttgtccagcagccggatatgatgtattttattctcttcctgtggctcctggtgtactgcttgctgctcttcccacaactggatgttagcaggctctgatacgtgtgtctggataataaaaaagacaggaccctgaaaaggggcggggttacttcattttattttgggttctgggtggggcacttctacagacagttgaggacctccgaggaaacttagaccccctttctcgctattgtggttttttttttttttcaggtttccttttttttctggacaacctgagcatgcttttttctttggctgtgtactcaaaactcaggcatgcagctggatccgtaggtggggttttgtccttgtgtgccttgctgggttggatagggagcattgttagtgatcattagcccgcctggatcttagcacaccccacattgcaggttcacacgctggatgaacttgagtttcttacctctcagatgaagggctgcttaatgagaaagagggtgggcaccccaggccaagccccagctggggagagagctgccacgttttcctccaagcgtgggtgtttgagagaaggtgctggggtccatgcacctgtcgcagtccggtaactggttgcattcactaggggaaatccgagcagccagctctgtgtaagcacatccaggaatggcagaatccagggaggaaggtgaaagctgtgttgagagccactgtgtgctctttttcaccctgttttttttgttgtttttttgttttgttttttgtttgaggggagataacacttgaaattcagttttccattgattggattgagatagaaccatgattttcaaaccagatcgccagggcccagcagggccatataaaagccatgaggagtggctgggctggaatcagctcccagcagtgctggagctgggtggtggggtagcttcctgcccactaaagctttggtgcacacctccctcagaatgcatgtcttggaacgggcattctttgtggtcacttgtaatgggtttcttgaagaggctttctggacagcactccgggagcaggccagcacaggaggtttgtgaaagaagagaggcatctctagcacccctgcccccagtcttcctcagccccaggctccctctgctctctcctccctgccaagactcaggtccgtggtgagtctctgcattggttcctcctccccttgctctccccttcagaaagcatgtaccaggcaacccttataaaatcacaaatgagtcaggaggggactcagtgagcatcttgtctagctggacccagagagacagagcagcttgaccaagatcatatagccgaccaggggcagacttgcagtgagcacacaggcacctgatgccctgtccagagctgtcaccccttgtaggaaacttccactgggcacaccaatgtcctgagaaaaagataaaatgactagattaaaatgtccacattcaagcaaaaccagaattcttactcaccttcaagctcatccccaattccttctgaaatacccttgacagctgcaacagcttgtcatttgacataccagcgtcgctcttactccaggaatcacgtttctttctttgctagccaaggacttgctcatttcaagcagtgggtttcaagtttacagaattccagcatggccagaagaatttacatagcacatctgagtcgatgacagccaaaatctggcctctaaaccagtctgattatagtctgtctcccctcctgaaagaatttcagccttccaaccagaaagctgctgggagcttggagtgattccatctggaaggccaagagccccatggaaaatgagctaattaatgagctccctggcatcaatgaaagctcaaaggtacagataataaagattatgtgatagtttataactctgggcaccatgcagtccttgcctaaattagatgctcgaagagcctgggaagagccaacccaaatgtgaatcatttcattttatgggtctagaccttgttcagaaaaacctctgcaagatacttctctcacctattacaacttgtaatattgtttaaaacatctactggcaagatgcctgaaagtcatttggttcaggttggcagtcaactgatattttgcaaaggaaaaaaaaatctcatttgagtataggcttctatggaagaagctggatatagaaaatggatgtggaagtctgcaggacaaaccaccccattgcttgtaaattttttttaaattaaaagaaatacaataaggcttttaacaagaactagcagtcccctaagtctcgctgcttagaagtaaccactttcaactctcttatgtttgcatttctacataacgtgcttacactttattttttaatttagaaacatctactggcttgctgtcacagtagaggaggatttcactcttaccataccgtgctttggttttccagtatagctagatcacatcatttagtacatttctattaggtgttgacattacctggagcacttaaggattgttgactcccaagcccagcagtgtgttatggttacatgtcctttctcctccaaatgtccccattaatttgctattctctctctttactttttttttttttttggtgtggcacattctttaataacttcctgaggaagagaacatgggaagtaaatatggttgtaaatattttgagatttttgcatgacttaagatgtctgtattctgcccttaacagaaatgtggctgagcatagaatgacaggtggaaaataataccctcccctagcccctcccaagcgtgctggttgagatttctgatgccattctgattcccgtacctttatatgtgacttaggtttttttatccacccttcctggaaacatttaagatctctttattcttggtgttctgaactgtcatgatggtgttgtatcccgggtgttaaaccttgtgctgggccttcatgggaaatttcttaaattttcttgtgattatttacattctttctttctggaccacctattatttcaatgttggaccctcccctacacccaggctgatgctctaatattttttatcttttctatttttcgtctatgtttctgatctgctttcaggaagaattattcatttttatcttcccaatctgaatgttttattgaatttttattttccaagttaataaaacctttggttattatcctgtctttgttttacagtgtcctgctcttgatgcgtggatgcagattttgtctctctgtggacgttaatgattgtggtctgaggggaagtcttttctgctccctgtgttgccctcattttctctgagttctctttattttggtggtctcagtctctatctttcacgttgtgaatttttctcaaatatatggtgatcctatggatctgttcatgttttaagagtgaggcatccaaaagctgattggaagttgtgtgtgccaactggtgagcttttccactagggtcaccaggtgggcacctggactcatcattggagaacactgcctgtcagtatttgcacgtgttttctctggggctcattctgtttcttgagagatattcccactactctccttcctgggaaacgggcatacacagggcttttagcctatgctgagtactcatgtggtttcaaaaatggtgtcccatctgggcagaagtccccatgagcacttggcttgactggcaaaggacaccttttgccccttcctccagacatacccagctctgagcttggacaatgctcgaggaacaatgaaaaggctagattttaactcctaattgccctctttagccaagtgcctctgtgcaatgcacaactgtaggaccatatccagagaccctggtctatactcagtgtgcccgagtcctgaccgctgagcaggcagcctcatcacccgtgagtatttagactttcattaagttgcttcaacctttgctgtgcctggtgtccctgagttggagctgctctgatttctccatggagtaggagcacagtggtcatctggctgcatgggaaggacaggggacctcagagccaataaatgccctggtcttcagccccatgtctcaccccatccctcctattccaatccccaagcctctcctggaggccacagggcatctctgctgaccactctgtggcctcccctctgcaggcatgtggttttaggatccccctccctgctcacttttccatcagttccattcctgcataaataggttgctagctcttgcttactgttctcttctgtattctgtgttcatggttgtattaatataactttcattcctctgctcctattttcatggggtttcatgagggaagaaacaggctcatgtgttcagtataccatcttgatccataaaccccatttgagttatctcacaggttgcttagggggcttgctgctctgactggtttgtgaacgtgccctgagtccagctgggactgcagcaacatccatcctgttgagctgtggtctgctaagtgattttgtgtaatgctgtgccaagtgcaggagagggatacatagcatggctaagctctgcttgaatgccatgattagttattaccttccttccttccccctggttttgctgcctattgtcagtaaatgatcttagatctcctgcctccccaaagatatagtctatgtggtggtctgggttctaggttttctttaccacccttgcttcacttaagaaacagaaaactggctaggcacagtagtggctcacacctataatcccagccctttgggaggccaaggcaggaggatcgcttgaggccaggaattcaagaccagcctgcacaacatagcaagactccatctctacaaaaagttaaatttaaattagtggtggcatncacttatagtcccagctactcnggaggatgaggcaggagaattgtttgagcccatgactttgaggttactgtgagctntgatcctgctattttactccacctgagtgacagagcgagacgctgtctcaaaaataaagaaacaagtagtccacacaggtgtttgccagcaaacaaacagcgcggattctctgttgaacgtggccaacattgcctcgtcgaagtttgtatcttgccatagttgatgatcaggtggtcggggcttcctggtcagacctgacctttgtggggagatgttctcccaccaaggctcagaagcaggacactcttgctgcccctcgggcagccacccagaacatgggcgtctccatttctgaggttcagcatagttccccccaccctcttcccatgcagtgcatgcctgctctttatcaggatggaacagagggaaggcagaggcactgggggcagcctgtgttgttgatctctgtaagtcacagactgttcgaaaacctcaggaattatgtaagcgttcagtgcctcatttaagagatgaaaaactgaagattagaaagaggaaacgactagtcgccctgctagttgatgacctccagatagccatcttcattcccagttaagtttactacaaaaccacagcctcagctgctgaagctaacctccctacccaccatcgctagggactcagaacaccatggagctcatctctccaacaaaagtcagaattagcaagtacagatgtgtcttacgaaaatgtcagaatccatcatggctgctttggtgaggagctgttctccttccgtggtcatgccattggaaggcagttgtatgacaagaatgctttcacatgagctccgattttcttaactctccagaaggacttcagaagcctctggagttttgagacacggcctctctctcccttctgcttggagacaccttcctgggggtctccactgcattccccgccggtattcctctgtggagccttgcgccctcaggtcccagaaatgggctgtgtgggagcttccagtcagcctggtatctcgggaccttctcagccaggaaatgagactgcacaaagccctgtgaggcccagctgtgttatttctccttccccgacattgcataatcactgctgacacagcatttggggaagatttaacgtcttgggccagcagctgccatctggaaccatcaccacatagcaggttgttctgtcccatccaactgatgagggggctgccctaatgacaaggtccaggacctgggttgggtggtggaaggctgggagctggagtgggcattattgtgcttctgtgctgaaaattgctatggctcttttcccctaacagccagcgtgggagaaccaaacatgagacacaagcatccccttgagctccacagatcttgcgccttgctctcatcaggcatttccttgganaacagcagtcagcagctcatggaagtgagcccggtgcacagactttgcatggactttgcacaggttccatttccatcgtgtgcagacacctgtatctttgggctccacgtgagcacctgccctcttcactctgattttttttttaagagacagcatcttactctgtcaccgaggctggagtacagtggtgtgatcacagctcactgcagcctgaaactcctgggctcaggcaatcctcctgcctcagcctcccgagtggctggtagtacaggtgcatgccaccacgcccacctaatttttttatcttttatagatacaggtctcactgttgctcaggctggtctcgaactcctggcctcaagtgatcctcctgccttggcctaccaaaatgctgggattataggcatgaaccactgtgcctggccttcactctgatttttcttaagagtcctacaggaccttcaggtcttgtcacttctctaccattgtgtgtgagacagggcatggggtgagcttggtcaggtgtgggtcaaaagcctggagactcagagctgctggttccccaagagcccacaaaagttatcagagtttctgagctgagtgttctgcagttgccagaccccacaatgctgggaatactggcttctttgtgtttagaacttgttctgagaaccttgatgagaacacatcaagcaagcagttcctcccagccagggctggagcaacatgccaaaaaacattcttgtctatgggaaaaagacaaccagtattttgtactgtttgaccaagttgtttttaaatatacacatgcctcaacaatccacggcctcaatcgcactgctaatttgtttaaatccctgacactcagatgtcaagaatagcttcatctagcagtgttctctttaaaggaacccttttttttgttttcattttaatcactgccttcttctctgggaggtattgtgggctagagaaagaagtcaggtttgggagtcagccagatttagattggagtcccagctctgtcaccagatctctgggtgatcttggcaaactaacttctgagcttctgtgcattataggcattcagcacatatttgttggatgaaaaatacttttcttgaaagtttatgaagttgtaggatgcccagcagcccccttttctctatttccttcctcttgaagcaagcgttgactatacctctttccctaacccttagtgtaccatagcttcttccaacctctctccaatccattacttttttctgagctaccctgtctcaaatctaactcaggcctttttgcaagaggaagtttaagccattgtttactcattaactcacttgacccttagaacaatcgtgggaggtgtttatttcggaaaggaagctaaagcacaggacagaaaaataaggtcatagcgtgaactagtaagtagcagaactgggaacataggactgttattttcaaacactctaaacttcactgcagttgcaaatttgcaaccaaaatggccgccttgaaagggtcttttgcagtaaaatctcagtgtccaacatcaaagacagttcttcagggcctccaattaactatacatcctgcccccagctgctcatctctgcacctctaacacgtacttcacagagtaggaaattgggctttctccttcaaaaagaaaagtagagaaggcctgagggcagtgtaattaaaatggagaagtagagaccacgaattacttggatgaattcataactggttggtctctgaggcagggattattatttttcctgtattttaagcttaaaagtagtgatttttgcattgttacaaaaaacaaaatagcaaaatatcatttgatacttgtattctgtttgcaatagctaccacttcctttagccccagcaaaaatcaataggtgtgtattctctacaagcccatgctgtgccagaatgccagtattgctaaatgtcatgcaaggatttagacacttttttaaaggaaactctgggagtgcctgttgtctggagagttgacattgtccaaagcaggccaacactggtatgggtatggagaacccacgtcctagctgtggctcacctgcagatgccttgaatttacctctctgggttggaagtgggaagacttcttttaaaagtcctttctaagtttaaaaatccaaaggttacgaaggtagtttttatttatctcaataagtggcctatttgcttaaagcaagtgtacctctgtatatcagcccaaagcttagggcagtgcttcttggctttagtatctgagaaaggtgcctttgggaagagtttggtcagacagaaggtagtctgaatcttaaaggtttcagatgaatgtttgaagtagaacctgggaaatctgcttcctagggctgttagaaggaaattggtctccttaaattacgtcagcatctgaggcagtttcctaagggaatttcttttaaattcaaaagttcaactgcaggaataaatagctgtacaggactagatcttcccatccctcatcttttccccttccccgagtaacgactcaaaaaggcttctgaaattctactcagaatcggagccgtttgcattccaacaaggatcccttaagccaaatgctggtgtgtttgtgtagaatgtccctggggtaggggcggtagctgtggggagggaatgtggtgcaggggacacctgccctctgcccttgaaattgcaccataagatgctgcctatgtcactcacagtggtgctgatactatccgccaaagacaaattgtgaacacggaaaaatggtcgttccctactgtacatcctcaggacagacttaactaaacttggagacaggagattgttcagaccatattgtagtgggtggtgatcattgttttattttgggggagtctggtctattgagcagattgaatgtttccttattgtgcagggcttaattgactatgtctgaaagtttttactgagagctctaagaaaactattgaggaaaatgaaatgttattttgtagtacaaggattatttttgtctatttaggatatacatagctgtagctttgtaaaaaaaaagatctttataaacaatatatgaatgtgccgtcttatttattgattactgtaaattaagatataaatggctatttgcataatttatacctgtgggaattaactggagtatttgttatttgactgttttctattaaggaatattaggcttggtgctatgatgaatgatcttgtaaaatcatgtgtattcttaagaaaatttttgaatataaatttcttgaactgaaaaaaacgtt

SEQ ID NO: 454123 - DNA, 168 bp, Homo sapiens
gacacctcgctttaagttcataaattgcttccctccaggtaaaactggttagcattgatgcagcagaaatagcagatggcaacccttctttggttcttgggctgatatggaacataatcctcttcttccaggtaagatcatttcttttccaaaacacacaatcatgat

SEQ ID NO: 454124 - DNA, 382 bp, Homo sapiens
tcagtcactcaaggtcacagagctgactcagccaggatttgaaatcagatcttgccaactctagaacctatattgttttaactccatcaatttgtagcatttgaagtctgtaccaggggccggagttggggtggacttgtctctcatgcaggctgtgctgcaggggattcatgaagaggatcagggaacaggcagaattggaagggacgccctggctgggcctgggcagagcactgctgggtgatgtcacctactttacactgcagcgtgacatactgacttggatttggttgttctgtctttcagtcccaggaatccccaaacctggaaaacatagcaaaccccctagaagaaaatgtaacgaaagaatcaatcagtagta

SEQ ID NO: 454125 - DNA, 11564 bp, Homo sapiens
  misc_feature (6783)..(6783): n is a, c, g, or t
  misc_feature (6805)..(6805): n is a, c, g, or t
  misc_feature (6861)..(6861): n is a, c, g, or t
  misc_feature (8242)..(8242): n is a, c, g, or t
agcgaaggaatttcgcagagctgaagatcaagcgcctgagaaagaagtttgcccaaaagatgcttcgaaaggcaaggaggaagcttatctatgaaaaagcaaagcactatcacaaggaatatattattgaccaggtcctgcaagggggcccaggtaagaccagcgacatcagtgagccatctccagaatcctccattttatcatccagaaaggagaacgggaggtccaactctttgccgatcaagaaaacagttcactttgaggctgacacctacaaggatcctttctgcagtaagaacctgtccctttgctttgaagggagcccaagagtggcaaaggaatcattgaggcaggatggacatgtcttggcagttgaggttgctgaggaaaaggaacagaaacaggaatcctcgaagattccagaatcctcctctgacaaggtcgctggtgacatttttttggtggagggcacaaacaataattctcagtcttcttcctgtaatggtgctttagagagtacagcccgccacgatgaagaaagtcactctctttcacccccaggagaaaatactgtgatggccgattccttccagatcaaggttaacctgatgactgtagaagctttagaggagggagactattttgaagccatcccattaaaagcctcaaaatttaacagcgacctaatagattttgcttctaccagccaggctttcaacaaagttccttcacctcatgagacaaaacctgacgaggatgctgaggcttttgagaatcatgctgaaaaactaggtaaaaggagtattaaatctgctcacaaaaagaaggattcgccagagcctcaagttaagatggacaaacatgaacctcatcaggactccggagaagaagctgaaggctgtccttcagccccagaagagacaccagtggataaaaagccagaggtgcatgaaaaggccaagagaaagtccacccgtcctcattatgaggaagagggagaagacgatgacctccagggtgtgggcgaggaattatcttccagccccccaagcagctgtgtcagcttggagacccttgggagtcacagcgaagaaggcctggatttcaagccctccccacccctctcaaaggtttccgtcattccccacgacctcttctatttcccacactatgaggttcccctggctgcagttttggaggcttatgtagaagacccggaggatctaaaaaatgaagaaatggatctcgaagagccagagggctatatgccagacctggactccagggaggaggaggccgatggctctcagagcagctccagttcctcggtgccaggagagagcctccccagtgccagcgaccaggtgctgtatctcagcaggggtggtgtgggtaccacaccagcctcagaacccgctccactggccccccatgaggaccaccagcaaagggagaccaaagagaatgaccccatggacagccatcagtcccaggaatccccaaacctggaaaacatagcaaaccccctagaagaaaatgtaacgaaagaatcaatcagtagtaaaaaaaaggaaaaaaggaaacatgtggaccacgtagaaagttcactatttgtagcaccaggaagtgttcaatcctcagatgacctagaagaagacagtagcgactacagcattccttccaggactagtcacagtgactccagcatttaccttcgacgacatactcataggtcttcggaatcggatcattttagctatgttcagttgaggaacgcagcagatctggatgacagaagaaaccgaatattaaccaggaaggccaacagctcaggagaagccatgtcactggggagccacagcccgcagagtgactccctgacacagcttgtccagcagccggatatgatgtattttattctcttcctgtggctcctggtgtactgcttgctgctcttcccacaactggatgttagcaggctctgatacgtgtgtctggataataaaaaagacaggaccctgaaaaggggcggggttacttcattttattttgggttctgggtggggcacttctacagacagttgaggacctccgaggaaacttagaccccctttctcgctattgtggttttttttttttttcaggtttccttttttttctggacaacctgagcatgcttttttctttggctgtgtactcaaaactcaggcatgcagctggatccgtaggtggggttttgtccttgtgtgccttgctgggttggatagggagcattgttagtgatcattagcccgcctggatcttagcacaccccacattgcaggttcacacgctggatgaacttgagtttcttacctctcagatgaagggctgcttaatgagaaagagggtgggcaccccaggccaagccccagctggggagagagctgccacgttttcctccaagcgtgggtgtttgagagaaggtgctggggtccatgcacctgtcgcagtccggtaactggttgcattcactaggggaaatccgagcagccagctctgtgtaagcacatccaggaatggcagaatccagggaggaaggtgaaagctgtgttgagagccactgtgtgctctttttcaccctgttttttttgttgtttttttgttttgttttttgtttgaggggagataacacttgaaattcagttttccattgattggattgagatagaaccatgattttcaaaccagatcgccagggcccagcagggccatataaaagccatgaggagtggctgggctggaatcagctcccagcagtgctggagctgggtggtggggtagcttcctgcccactaaagctttggtgcacacctccctcagaatgcatgtcttggaacgggcattctttgtggtcacttgtaatgggtttcttgaagaggctttctggacagcactccgggagcaggccagcacaggaggtttgtgaaagaagagaggcatctctagcacccctgcccccagtcttcctcagccccaggctccctctgctctctcctccctgccaagactcaggtccgtggtgagtctctgcattggttcctcctccccttgctctccccttcagaaagcatgtaccaggcaacccttataaaatcacaaatgagtcaggaggggactcagtgagcatcttgtctagctggacccagagagacagagcagcttgaccaagatcatatagccgaccaggggcagacttgcagtgagcacacaggcacctgatgccctgtccagagctgtcaccccttgtaggaaacttccactgggcacaccaatgtcctgagaaaaagataaaatgactagattaaaatgtccacattcaagcaaaaccagaattcttactcaccttcaagctcatccccaattccttctgaaatacccttgacagctgcaacagcttgtcatttgacataccagcgtcgctcttactccaggaatcacgtttctttctttgctagccaaggacttgctcatttcaagcagtgggtttcaagtttacagaattccagcatggccagaagaatttacatagcacatctgagtcgatgacagccaaaatctggcctctaaaccagtctgattatagtctgtctcccctcctgaaagaatttcagccttccaaccagaaagctgctgggagcttggagtgattccatctggaaggccaagagccccatggaaaatgagctaattaatgagctccctggcatcaatgaaagctcaaaggtacagataataaagattatgtgatagtttataactctgggcaccatgcagtccttgcctaaattagatgctcgaagagcctgggaagagccaacccaaatgtgaatcatttcattttatgggtctagaccttgttcagaaaaacctctgcaagatacttctctcacctattacaacttgtaatattgtttaaaacatctactggcaagatgcctgaaagtcatttggttcaggttggcagtcaactgatattttgcaaaggaaaaaaaaatctcatttgagtataggcttctatggaagaagctggatatagaaaatggatgtggaagtctgcaggacaaaccaccccattgcttgtaaattttttttaaattaaaagaaatacaataaggcttttaacaagaactagcagtcccctaagtctcgctgcttagaagtaaccactttcaactctcttatgtttgcatttctacataacgtgcttacactttattttttaatttagaaacatctactggcttgctgtcacagtagaggaggatttcactcttaccataccgtgctttggttttccagtatagctagatcacatcatttagtacatttctattaggtgttgacattacctggagcacttaaggattgttgactcccaagcccagcagtgtgttatggttacatgtcctttctcctccaaatgtccccattaatttgctattctctctctttactttttttttttttttggtgtggcacattctttaataacttcctgaggaagagaacatgggaagtaaatatggttgtaaatattttgagatttttgcatgacttaagatgtctgtattctgcccttaacagaaatgtggctgagcatagaatgacaggtggaaaataataccctcccctagcccctcccaagcgtgctggttgagatttctgatgccattctgattcccgtacctttatatgtgacttaggtttttttatccacccttcctggaaacatttaagatctctttattcttggtgttctgaactgtcatgatggtgttgtatcccgggtgttaaaccttgtgctgggccttcatgggaaatttcttaaattttcttgtgattatttacattctttctttctggaccacctattatttcaatgttggaccctcccctacacccaggctgatgctctaatattttttatcttttctatttttcgtctatgtttctgatctgctttcaggaagaattattcatttttatcttcccaatctgaatgttttattgaatttttattttccaagttaataaaacctttggttattatcctgtctttgttttacagtgtcctgctcttgatgcgtggatgcagattttgtctctctgtggacgttaatgattgtggtctgaggggaagtcttttctgctccctgtgttgccctcattttctctgagttctctttattttggtggtctcagtctctatctttcacgttgtgaatttttctcaaatatatggtgatcctatggatctgttcatgttttaagagtgaggcatccaaaagctgattggaagttgtgtgtgccaactggtgagcttttccactagggtcaccaggtgggcacctggactcatcattggagaacactgcctgtcagtatttgcacgtgttttctctggggctcattctgtttcttgagagatattcccactactctccttcctgggaaacgggcatacacagggcttttagcctatgctgagtactcatgtggtttcaaaaatggtgtcccatctgggcagaagtccccatgagcacttggcttgactggcaaaggacaccttttgccccttcctccagacatacccagctctgagcttggacaatgctcgaggaacaatgaaaaggctagattttaactcctaattgccctctttagccaagtgcctctgtgcaatgcacaactgtaggaccatatccagagaccctggtctatactcagtgtgcccgagtcctgaccgctgagcaggcagcctcatcacccgtgagtatttagactttcattaagttgcttcaacctttgctgtgcctggtgtccctgagttggagctgctctgatttctccatggagtaggagcacagtggtcatctggctgcatgggaaggacaggggacctcagagccaataaatgccctggtcttcagccccatgtctcaccccatccctcctattccaatccccaagcctctcctggaggccacagggcatctctgctgaccactctgtggcctcccctctgcaggcatgtggttttaggatccccctccctgctcacttttccatcagttccattcctgcataaataggttgctagctcttgcttactgttctcttctgtattctgtgttcatggttgtattaatataactttcattcctctgctcctattttcatggggtttcatgagggaagaaacaggctcatgtgttcagtataccatcttgatccataaaccccatttgagttatctcacaggttgcttagggggcttgctgctctgactggtttgtgaacgtgccctgagtccagctgggactgcagcaacatccatcctgttgagctgtggtctgctaagtgattttgtgtaatgctgtgccaagtgcaggagagggatacatagcatggctaagctctgcttgaatgccatgattagttattaccttccttccttccccctggttttgctgcctattgtcagtaaatgatcttagatctcctgcctccccaaagatatagtctatgtggtggtctgggttctaggttttctttaccacccttgcttcacttaagaaacagaaaactggctaggcacagtagtggctcacacctataatcccagccctttgggaggccaaggcaggaggatcgcttgaggccaggaattcaagaccagcctgcacaacatagcaagactccatctctacaaaaagttaaatttaaattagtggtggcatncacttatagtcccagctactcnggaggatgaggcaggagaattgtttgagcccatgactttgaggttactgtgagctntgatcctgctattttactccacctgagtgacagagcgagacgctgtctcaaaaataaagaaacaagtagtccacacaggtgtttgccagcaaacaaacagcgcggattctctgttgaacgtggccaacattgcctcgtcgaagtttgtatcttgccatagttgatgatcaggtggtcggggcttcctggtcagacctgacctttgtggggagatgttctcccaccaaggctcagaagcaggacactcttgctgcccctcgggcagccacccagaacatgggcgtctccatttctgaggttcagcatagttccccccaccctcttcccatgcagtgcatgcctgctctttatcaggatggaacagagggaaggcagaggcactgggggcagcctgtgttgttgatctctgtaagtcacagactgttcgaaaacctcaggaattatgtaagcgttcagtgcctcatttaagagatgaaaaactgaagattagaaagaggaaacgactagtcgccctgctagttgatgacctccagatagccatcttcattcccagttaagtttactacaaaaccacagcctcagctgctgaagctaacctccctacccaccatcgctagggactcagaacaccatggagctcatctctccaacaaaagtcagaattagcaagtacagatgtgtcttacgaaaatgtcagaatccatcatggctgctttggtgaggagctgttctccttccgtggtcatgccattggaaggcagttgtatgacaagaatgctttcacatgagctccgattttcttaactctccagaaggacttcagaagcctctggagttttgagacacggcctctctctcccttctgcttggagacaccttcctgggggtctccactgcattccccgccggtattcctctgtggagccttgcgccctcaggtcccagaaatgggctgtgtgggagcttccagtcagcctggtatctcgggaccttctcagccaggaaatgagactgcacaaagccctgtgaggcccagctgtgttatttctccttccccgacattgcataatcactgctgacacagcatttggggaagatttaacgtcttgggccagcagctgccatctggaaccatcaccacatagcaggttgttctgtcccatccaactgatgagggggctgccctaatgacaaggtccaggacctgggttgggtggtggaaggctgggagctggagtgggcattattgtgcttctgtgctgaaaattgctatggctcttttcccctaacagccagcgtgggagaaccaaacatgagacacaagcatccccttgagctccacagatcttgcgccttgctctcatcaggcatttccttgganaacagcagtcagcagctcatggaagtgagcccggtgcacagactttgcatggactttgcacaggttccatttccatcgtgtgcagacacctgtatctttgggctccacgtgagcacctgccctcttcactctgattttttttttaagagacagcatcttactctgtcaccgaggctggagtacagtggtgtgatcacagctcactgcagcctgaaactcctgggctcaggcaatcctcctgcctcagcctcccgagtggctggtagtacaggtgcatgccaccacgcccacctaatttttttatcttttatagatacaggtctcactgttgctcaggctggtctcgaactcctggcctcaagtgatcctcctgccttggcctaccaaaatgctgggattataggcatgaaccactgtgcctggccttcactctgatttttcttaagagtcctacaggaccttcaggtcttgtcacttctctaccattgtgtgtgagacagggcatggggtgagcttggtcaggtgtgggtcaaaagcctggagactcagagctgctggttccccaagagcccacaaaagttatcagagtttctgagctgagtgttctgcagttgccagaccccacaatgctgggaatactggcttctttgtgtttagaacttgttctgagaaccttgatgagaacacatcaagcaagcagttcctcccagccagggctggagcaacatgccaaaaaacattcttgtctatgggaaaaagacaaccagtattttgtactgtttgaccaagttgtttttaaatatacacatgcctcaacaatccacggcctcaatcgcactgctaatttgtttaaatccctgacactcagatgtcaagaatagcttcatctagcagtgttctctttaaaggaacccttttttttgttttcattttaatcactgccttcttctctgggaggtattgtgggctagagaaagaagtcaggtttgggagtcagccagatttagattggagtcccagctctgtcaccagatctctgggtgatcttggcaaactaacttctgagcttctgtgcattataggcattcagcacatatttgttggatgaaaaatacttttcttgaaagtttatgaagttgtaggatgcccagcagcccccttttctctatttccttcctcttgaagcaagcgttgactatacctctttccctaacccttagtgtaccatagcttcttccaacctctctccaatccattacttttttctgagctaccctgtctcaaatctaactcaggcctttttgcaagaggaagtttaagccattgtttactcattaactcacttgacccttagaacaatcgtgggaggtgtttatttcggaaaggaagctaaagcacaggacagaaaaataaggtcatagcgtgaactagtaagtagcagaactgggaacataggactgttattttcaaacactctaaacttcactgcagttgcaaatttgcaaccaaaatggccgccttgaaagggtcttttgcagtaaaatctcagtgtccaacatcaaagacagttcttcagggcctccaattaactatacatcctgcccccagctgctcatctctgcacctctaacacgtacttcacagagtaggaaattgggctttctccttcaaaaagaaaagtagagaaggcctgagggcagtgtaattaaaatggagaagtagagaccacgaattacttggatgaattcataactggttggtctctgaggcagggattattatttttcctgtattttaagcttaaaagtagtgatttttgcattgttacaaaaaacaaaatagcaaaatatcatttgatacttgtattctgtttgcaatagctaccacttcctttagccccagcaaaaatcaataggtgtgtattctctacaagcccatgctgtgccagaatgccagtattgctaaatgtcatgcaaggatttagacacttttttaaaggaaactctgggagtgcctgttgtctggagagttgacattgtccaaagcaggccaacactggtatgggtatggagaacccacgtcctagctgtggctcacctgcagatgccttgaatttacctctctgggttggaagtgggaagacttcttttaaaagtcctttctaagtttaaaaatccaaaggttacgaaggtagtttttatttatctcaataagtggcctatttgcttaaagcaagtgtacctctgtatatcagcccaaagcttagggcagtgcttcttggctttagtatctgagaaaggtgcctttgggaagagtttggtcagacagaaggtagtctgaatcttaaaggtttcagatgaatgtttgaagtagaacctgggaaatctgcttcctagggctgttagaaggaaattggtctccttaaattacgtcagcatctgaggcagtttcctaagggaatttcttttaaattcaaaagttcaactgcaggaataaatagctgtacaggactagatcttcccatccctcatcttttccccttccccgagtaacgactcaaaaaggcttctgaaattctactcagaatcggagccgtttgcattccaacaaggatcccttaagccaaatgctggtgtgtttgtgtagaatgtccctggggtaggggcggtagctgtggggagggaatgtggtgcaggggacacctgccctctgcccttgaaattgcaccataagatgctgcctatgtcactcacagtggtgctgatactatccgccaaagacaaattgtgaacacggaaaaatggtcgttccctactgtacatcctcaggacagacttaactaaacttggagacaggagattgttcagaccatattgtagtgggtggtgatcattgttttattttgggggagtctggtctattgagcagattgaatgtttccttattgtgcagggcttaattgactatgtctgaaagtttttactgagagctctaagaaaactattgaggaaaatgaaatgttattttgtagtacaaggattatttttgtctatttaggatatacatagctgtagctttgtaaaaaaaaagatctttataaacaatatatgaatgtgccgtcttatttattgattactgtaaattaagatataaatggctatttgcataatttatacctgtgggaattaactggagtatttgttatttgactgttttctattaaggaatattaggcttggtgctatgatgaatgatcttgtaaaatcatgtgtattcttaagaaaatttttgaatataaatttcttgaactgaaaaaaacgtt

SEQ ID NO: 454126 - DNA, 11442 bp, Homo sapiens
  misc_feature (6661)..(6661): n is a, c, g, or t
  misc_feature (6683)..(6683): n is a, c, g, or t
  misc_feature (6739)..(6739): n is a, c, g, or t
  misc_feature (8120)..(8120): n is a, c, g, or t
gcgcgcccgccagccaggctctccgcgcccgccgcccgcgccgcgctggcccgggctctcccgcccgcgcttcatggctgcacacgagtgggactggttccaacgcgaggagctcatcgggcagattagcgacatccgagtgcagaacctgcaagttgagagggaaaatgtgcagaagaggacctttacacgatggataaatctacatctagaaaagtgcaacccacctctagaagttaaagatttattcgtcgatatacaagatggcaaaatcctaatggctttgttagaagtcctgtctgggcggaatctgctgcacgaatacaaatcctcgtcgcatcgtatttttcggttgaacaacatagcgaaagcacttaagtttttggaagatagcaatgtaaaactggttagcattgatgcagcagaaatagcagatggcaacccttctttggttcttgggctgatatggaacataatcctcttcttccagattaaggagctcacaggcaacctcagcagaaactctccatcttccagcttgtcccctggctcagggggcacagactcagactcatccttcccacccacacccactgcagagaggagcgtggcaatatcggtgaaagaccagaggaaggctatcaaggccctgttggcgtgggtgcagaggaaaacgagaaagtatggcgtggcggtgcaggactttgcgggcagttggaggagtgggctggctttcctggcggtgatcaaggccattgaccccagcctggtggacatgaaacaggccctggaaaattccacacgagaaaatctagagaaggctttcagcatcgcacaggatgccctgcacatccccaggctcctggagccagaagacatcatggttgacacaccagacgagcagtctatcatgacttacgtggcacagtttctagaacgttttccggagttggaagccgaagatattttcgattcagataaagaagttcctatcgaatccacttttgttcgcatcaaagaaactccttctgaacaggagagcaaagtcttcgttctgactgaaaatggggagcgtacctacactgttaaccatgaaaccagccacccaccaccctccaaagtctttgtctgtgacaagcccgagagcatgaaggaattccgcctggatggtgtttccagccatgcgctgtcagacagctccaccgagttcatgcaccagattattgaccaggtcctgcaagggggcccaggtaagaccagcgacatcatcccaggaatccccaaacctggaaaacatagcaaaccccctagaagaaaatgtaacgaaagaatcaatcagtagtaaaaaaaaggaaaaaaggaaacatgtggaccacgtagaaagttcactatttgtagcaccaggaagtgttcaatcctcagatgacctagaagaagacagtagcgactacagcattccttccaggactagtcacagtgactccagcatttaccttcgacgacatactcataggtcttcggaatcggatcattttagctatgttcagttgaggaacgcagcagatctggatgacagaagaaaccgaatattaaccaggtacagtactcagaagcttactgagctgattttacagttttatggcatcagagcagacatgaagagggaaagcaaacatgccaggatgtctatgaaagaaggccaacagctcaggagaagccatgtcactggggagccacagcccgcagagtgactccctgacacagcttgtccagcagccggatatgatgtattttattctcttcctgtggctcctggtgtactgcttgctgctcttcccacaactggatgttagcaggctctgatacgtgtgtctggataataaaaaagacaggaccctgaaaaggggcggggttacttcattttattttgggttctgggtggggcacttctacagacagttgaggacctccgaggaaacttagaccccctttctcgctattgtggttttttttttttttcaggtttccttttttttctggacaacctgagcatgcttttttctttggctgtgtactcaaaactcaggcatgcagctggatccgtaggtggggttttgtccttgtgtgccttgctgggttggatagggagcattgttagtgatcattagcccgcctggatcttagcacaccccacattgcaggttcacacgctggatgaacttgagtttcttacctctcagatgaagggctgcttaatgagaaagagggtgggcaccccaggccaagccccagctggggagagagctgccacgttttcctccaagcgtgggtgtttgagagaaggtgctggggtccatgcacctgtcgcagtccggtaactggttgcattcactaggggaaatccgagcagccagctctgtgtaagcacatccaggaatggcagaatccagggaggaaggtgaaagctgtgttgagagccactgtgtgctctttttcaccctgttttttttgttgtttttttgttttgttttttgtttgaggggagataacacttgaaattcagttttccattgattggattgagatagaaccatgattttcaaaccagatcgccagggcccagcagggccatataaaagccatgaggagtggctgggctggaatcagctcccagcagtgctggagctgggtggtggggtagcttcctgcccactaaagctttggtgcacacctccctcagaatgcatgtcttggaacgggcattctttgtggtcacttgtaatgggtttcttgaagaggctttctggacagcactccgggagcaggccagcacaggaggtttgtgaaagaagagaggcatctctagcacccctgcccccagtcttcctcagccccaggctccctctgctctctcctccctgccaagactcaggtccgtggtgagtctctgcattggttcctcctccccttgctctccccttcagaaagcatgtaccaggcaacccttataaaatcacaaatgagtcaggaggggactcagtgagcatcttgtctagctggacccagagagacagagcagcttgaccaagatcatatagccgaccaggggcagacttgcagtgagcacacaggcacctgatgccctgtccagagctgtcaccccttgtaggaaacttccactgggcacaccaatgtcctgagaaaaagataaaatgactagattaaaatgtccacattcaagcaaaaccagaattcttactcaccttcaagctcatccccaattccttctgaaatacccttgacagctgcaacagcttgtcatttgacataccagcgtcgctcttactccaggaatcacgtttctttctttgctagccaaggacttgctcatttcaagcagtgggtttcaagtttacagaattccagcatggccagaagaatttacatagcacatctgagtcgatgacagccaaaatctggcctctaaaccagtctgattatagtctgtctcccctcctgaaagaatttcagccttccaaccagaaagctgctgggagcttggagtgattccatctggaaggccaagagccccatggaaaatgagctaattaatgagctccctggcatcaatgaaagctcaaaggtacagataataaagattatgtgatagtttataactctgggcaccatgcagtccttgcctaaattagatgctcgaagagcctgggaagagccaacccaaatgtgaatcatttcattttatgggtctagaccttgttcagaaaaacctctgcaagatacttctctcacctattacaacttgtaatattgtttaaaacatctactggcaagatgcctgaaagtcatttggttcaggttggcagtcaactgatattttgcaaaggaaaaaaaaatctcatttgagtataggcttctatggaagaagctggatatagaaaatggatgtggaagtctgcaggacaaaccaccccattgcttgtaaattttttttaaattaaaagaaatacaataaggcttttaacaagaactagcagtcccctaagtctcgctgcttagaagtaaccactttcaactctcttatgtttgcatttctacataacgtgcttacactttattttttaatttagaaacatctactggcttgctgtcacagtagaggaggatttcactcttaccataccgtgctttggttttccagtatagctagatcacatcatttagtacatttctattaggtgttgacattacctggagcacttaaggattgttgactcccaagcccagcagtgtgttatggttacatgtcctttctcctccaaatgtccccattaatttgctattctctctctttactttttttttttttttggtgtggcacattctttaataacttcctgaggaagagaacatgggaagtaaatatggttgtaaatattttgagatttttgcatgacttaagatgtctgtattctgcccttaacagaaatgtggctgagcatagaatgacaggtggaaaataataccctcccctagcccctcccaagcgtgctggttgagatttctgatgccattctgattcccgtacctttatatgtgacttaggtttttttatccacccttcctggaaacatttaagatctctttattcttggtgttctgaactgtcatgatggtgttgtatcccgggtgttaaaccttgtgctgggccttcatgggaaatttcttaaattttcttgtgattatttacattctttctttctggaccacctattatttcaatgttggaccctcccctacacccaggctgatgctctaatattttttatcttttctatttttcgtctatgtttctgatctgctttcaggaagaattattcatttttatcttcccaatctgaatgttttattgaatttttattttccaagttaataaaacctttggttattatcctgtctttgttttacagtgtcctgctcttgatgcgtggatgcagattttgtctctctgtggacgttaatgattgtggtctgaggggaagtcttttctgctccctgtgttgccctcattttctctgagttctctttattttggtggtctcagtctctatctttcacgttgtgaatttttctcaaatatatggtgatcctatggatctgttcatgttttaagagtgaggcatccaaaagctgattggaagttgtgtgtgccaactggtgagcttttccactagggtcaccaggtgggcacctggactcatcattggagaacactgcctgtcagtatttgcacgtgttttctctggggctcattctgtttcttgagagatattcccactactctccttcctgggaaacgggcatacacagggcttttagcctatgctgagtactcatgtggtttcaaaaatggtgtcccatctgggcagaagtccccatgagcacttggcttgactggcaaaggacaccttttgccccttcctccagacatacccagctctgagcttggacaatgctcgaggaacaatgaaaaggctagattttaactcctaattgccctctttagccaagtgcctctgtgcaatgcacaactgtaggaccatatccagagaccctggtctatactcagtgtgcccgagtcctgaccgctgagcaggcagcctcatcacccgtgagtatttagactttcattaagttgcttcaacctttgctgtgcctggtgtccctgagttggagctgctctgatttctccatggagtaggagcacagtggtcatctggctgcatgggaaggacaggggacctcagagccaataaatgccctggtcttcagccccatgtctcaccccatccctcctattccaatccccaagcctctcctggaggccacagggcatctctgctgaccactctgtggcctcccctctgcaggcatgtggttttaggatccccctccctgctcacttttccatcagttccattcctgcataaataggttgctagctcttgcttactgttctcttctgtattctgtgttcatggttgtattaatataactttcattcctctgctcctattttcatggggtttcatgagggaagaaacaggctcatgtgttcagtataccatcttgatccataaaccccatttgagttatctcacaggttgcttagggggcttgctgctctgactggtttgtgaacgtgccctgagtccagctgggactgcagcaacatccatcctgttgagctgtggtctgctaagtgattttgtgtaatgctgtgccaagtgcaggagagggatacatagcatggctaagctctgcttgaatgccatgattagttattaccttccttccttccccctggttttgctgcctattgtcagtaaatgatcttagatctcctgcctccccaaagatatagtctatgtggtggtctgggttctaggttttctttaccacccttgcttcacttaagaaacagaaaactggctaggcacagtagtggctcacacctataatcccagccctttgggaggccaaggcaggaggatcgcttgaggccaggaattcaagaccagcctgcacaacatagcaagactccatctctacaaaaagttaaatttaaattagtggtggcatncacttatagtcccagctactcnggaggatgaggcaggagaattgtttgagcccatgactttgaggttactgtgagctntgatcctgctattttactccacctgagtgacagagcgagacgctgtctcaaaaataaagaaacaagtagtccacacaggtgtttgccagcaaacaaacagcgcggattctctgttgaacgtggccaacattgcctcgtcgaagtttgtatcttgccatagttgatgatcaggtggtcggggcttcctggtcagacctgacctttgtggggagatgttctcccaccaaggctcagaagcaggacactcttgctgcccctcgggcagccacccagaacatgggcgtctccatttctgaggttcagcatagttccccccaccctcttcccatgcagtgcatgcctgctctttatcaggatggaacagagggaaggcagaggcactgggggcagcctgtgttgttgatctctgtaagtcacagactgttcgaaaacctcaggaattatgtaagcgttcagtgcctcatttaagagatgaaaaactgaagattagaaagaggaaacgactagtcgccctgctagttgatgacctccagatagccatcttcattcccagttaagtttactacaaaaccacagcctcagctgctgaagctaacctccctacccaccatcgctagggactcagaacaccatggagctcatctctccaacaaaagtcagaattagcaagtacagatgtgtcttacgaaaatgtcagaatccatcatggctgctttggtgaggagctgttctccttccgtggtcatgccattggaaggcagttgtatgacaagaatgctttcacatgagctccgattttcttaactctccagaaggacttcagaagcctctggagttttgagacacggcctctctctcccttctgcttggagacaccttcctgggggtctccactgcattccccgccggtattcctctgtggagccttgcgccctcaggtcccagaaatgggctgtgtgggagcttccagtcagcctggtatctcgggaccttctcagccaggaaatgagactgcacaaagccctgtgaggcccagctgtgttatttctccttccccgacattgcataatcactgctgacacagcatttggggaagatttaacgtcttgggccagcagctgccatctggaaccatcaccacatagcaggttgttctgtcccatccaactgatgagggggctgccctaatgacaaggtccaggacctgggttgggtggtggaaggctgggagctggagtgggcattattgtgcttctgtgctgaaaattgctatggctcttttcccctaacagccagcgtgggagaaccaaacatgagacacaagcatccccttgagctccacagatcttgcgccttgctctcatcaggcatttccttgganaacagcagtcagcagctcatggaagtgagcccggtgcacagactttgcatggactttgcacaggttccatttccatcgtgtgcagacacctgtatctttgggctccacgtgagcacctgccctcttcactctgattttttttttaagagacagcatcttactctgtcaccgaggctggagtacagtggtgtgatcacagctcactgcagcctgaaactcctgggctcaggcaatcctcctgcctcagcctcccgagtggctggtagtacaggtgcatgccaccacgcccacctaatttttttatcttttatagatacaggtctcactgttgctcaggctggtctcgaactcctggcctcaagtgatcctcctgccttggcctaccaaaatgctgggattataggcatgaaccactgtgcctggccttcactctgatttttcttaagagtcctacaggaccttcaggtcttgtcacttctctaccattgtgtgtgagacagggcatggggtgagcttggtcaggtgtgggtcaaaagcctggagactcagagctgctggttccccaagagcccacaaaagttatcagagtttctgagctgagtgttctgcagttgccagaccccacaatgctgggaatactggcttctttgtgtttagaacttgttctgagaaccttgatgagaacacatcaagcaagcagttcctcccagccagggctggagcaacatgccaaaaaacattcttgtctatgggaaaaagacaaccagtattttgtactgtttgaccaagttgtttttaaatatacacatgcctcaacaatccacggcctcaatcgcactgctaatttgtttaaatccctgacactcagatgtcaagaatagcttcatctagcagtgttctctttaaaggaacccttttttttgttttcattttaatcactgccttcttctctgggaggtattgtgggctagagaaagaagtcaggtttgggagtcagccagatttagattggagtcccagctctgtcaccagatctctgggtgatcttggcaaactaacttctgagcttctgtgcattataggcattcagcacatatttgttggatgaaaaatacttttcttgaaagtttatgaagttgtaggatgcccagcagcccccttttctctatttccttcctcttgaagcaagcgttgactatacctctttccctaacccttagtgtaccatagcttcttccaacctctctccaatccattacttttttctgagctaccctgtctcaaatctaactcaggcctttttgcaagaggaagtttaagccattgtttactcattaactcacttgacccttagaacaatcgtgggaggtgtttatttcggaaaggaagctaaagcacaggacagaaaaataaggtcatagcgtgaactagtaagtagcagaactgggaacataggactgttattttcaaacactctaaacttcactgcagttgcaaatttgcaaccaaaatggccgccttgaaagggtcttttgcagtaaaatctcagtgtccaacatcaaagacagttcttcagggcctccaattaactatacatcctgcccccagctgctcatctctgcacctctaacacgtacttcacagagtaggaaattgggctttctccttcaaaaagaaaagtagagaaggcctgagggcagtgtaattaaaatggagaagtagagaccacgaattacttggatgaattcataactggttggtctctgaggcagggattattatttttcctgtattttaagcttaaaagtagtgatttttgcattgttacaaaaaacaaaatagcaaaatatcatttgatacttgtattctgtttgcaatagctaccacttcctttagccccagcaaaaatcaataggtgtgtattctctacaagcccatgctgtgccagaatgccagtattgctaaatgtcatgcaaggatttagacacttttttaaaggaaactctgggagtgcctgttgtctggagagttgacattgtccaaagcaggccaacactggtatgggtatggagaacccacgtcctagctgtggctcacctgcagatgccttgaatttacctctctgggttggaagtgggaagacttcttttaaaagtcctttctaagtttaaaaatccaaaggttacgaaggtagtttttatttatctcaataagtggcctatttgcttaaagcaagtgtacctctgtatatcagcccaaagcttagggcagtgcttcttggctttagtatctgagaaaggtgcctttgggaagagtttggtcagacagaaggtagtctgaatcttaaaggtttcagatgaatgtttgaagtagaacctgggaaatctgcttcctagggctgttagaaggaaattggtctccttaaattacgtcagcatctgaggcagtttcctaagggaatttcttttaaattcaaaagttcaactgcaggaataaatagctgtacaggactagatcttcccatccctcatcttttccccttccccgagtaacgactcaaaaaggcttctgaaattctactcagaatcggagccgtttgcattccaacaaggatcccttaagccaaatgctggtgtgtttgtgtagaatgtccctggggtaggggcggtagctgtggggagggaatgtggtgcaggggacacctgccctctgcccttgaaattgcaccataagatgctgcctatgtcactcacagtggtgctgatactatccgccaaagacaaattgtgaacacggaaaaatggtcgttccctactgtacatcctcaggacagacttaactaaacttggagacaggagattgttcagaccatattgtagtgggtggtgatcattgttttattttgggggagtctggtctattgagcagattgaatgtttccttattgtgcagggcttaattgactatgtctgaaagtttttactgagagctctaagaaaactattgaggaaaatgaaatgttattttgtagtacaaggattatttttgtctatttaggatatacatagctgtagctttgtaaaaaaaaagatctttataaacaatatatgaatgtgccgtcttatttattgattactgtaaattaagatataaatggctatttgcataatttatacctgtgggaattaactggagtatttgttatttgactgttttctattaaggaatattaggcttggtgctatgatgaatgatcttgtaaaatcatgtgtattcttaagaaaatttttgaatataaatttcttgaactgaaaaaaacgtt

SEQ ID NO: 454127 - DNA, 9822 bp, Homo sapiens
  misc_feature (5041)..(5041): n is a, c, g, or t
  misc_feature (5063)..(5063): n is a, c, g, or t
  misc_feature (5119)..(5119): n is a, c, g, or t
  misc_feature (6500)..(6500): n is a, c, g, or t
gggtagcactgggtggggtccactttcctgggaacctgcttggtaactgcgtttcctctgtgtttcttctgtaggaaggccaacagctcaggagaagccatgtcactggggagccacagcccgcagagtgactccctgacacagcttgtccagcagccggatatgatgtattttattctcttcctgtggctcctggtgtactgcttgctgctcttcccacaactggatgttagcaggctctgatacgtgtgtctggataataaaaaagacaggaccctgaaaaggggcggggttacttcattttattttgggttctgggtggggcacttctacagacagttgaggacctccgaggaaacttagaccccctttctcgctattgtggttttttttttttttcaggtttccttttttttctggacaacctgagcatgcttttttctttggctgtgtactcaaaactcaggcatgcagctggatccgtaggtggggttttgtccttgtgtgccttgctgggttggatagggagcattgttagtgatcattagcccgcctggatcttagcacaccccacattgcaggttcacacgctggatgaacttgagtttcttacctctcagatgaagggctgcttaatgagaaagagggtgggcaccccaggccaagccccagctggggagagagctgccacgttttcctccaagcgtgggtgtttgagagaaggtgctggggtccatgcacctgtcgcagtccggtaactggttgcattcactaggggaaatccgagcagccagctctgtgtaagcacatccaggaatggcagaatccagggaggaaggtgaaagctgtgttgagagccactgtgtgctctttttcaccctgttttttttgttgtttttttgttttgttttttgtttgaggggagataacacttgaaattcagttttccattgattggattgagatagaaccatgattttcaaaccagatcgccagggcccagcagggccatataaaagccatgaggagtggctgggctggaatcagctcccagcagtgctggagctgggtggtggggtagcttcctgcccactaaagctttggtgcacacctccctcagaatgcatgtcttggaacgggcattctttgtggtcacttgtaatgggtttcttgaagaggctttctggacagcactccgggagcaggccagcacaggaggtttgtgaaagaagagaggcatctctagcacccctgcccccagtcttcctcagccccaggctccctctgctctctcctccctgccaagactcaggtccgtggtgagtctctgcattggttcctcctccccttgctctccccttcagaaagcatgtaccaggcaacccttataaaatcacaaatgagtcaggaggggactcagtgagcatcttgtctagctggacccagagagacagagcagcttgaccaagatcatatagccgaccaggggcagacttgcagtgagcacacaggcacctgatgccctgtccagagctgtcaccccttgtaggaaacttccactgggcacaccaatgtcctgagaaaaagataaaatgactagattaaaatgtccacattcaagcaaaaccagaattcttactcaccttcaagctcatccccaattccttctgaaatacccttgacagctgcaacagcttgtcatttgacataccagcgtcgctcttactccaggaatcacgtttctttctttgctagccaaggacttgctcatttcaagcagtgggtttcaagtttacagaattccagcatggccagaagaatttacatagcacatctgagtcgatgacagccaaaatctggcctctaaaccagtctgattatagtctgtctcccctcctgaaagaatttcagccttccaaccagaaagctgctgggagcttggagtgattccatctggaaggccaagagccccatggaaaatgagctaattaatgagctccctggcatcaatgaaagctcaaaggtacagataataaagattatgtgatagtttataactctgggcaccatgcagtccttgcctaaattagatgctcgaagagcctgggaagagccaacccaaatgtgaatcatttcattttatgggtctagaccttgttcagaaaaacctctgcaagatacttctctcacctattacaacttgtaatattgtttaaaacatctactggcaagatgcctgaaagtcatttggttcaggttggcagtcaactgatattttgcaaaggaaaaaaaaatctcatttgagtataggcttctatggaagaagctggatatagaaaatggatgtggaagtctgcaggacaaaccaccccattgcttgtaaattttttttaaattaaaagaaatacaataaggcttttaacaagaactagcagtcccctaagtctcgctgcttagaagtaaccactttcaactctcttatgtttgcatttctacataacgtgcttacactttattttttaatttagaaacatctactggcttgctgtcacagtagaggaggatttcactcttaccataccgtgctttggttttccagtatagctagatcacatcatttagtacatttctattaggtgttgacattacctggagcacttaaggattgttgactcccaagcccagcagtgtgttatggttacatgtcctttctcctccaaatgtccccattaatttgctattctctctctttactttttttttttttttggtgtggcacattctttaataacttcctgaggaagagaacatgggaagtaaatatggttgtaaatattttgagatttttgcatgacttaagatgtctgtattctgcccttaacagaaatgtggctgagcatagaatgacaggtggaaaataataccctcccctagcccctcccaagcgtgctggttgagatttctgatgccattctgattcccgtacctttatatgtgacttaggtttttttatccacccttcctggaaacatttaagatctctttattcttggtgttctgaactgtcatgatggtgttgtatcccgggtgttaaaccttgtgctgggccttcatgggaaatttcttaaattttcttgtgattatttacattctttctttctggaccacctattatttcaatgttggaccctcccctacacccaggctgatgctctaatattttttatcttttctatttttcgtctatgtttctgatctgctttcaggaagaattattcatttttatcttcccaatctgaatgttttattgaatttttattttccaagttaataaaacctttggttattatcctgtctttgttttacagtgtcctgctcttgatgcgtggatgcagattttgtctctctgtggacgttaatgattgtggtctgaggggaagtcttttctgctccctgtgttgccctcattttctctgagttctctttattttggtggtctcagtctctatctttcacgttgtgaatttttctcaaatatatggtgatcctatggatctgttcatgttttaagagtgaggcatccaaaagctgattggaagttgtgtgtgccaactggtgagcttttccactagggtcaccaggtgggcacctggactcatcattggagaacactgcctgtcagtatttgcacgtgttttctctggggctcattctgtttcttgagagatattcccactactctccttcctgggaaacgggcatacacagggcttttagcctatgctgagtactcatgtggtttcaaaaatggtgtcccatctgggcagaagtccccatgagcacttggcttgactggcaaaggacaccttttgccccttcctccagacatacccagctctgagcttggacaatgctcgaggaacaatgaaaaggctagattttaactcctaattgccctctttagccaagtgcctctgtgcaatgcacaactgtaggaccatatccagagaccctggtctatactcagtgtgcccgagtcctgaccgctgagcaggcagcctcatcacccgtgagtatttagactttcattaagttgcttcaacctttgctgtgcctggtgtccctgagttggagctgctctgatttctccatggagtaggagcacagtggtcatctggctgcatgggaaggacaggggacctcagagccaataaatgccctggtcttcagccccatgtctcaccccatccctcctattccaatccccaagcctctcctggaggccacagggcatctctgctgaccactctgtggcctcccctctgcaggcatgtggttttaggatccccctccctgctcacttttccatcagttccattcctgcataaataggttgctagctcttgcttactgttctcttctgtattctgtgttcatggttgtattaatataactttcattcctctgctcctattttcatggggtttcatgagggaagaaacaggctcatgtgttcagtataccatcttgatccataaaccccatttgagttatctcacaggttgcttagggggcttgctgctctgactggtttgtgaacgtgccctgagtccagctgggactgcagcaacatccatcctgttgagctgtggtctgctaagtgattttgtgtaatgctgtgccaagtgcaggagagggatacatagcatggctaagctctgcttgaatgccatgattagttattaccttccttccttccccctggttttgctgcctattgtcagtaaatgatcttagatctcctgcctccccaaagatatagtctatgtggtggtctgggttctaggttttctttaccacccttgcttcacttaagaaacagaaaactggctaggcacagtagtggctcacacctataatcccagccctttgggaggccaaggcaggaggatcgcttgaggccaggaattcaagaccagcctgcacaacatagcaagactccatctctacaaaaagttaaatttaaattagtggtggcatncacttatagtcccagctactcnggaggatgaggcaggagaattgtttgagcccatgactttgaggttactgtgagctntgatcctgctattttactccacctgagtgacagagcgagacgctgtctcaaaaataaagaaacaagtagtccacacaggtgtttgccagcaaacaaacagcgcggattctctgttgaacgtggccaacattgcctcgtcgaagtttgtatcttgccatagttgatgatcaggtggtcggggcttcctggtcagacctgacctttgtggggagatgttctcccaccaaggctcagaagcaggacactcttgctgcccctcgggcagccacccagaacatgggcgtctccatttctgaggttcagcatagttccccccaccctcttcccatgcagtgcatgcctgctctttatcaggatggaacagagggaaggcagaggcactgggggcagcctgtgttgttgatctctgtaagtcacagactgttcgaaaacctcaggaattatgtaagcgttcagtgcctcatttaagagatgaaaaactgaagattagaaagaggaaacgactagtcgccctgctagttgatgacctccagatagccatcttcattcccagttaagtttactacaaaaccacagcctcagctgctgaagctaacctccctacccaccatcgctagggactcagaacaccatggagctcatctctccaacaaaagtcagaattagcaagtacagatgtgtcttacgaaaatgtcagaatccatcatggctgctttggtgaggagctgttctccttccgtggtcatgccattggaaggcagttgtatgacaagaatgctttcacatgagctccgattttcttaactctccagaaggacttcagaagcctctggagttttgagacacggcctctctctcccttctgcttggagacaccttcctgggggtctccactgcattccccgccggtattcctctgtggagccttgcgccctcaggtcccagaaatgggctgtgtgggagcttccagtcagcctggtatctcgggaccttctcagccaggaaatgagactgcacaaagccctgtgaggcccagctgtgttatttctccttccccgacattgcataatcactgctgacacagcatttggggaagatttaacgtcttgggccagcagctgccatctggaaccatcaccacatagcaggttgttctgtcccatccaactgatgagggggctgccctaatgacaaggtccaggacctgggttgggtggtggaaggctgggagctggagtgggcattattgtgcttctgtgctgaaaattgctatggctcttttcccctaacagccagcgtgggagaaccaaacatgagacacaagcatccccttgagctccacagatcttgcgccttgctctcatcaggcatttccttgganaacagcagtcagcagctcatggaagtgagcccggtgcacagactttgcatggactttgcacaggttccatttccatcgtgtgcagacacctgtatctttgggctccacgtgagcacctgccctcttcactctgattttttttttaagagacagcatcttactctgtcaccgaggctggagtacagtggtgtgatcacagctcactgcagcctgaaactcctgggctcaggcaatcctcctgcctcagcctcccgagtggctggtagtacaggtgcatgccaccacgcccacctaatttttttatcttttatagatacaggtctcactgttgctcaggctggtctcgaactcctggcctcaagtgatcctcctgccttggcctaccaaaatgctgggattataggcatgaaccactgtgcctggccttcactctgatttttcttaagagtcctacaggaccttcaggtcttgtcacttctctaccattgtgtgtgagacagggcatggggtgagcttggtcaggtgtgggtcaaaagcctggagactcagagctgctggttccccaagagcccacaaaagttatcagagtttctgagctgagtgttctgcagttgccagaccccacaatgctgggaatactggcttctttgtgtttagaacttgttctgagaaccttgatgagaacacatcaagcaagcagttcctcccagccagggctggagcaacatgccaaaaaacattcttgtctatgggaaaaagacaaccagtattttgtactgtttgaccaagttgtttttaaatatacacatgcctcaacaatccacggcctcaatcgcactgctaatttgtttaaatccctgacactcagatgtcaagaatagcttcatctagcagtgttctctttaaaggaacccttttttttgttttcattttaatcactgccttcttctctgggaggtattgtgggctagagaaagaagtcaggtttgggagtcagccagatttagattggagtcccagctctgtcaccagatctctgggtgatcttggcaaactaacttctgagcttctgtgcattataggcattcagcacatatttgttggatgaaaaatacttttcttgaaagtttatgaagttgtaggatgcccagcagcccccttttctctatttccttcctcttgaagcaagcgttgactatacctctttccctaacccttagtgtaccatagcttcttccaacctctctccaatccattacttttttctgagctaccctgtctcaaatctaactcaggcctttttgcaagaggaagtttaagccattgtttactcattaactcacttgacccttagaacaatcgtgggaggtgtttatttcggaaaggaagctaaagcacaggacagaaaaataaggtcatagcgtgaactagtaagtagcagaactgggaacataggactgttattttcaaacactctaaacttcactgcagttgcaaatttgcaaccaaaatggccgccttgaaagggtcttttgcagtaaaatctcagtgtccaacatcaaagacagttcttcagggcctccaattaactatacatcctgcccccagctgctcatctctgcacctctaacacgtacttcacagagtaggaaattgggctttctccttcaaaaagaaaagtagagaaggcctgagggcagtgtaattaaaatggagaagtagagaccacgaattacttggatgaattcataactggttggtctctgaggcagggattattatttttcctgtattttaagcttaaaagtagtgatttttgcattgttacaaaaaacaaaatagcaaaatatcatttgatacttgtattctgtttgcaatagctaccacttcctttagccccagcaaaaatcaataggtgtgtattctctacaagcccatgctgtgccagaatgccagtattgctaaatgtcatgcaaggatttagacacttttttaaaggaaactctgggagtgcctgttgtctggagagttgacattgtccaaagcaggccaacactggtatgggtatggagaacccacgtcctagctgtggctcacctgcagatgccttgaatttacctctctgggttggaagtgggaagacttcttttaaaagtcctttctaagtttaaaaatccaaaggttacgaaggtagtttttatttatctcaataagtggcctatttgcttaaagcaagtgtacctctgtatatcagcccaaagcttagggcagtgcttcttggctttagtatctgagaaaggtgcctttgggaagagtttggtcagacagaaggtagtctgaatcttaaaggtttcagatgaatgtttgaagtagaacctgggaaatctgcttcctagggctgttagaaggaaattggtctccttaaattacgtcagcatctgaggcagtttcctaagggaatttcttttaaattcaaaagttcaactgcaggaataaatagctgtacaggactagatcttcccatccctcatcttttccccttccccgagtaacgactcaaaaaggcttctgaaattctactcagaatcggagccgtttgcattccaacaaggatcccttaagccaaatgctggtgtgtttgtgtagaatgtccctggggtaggggcggtagctgtggggagggaatgtggtgcaggggacacctgccctctgcccttgaaattgcaccataagatgctgcctatgtcactcacagtggtgctgatactatccgccaaagacaaattgtgaacacggaaaaatggtcgttccctactgtacatcctcaggacagacttaactaaacttggagacaggagattgttcagaccatattgtagtgggtggtgatcattgttttattttgggggagtctggtctattgagcagattgaatgtttccttattgtgcagggcttaattgactatgtctgaaagtttttactgagagctctaagaaaactattgaggaaaatgaaatgttattttgtagtacaaggattatttttgtctatttaggatatacatagctgtagctttgtaaaaaaaaagatctttataaacaatatatgaatgtgccgtcttatttattgattactgtaaattaagatataaatggctatttgcataatttatacctgtgggaattaactggagtatttgttatttgactgttttctattaaggaatattaggcttggtgctatgatgaatgatcttgtaaaatcatgtgtattcttaagaaaatttttgaatataaatttcttgaactgaaaaaaacgtt

SEQ ID NO: 454128 - DNA, 3844 bp, Homo sapiens
  misc_feature (1128)..(1128): n is a, c, g, or t
gcggccgcggtcccggggggcggctgagggggccgggccggggctgcggggcgaacggcgcggctaggatccggcggctcagcccggggcggcgaggctcggcacggagatggcggcgcgctcggcgcagacagagctgtgaaccaaccccgctcacggctaacaagcccacccaccatggcgagccccactctgagccccgactcctcatcccaggaggccctgtcggcccccacctgctccccaacctctgactccgagaacctcagccccgatgagctggagctgctggccaagctcgaagagcagaaccggctcctggaggccgactccaagtccatgcgctccatgaatggctcgcggcggaacagtggctcctcgctagtgtccagctcctcggcctcctccaacctgagccacctggaggaggacacgtggatcctgtggggccggatcgccaacgagtgggaggagtggcggcgcaggaaggagaagctgctcaaggagctgatccgcaagggcatcccccaccacttccgggccatcgtgtggcagcttctgtgcagcgccacggacatgcccgtcaagaaccagtactccgagctgctcaagatgtcctcgccgtgcgagaagctgatccgcagggacatcgcccgcacctacccggaacacgagttcttcaagggccaggacagcctgggccaggaggtcctcttcaacgtcatgaaggcatactcgctggtagaccgggaggtgggctactgccagggaagcgccttcatcgtgggcctgctcctcatgcagatgcctgaggaggaggccttctgtgtgttcgtgcggctgatgcaggagtaccggctgcgggagctcttcaaacccagcatggccgagctcgggctctgcatctatcagttcgagtacatgctgcaggagcagctcccagacctcaacacccacttccgttcccaaagcttccacacatccatgtatgcctcgtcctggttcctcacactgttcctgaccaccttcccactccccgtcgccacccgggtctttgacatcttcatgtatgaggggctggagatcgtgttccgagtgggcctcgccctgctgcaggtgaaccaggcngagctgatgcagctggacatggaggggatgtcccagtacttccagagagtgatcccccaccagttcgacagctgcccggacaagctggtcctcaaagcctaccaggtcaagtacaaccccaagaagatgaagaggctggagaaggagtacgcagccatgaagagcaaggagatggaggagcagatcgagatcaaaagacttcggacggagaaccggctcctgaaacagcggattgaaaccctagagaaggggcaagtgacacgggcgcaggaggcggaggagaactacgtcatcaagcgggagctggcggtggtgcggcagcagtgcagctcggcggccgaggacctgcagaaggcacagagcaccatccggcagctacaggagcagcaggagaacccccgcctcacagaagacttcgtgtcccacctggagaccgagctggagcagtcgaggctgcgggagacggagacactgggggcccttcgggagatgcaggacaaggttctcgacatggaaaagaggaacagctcgctgcccgacgagaacaatgtggcgcagctgcaggaggagctgaaggcgctcaaggtgcgggaaggccaggcggtggcctcgacgcgagagcttaaactgcagctgcaggagctctcggacacctggcaggcccatctggcccgcggcggccgctggaaggagtccccacggaagctggtcgtgggcgagctgcaggacgagctgatgagcgtgcgtctgcgcgaggcccaggccctggccgagggccgcgagctgcggcagcgcgtggtggaacttgagacgcaggaccacatccaccgcaaccttctgaaccgcgtggaggcggagcgcgcggcgctgcaggagaagctgcagtacctggctgcacagaacaaggggctgcagacgcagctcagcgaaagccgccgcaagcaggccgaggcccgagtgcaagagcaaggaggaggtgatggctgtgcgactgcgggaggcggacagcatggctgcggtggccgagatgcggcagcgcattgccgagctggagatccagagggaggaaggccgcatccagggccagctgaaccactcggactcatcgcagtacatccgcgagctcaaggaccagatcgaggagctgaaggccgaggtgcggctgctgaagggcccgccgcccttcgaggacccgctggctttcgatgggctgagcctggcgcggcacttggacgaggactcgctgccgtcgtcggacgaggagctacttggcgtaggcgtgggcgctgccctgcaggacgcattgtaccctctgtccccgcgcgatgcgcgcttcttccgccgtctggagcggccggccaaggacagcgagggcagctcagacagcgacgccgatgagctggccgcgccctacagccagggtctggacaactgaggccatgcccagcgcgcccggagtcaggaggccgcagccgcggggggcgcccgggcagtccgcgttctgctccccacctgccgcacttgacaaactacgcgccctctgtggctcggccacccctaaagcgaggcccggcgaggcagcgcagagggtagggtccgacctgggctcctcagggccccggggcaggctctctctccccagcagtgtttacccatcttggtctgtacccctccgggccctctggcgttccaggggtgcctggaggggctgactgctctcttaacaggagggcagagggcaggggacagacgacccagaggtcccagcactgaatgagcaggcagctcccacctcctggcaggcttccttctgggacaggggcgacattgctgggaagtgctcaggaggtagccgaggcctgaggaaggagagcgccagctctgggctggacatcagcaccccacaacactcctcgggatgaagtgacccttgactagcccctggccatctctaggggagtcaggccgctggggacagatggccaggccggcctctcctgcctggcgcaggcaccgtggcccctgcagcggaaaccaaagtccccctactatgtgcggggcgcctggggactgagtggctaacgggaagcctccctgcttctctggggccagagcagcttccaggaagtgaagagacccctctccccagtgccccacatctttctctgggagacactcgcgccccctatcctggccagtgatggaggggtatctctacaggggtcctcggtctccatctacttccctttcttcatgtgtttccagccccaccctcagccagagccaggcccccaggcaggagcttcccagcgagcggcctcccctcacttcctcctggtggtcccgttgtctctgctgaatcagagctgagaacggtgccaaaatccaacgatgccccccaggccccttcctcccttcccccggccccccgggcctcatgaccctgggggctgcccccctcggtgctcccggagcctccagtagagtagcgtcacaagcaatctccctggcgcttcctgggtggggacccctgctccgtccccgcttcctagctgcccacttttcagtgttacgaagcctggggaccggggcaggcacccacggggctctccacacgccccctacactgcccgccaccattttgcacactgcctgttcacatgtcgcccaggcgggaaaaatggaaaataaagtgtatttacacagtcaaaaaaaa

SEQ ID NO: 454129 - DNA, 3408 bp, Homo sapiens
  misc_feature (1128)..(1128): n is a, c, g, or t
gcggccgcggtcccggggggcggctgagggggccgggccggggctgcggggcgaacggcgcggctaggatccggcggctcagcccggggcggcgaggctcggcacggagatggcggcgcgctcggcgcagacagagctgtgaaccaaccccgctcacggctaacaagcccacccaccatggcgagccccactctgagccccgactcctcatcccaggaggccctgtcggcccccacctgctccccaacctctgactccgagaacctcagccccgatgagctggagctgctggccaagctcgaagagcagaaccggctcctggaggccgactccaagtccatgcgctccatgaatggctcgcggcggaacagtggctcctcgctagtgtccagctcctcggcctcctccaacctgagccacctggaggaggacacgtggatcctgtggggccggatcgccaacgagtgggaggagtggcggcgcaggaaggagaagctgctcaaggagctgatccgcaagggcatcccccaccacttccgggccatcgtgtggcagcttctgtgcagcgccacggacatgcccgtcaagaaccagtactccgagctgctcaagatgtcctcgccgtgcgagaagctgatccgcagggacatcgcccgcacctacccggaacacgagttcttcaagggccaggacagcctgggccaggaggtcctcttcaacgtcatgaaggcatactcgctggtagaccgggaggtgggctactgccagggaagcgccttcatcgtgggcctgctcctcatgcagatgcctgaggaggaggccttctgtgtgttcgtgcggctgatgcaggagtaccggctgcgggagctcttcaaacccagcatggccgagctcgggctctgcatctatcagttcgagtacatgctgcaggagcagctcccagacctcaacacccacttccgttcccaaagcttccacacatccatgtatgcctcgtcctggttcctcacactgttcctgaccaccttcccactccccgtcgccacccgggtctttgacatcttcatgtatgaggggctggagatcgtgttccgagtgggcctcgccctgctgcaggtgaaccaggcngagctgatgcagctggacatggaggggatgtcccagtacttccagagagtgatcccccaccagttcgacagctgcccggacaagctggtcctcaaagcctaccaggtcaagtacaaccccaagaagatgaagaggctggagaaggagtacgcagccatgaagagcaaggagatggaggagcagatcgagatcaaaagacttcggacggagaaccggctcctgaaacagcggattgaaaccctagagaaggagagcgctgctctggctgataggttaatccaggggcaagtgacacgggcgcaggaggcggaggagaactacgtcatcaagcgggagctggcggtggtgcggcagcagtgcagctcggcggccgaggacctgcagaaggcacagagcaccatccggcagctacaggagcagcaggagaacccccgcctcacagaagacttcgtgtcccacctggagaccgagctggagcagtcgaggctgcgggagacggagacactgggggcccttcgggagatgcaggacaaggttctcgacatggaaaagaggaacagctcgctgcccgacgagaacaatgtggcgcagctgcaggaggagctgaaggcgctcaaggtgcgggaaggccaggcggtggcctcgacgcgagagcttaaactgcagctgcaggagctctcggacacctggcaggaccagatcgaggagctgaaggccgaggtgcggctgctgaagggcccgccgcccttcgaggacccgctggctttcgatgggctgagcctggcgcggcacttggacgaggactcgctgccgtcgtcggacgaggagctacttggcgtaggcgtgggcgctgccctgcaggacgcattgtaccctctgtccccgcgcgatgcgcgcttcttccgccgtctggagcggccggccaaggacagcgagggcagctcagacagcgacgccgatgagctggccgcgccctacagccagggtctggacaactgaggccatgcccagcgcgcccggagtcaggaggccgcagccgcggggggcgcccgggcagtccgcgttctgctccccacctgccgcacttgacaaactacgcgccctctgtggctcggccacccctaaagcgaggcccggcgaggcagcgcagagggtagggtccgacctgggctcctcagggccccggggcaggctctctctccccagcagtgtttacccatcttggtctgtacccctccgggccctctggcgttccaggggtgcctggaggggctgactgctctcttaacaggagggcagagggcaggggacagacgacccagaggtcccagcactgaatgagcaggcagctcccacctcctggcaggcttccttctgggacaggggcgacattgctgggaagtgctcaggaggtagccgaggcctgaggaaggagagcgccagctctgggctggacatcagcaccccacaacactcctcgggatgaagtgacccttgactagcccctggccatctctaggggagtcaggccgctggggacagatggccaggccggcctctcctgcctggcgcaggcaccgtggcccctgcagcggaaaccaaagtccccctactatgtgcggggcgcctggggactgagtggctaacgggaagcctccctgcttctctggggccagagcagcttccaggaagtgaagagacccctctccccagtgccccacatctttctctgggagacactcgcgccccctatcctggccagtgatggaggggtatctctacaggggtcctcggtctccatctacttccctttcttcatgtgtttccagccccaccctcagccagagccaggcccccaggcaggagcttcccagcgagcggcctcccctcacttcctcctggtggtcccgttgtctctgctgaatcagagctgagaacggtgccaaaatccaacgatgccccccaggccccttcctcccttcccccggccccccgggcctcatgaccctgggggctgcccccctcggtgctcccggagcctccagtagagtagcgtcacaagcaatctccctggcgcttcctgggtggggacccctgctccgtccccgcttcctagctgcccacttttcagtgttacgaagcctggggaccggggcaggcacccacggggctctccacacgccccctacactgcccgccaccattttgcacactgcctgttcacatgtcgcccaggcgggaaaaatggaaaataaagtgtatttacacagtcaaaaaaaa

SEQ ID NO: 454130 - DNA, 1914 bp, Homo sapiens
gcggccgcggtcccggggggcggctgagggggccgggccggggctgcggggcgaacggcgcggctaggatccggcggctcagcccggggcggcgaggctcggcacggagatggcggcgcgctcggcgcagacagagctgtgaaccaaccccgctcacggctaacaagcccacccaccatggcgagccccactctgagccccgactcctcatcccaggaggccctgtcggcccccacctgctccccaacctctgactccgagaacctcagccccgatgagctggagctgctggccaagctcgaagagcagaaccggctcctggaggccgactccaagtccatgcgctccatgaatgtgcggctgctgaagggcccgccgcccttcgaggacccgctggctttcgatgggctgagcctggcgcggcacttggacgaggactcgctgccgtcgtcggacgaggagctacttggcgtaggcgtgggcgctgccctgcaggacgcattgtaccctctgtccccgcgcgatgcgcgcttcttccgccgtctggagcggccggccaaggacagcgagggcagctcagacagcgacgccgatgagctggccgcgccctacagccagggtctggacaactgaggccatgcccagcgcgcccggagtcaggaggccgcagccgcggggggcgcccgggcagtccgcgttctgctccccacctgccgcacttgacaaactacgcgccctctgtggctcggccacccctaaagcgaggcccggcgaggcagcgcagagggtagggtccgacctgggctcctcagggccccggggcaggctctctctccccagcagtgtttacccatcttggtctgtacccctccgggccctctggcgttccaggggtgcctggaggggctgactgctctcttaacaggagggcagagggcaggggacagacgacccagaggtcccagcactgaatgagcaggcagctcccacctcctggcaggcttccttctgggacaggggcgacattgctgggaagtgctcaggaggtagccgaggcctgaggaaggagagcgccagctctgggctggacatcagcaccccacaacactcctcgggatgaagtgacccttgactagcccctggccatctctaggggagtcaggccgctggggacagatggccaggccggcctctcctgcctggcgcaggcaccgtggcccctgcagcggaaaccaaagtccccctactatgtgcggggcgcctggggactgagtggctaacgggaagcctccctgcttctctggggccagagcagcttccaggaagtgaagagacccctctccccagtgccccacatctttctctgggagacactcgcgccccctatcctggccagtgatggaggggtatctctacaggggtcctcggtctccatctacttccctttcttcatgtgtttccagccccaccctcagccagagccaggcccccaggcaggagcttcccagcgagcggcctcccctcacttcctcctggtggtcccgttgtctctgctgaatcagagctgagaacggtgccaaaatccaacgatgccccccaggccccttcctcccttcccccggccccccgggcctcatgaccctgggggctgcccccctcggtgctcccggagcctccagtagagtagcgtcacaagcaatctccctggcgcttcctgggtggggacccctgctccgtccccgcttcctagctgcccacttttcagtgttacgaagcctggggaccggggcaggcacccacggggctctccacacgccccctacactgcccgccaccattttgcacactgcctgttcacatgtcgcccaggcgggaaaaatggaaaataaagtgtatttacacagtcaaaaaaaa

SEQ ID NO: 454131 - DNA, 1364 bp, Homo sapiens
  misc_feature (1128)..(1128): n is a, c, g, or t
gcggccgcggtcccggggggcggctgagggggccgggccggggctgcggggcgaacggcgcggctaggatccggcggctcagcccggggcggcgaggctcggcacggagatggcggcgcgctcggcgcagacagagctgtgaaccaaccccgctcacggctaacaagcccacccaccatggcgagccccactctgagccccgactcctcatcccaggaggccctgtcggcccccacctgctccccaacctctgactccgagaacctcagccccgatgagctggagctgctggccaagctcgaagagcagaaccggctcctggaggccgactccaagtccatgcgctccatgaatggctcgcggcggaacagtggctcctcgctagtgtccagctcctcggcctcctccaacctgagccacctggaggaggacacgtggatcctgtggggccggatcgccaacgagtgggaggagtggcggcgcaggaaggagaagctgctcaaggagctgatccgcaagggcatcccccaccacttccgggccatcgtgtggcagcttctgtgcagcgccacggacatgcccgtcaagaaccagtactccgagctgctcaagatgtcctcgccgtgcgagaagctgatccgcagggacatcgcccgcacctacccggaacacgagttcttcaagggccaggacagcctgggccaggaggtcctcttcaacgtcatgaaggcatactcgctggtagaccgggaggtgggctactgccagggaagcgccttcatcgtgggcctgctcctcatgcagatgcctgaggaggaggccttctgtgtgttcgtgcggctgatgcaggagtaccggctgcgggagctcttcaaacccagcatggccgagctcgggctctgcatctatcagttcgagtacatgctgcaggagcagctcccagacctcaacacccacttccgttcccaaagcttccacacatccatgtatgcctcgtcctggttcctcacactgttcctgaccaccttcccactccccgtcgccacccgggtctttgacatcttcatgtatgaggggctggagatcgtgttccgagtgggcctcgccctgctgcaggtgaaccaggcngagctgatgcagctggacatggaggggatgtcccaggcttttaaatcattgggattatatgaatgagccaccacatccagcatctgccagcttttcttctggaaactaaggctttggctgcaggcagtcccccattccctcccctcacgctcagtctttccattgctccacaaacactgaggacacggcgttgaggacatggcgacaccccgggcagacccgttcctgcccccctc

SEQ ID NO: 454132 - DNA, 472 bp, Homo sapiens
tacacccattttatagctgaggaactccaaccgggttccacaggcgagtccgctccccgtgggccttgtcaagggggtcgccctcccccatctgagccgcccaaggcagagctcaggaggaaacgtggctgggggcgtttgtcctgcaggaagggccatgcggctgcgctgctcccccaggccctgaccccactcttcccgcagaggaacagctcgctgcccgacgagaacaatgtggcgcagctgcaggaggagctgaaggcgctcaaggtgcgggaaggccaggcggtggcctcgacgcgagagcttaaactgcagctgcaggagctctcggacacctggcaggtgagggccgggtgggcgccggcgggcagagcgccccctagggccatcccctcggggttcttgggcggaggctgaccgccggcttctcggcttcaccccccaggcccatctggcccgcggcggccgc

SEQ ID NO: 454133 - DNA, 3375 bp, Homo sapiens
  misc_feature (1128)..(1128): n is a, c, g, or t
gcggccgcggtcccggggggcggctgagggggccgggccggggctgcggggcgaacggcgcggctaggatccggcggctcagcccggggcggcgaggctcggcacggagatggcggcgcgctcggcgcagacagagctgtgaaccaaccccgctcacggctaacaagcccacccaccatggcgagccccactctgagccccgactcctcatcccaggaggccctgtcggcccccacctgctccccaacctctgactccgagaacctcagccccgatgagctggagctgctggccaagctcgaagagcagaaccggctcctggaggccgactccaagtccatgcgctccatgaatggctcgcggcggaacagtggctcctcgctagtgtccagctcctcggcctcctccaacctgagccacctggaggaggacacgtggatcctgtggggccggatcgccaacgagtgggaggagtggcggcgcaggaaggagaagctgctcaaggagctgatccgcaagggcatcccccaccacttccgggccatcgtgtggcagcttctgtgcagcgccacggacatgcccgtcaagaaccagtactccgagctgctcaagatgtcctcgccgtgcgagaagctgatccgcagggacatcgcccgcacctacccggaacacgagttcttcaagggccaggacagcctgggccaggaggtcctcttcaacgtcatgaaggcatactcgctggtagaccgggaggtgggctactgccagggaagcgccttcatcgtgggcctgctcctcatgcagatgcctgaggaggaggccttctgtgtgttcgtgcggctgatgcaggagtaccggctgcgggagctcttcaaacccagcatggccgagctcgggctctgcatctatcagttcgagtacatgctgcaggagcagctcccagacctcaacacccacttccgttcccaaagcttccacacatccatgtatgcctcgtcctggttcctcacactgttcctgaccaccttcccactccccgtcgccacccgggtctttgacatcttcatgtatgaggggctggagatcgtgttccgagtgggcctcgccctgctgcaggtgaaccaggcngagctgatgcagctggacatggaggggatgtcccagtacttccagagagtgatcccccaccagttcgacagctgcccggacaagctggtcctcaaagcctaccaggtcaagtacaaccccaagaagatgaagaggctggagaaggagtacgcagccatgaagagcaaggagatggaggagcagatcgagatcaaaagacttcggacggagaaccggctcctgaaacagcggattgaaaccctagagaaggggcaagtgacacgggcgcaggaggcggaggagaactacgtcatcaagcgggagctggcggtggtgcggcagcagtgcagctcggcggccgaggacctgcagaaggcacagagcaccatccggcagctacaggagcagcaggagaacccccgcctcacagaagacttcgtgtcccacctggagaccgagctggagcagtcgaggctgcgggagacggagacactgggggcccttcgggagatgcaggacaaggttctcgacatggaaaagaggaacagctcgctgcccgacgagaacaatgtggcgcagctgcaggaggagctgaaggcgctcaaggtgcgggaaggccaggcggtggcctcgacgcgagagcttaaactgcagctgcaggagctctcggacacctggcaggaccagatcgaggagctgaaggccgaggtgcggctgctgaagggcccgccgcccttcgaggacccgctggctttcgatgggctgagcctggcgcggcacttggacgaggactcgctgccgtcgtcggacgaggagctacttggcgtaggcgtgggcgctgccctgcaggacgcattgtaccctctgtccccgcgcgatgcgcgcttcttccgccgtctggagcggccggccaaggacagcgagggcagctcagacagcgacgccgatgagctggccgcgccctacagccagggtctggacaactgaggccatgcccagcgcgcccggagtcaggaggccgcagccgcggggggcgcccgggcagtccgcgttctgctccccacctgccgcacttgacaaactacgcgccctctgtggctcggccacccctaaagcgaggcccggcgaggcagcgcagagggtagggtccgacctgggctcctcagggccccggggcaggctctctctccccagcagtgtttacccatcttggtctgtacccctccgggccctctggcgttccaggggtgcctggaggggctgactgctctcttaacaggagggcagagggcaggggacagacgacccagaggtcccagcactgaatgagcaggcagctcccacctcctggcaggcttccttctgggacaggggcgacattgctgggaagtgctcaggaggtagccgaggcctgaggaaggagagcgccagctctgggctggacatcagcaccccacaacactcctcgggatgaagtgacccttgactagcccctggccatctctaggggagtcaggccgctggggacagatggccaggccggcctctcctgcctggcgcaggcaccgtggcccctgcagcggaaaccaaagtccccctactatgtgcggggcgcctggggactgagtggctaacgggaagcctccctgcttctctggggccagagcagcttccaggaagtgaagagacccctctccccagtgccccacatctttctctgggagacactcgcgccccctatcctggccagtgatggaggggtatctctacaggggtcctcggtctccatctacttccctttcttcatgtgtttccagccccaccctcagccagagccaggcccccaggcaggagcttcccagcgagcggcctcccctcacttcctcctggtggtcccgttgtctctgctgaatcagagctgagaacggtgccaaaatccaacgatgccccccaggccccttcctcccttcccccggccccccgggcctcatgaccctgggggctgcccccctcggtgctcccggagcctccagtagagtagcgtcacaagcaatctccctggcgcttcctgggtggggacccctgctccgtccccgcttcctagctgcccacttttcagtgttacgaagcctggggaccggggcaggcacccacggggctctccacacgccccctacactgcccgccaccattttgcacactgcctgttcacatgtcgcccaggcgggaaaaatggaaaataaagtgtatttacacagtcaaaaaaaa

SEQ ID NO: 454134 - DNA, 3755 bp, Homo sapiens
  misc_feature (1128)..(1128): n is a, c, g, or t
gcggccgcggtcccggggggcggctgagggggccgggccggggctgcggggcgaacggcgcggctaggatccggcggctcagcccggggcggcgaggctcggcacggagatggcggcgcgctcggcgcagacagagctgtgaaccaaccccgctcacggctaacaagcccacccaccatggcgagccccactctgagccccgactcctcatcccaggaggccctgtcggcccccacctgctccccaacctctgactccgagaacctcagccccgatgagctggagctgctggccaagctcgaagagcagaaccggctcctggaggccgactccaagtccatgcgctccatgaatggctcgcggcggaacagtggctcctcgctagtgtccagctcctcggcctcctccaacctgagccacctggaggaggacacgtggatcctgtggggccggatcgccaacgagtgggaggagtggcggcgcaggaaggagaagctgctcaaggagctgatccgcaagggcatcccccaccacttccgggccatcgtgtggcagcttctgtgcagcgccacggacatgcccgtcaagaaccagtactccgagctgctcaagatgtcctcgccgtgcgagaagctgatccgcagggacatcgcccgcacctacccggaacacgagttcttcaagggccaggacagcctgggccaggaggtcctcttcaacgtcatgaaggcatactcgctggtagaccgggaggtgggctactgccagggaagcgccttcatcgtgggcctgctcctcatgcagatgcctgaggaggaggccttctgtgtgttcgtgcggctgatgcaggagtaccggctgcgggagctcttcaaacccagcatggccgagctcgggctctgcatctatcagttcgagtacatgctgcaggagcagctcccagacctcaacacccacttccgttcccaaagcttccacacatccatgtatgcctcgtcctggttcctcacactgttcctgaccaccttcccactccccgtcgccacccgggtctttgacatcttcatgtatgaggggctggagatcgtgttccgagtgggcctcgccctgctgcaggtgaaccaggcngagctgatgcagctggacatggaggggatgtcccagtacttccagagagtgatcccccaccagttcgacagctgcccggacaagctggtcctcaaagcctaccaggtcaagtacaaccccaagaagatgaagaggctggagaaggagtacgcagccatgaagagcaaggagatggaggagcagatcgagatcaaaagacttcggacggagaaccggctcctgaaacagcggattgaaaccctagagaaggggcaagtgacacgggcgcaggaggcggaggagaactacgtcatcaagcgggagctggcggtggtgcggcagcagtgcagctcggcggccgaggacctgcagaaggcacagagcaccatccggcagctacaggagcagcaggagaacccccgcctcacagaagacttcgtgtcccacctggagaccgagctggagcagtcgaggctgcgggagacggagacactgggggcccttcgggagatgcaggacaaggttctcgacatggaaaagaggaacagctcgctgcccgacgagaacaatgtggcgcagctgcaggaggagctgaaggcgctcaaggtgcgggaaggccaggcggtggcctcgacgcgagagcttaaactgcagctgcaggagctctcggacacctggcaggcccatctggcccgcggcggccgctggaaggagtccccacggaagctggtcgtgggcgagctgcaggacgagctgatgagcgtgcgtctgcgcgaggcccaggccctggccgagggccgcgagctgcggcagcgcgtggtggaacttgagacgcaggaccacatccaccgcaaccttctgaaccgcgtggaggcggagcgcgcggcgctgcaggagaagctgcagtacctggctgcacagaacaaggggctgcagacgcagctcagcgaaagccgccgcaagcaggccgaggcccgagtgcaagagcaaggaggaggtgatggctgtgcgactgcgggaggcggacagcatggctgcggtggccgagatgcggcagcgcattgccgagctggagatccagagggaggaaggccgcatccagggccagctgaaccactcggactcatcgcagtacatccgcgagctcaaggaccagatcgaggagctgaaggccgaggtgcggctgctgaagggcccgccgcccttcgaggacccgctggctttcgatgggctgagcctggcgcggcacttggacgaggactcgctgccgtcgtcggacgaggagctacttggcgtaggcgtgggcgctgccctgcaggacgcattgtaccctctgtccccgcgcgatgcgcgcttcttccgccgtctggagcggccggccaaggacagcgagggcagctcagacagcgacgccgatgagctggccgcgccctacagccagggtctggacaactgaggccatgcccagcgcgcccggagtcaggaggccgcagccgcggggggcgcccgggcagtccgcgttctgctccccacctgccgcacttgacaaactacgcgccctctgtggctcggccacccctaaagcgaggcccggcgaggcagcgcagagggtagggtccgacctgggctcctcagggccccggggcaggctctctctccccagcagtgtttacccatcttggtctgtacccctccgggccctctggcgttccaggggtgcctggaggggctgactgctctcttaacaggagggcagagggcaggggacagacgacccagaggtcccagcactgaatgagcaggcagctcccacctcctggcaggcttccttctgggacaggggcgacattgctgggaagtgctcaggaggtagccgaggcctgaggaaggagagcgccagctctgggctggacatcagcaccccacaacactcctcgggatgaagtgacccttgactagcccctggccatctctaggggagtcaggccgctggggacagatggccaggccggcctctcctgcctggcgcaggcaccgtggcccctgcagcggaaaccaaagtccccctactatgtgcggggcgcctggggactgagtggctaacgggaagcctccctgcttctctggggccagagcagcttccaggaagtgaagagacccctctccccagtgccccacatctttctctgggagacactcgcgccccctatcctggccagtgatggaggggtatctctacaggggtcctcggtctccatctacttccctggtggtcccgttgtctctgctgaatcagagctgagaacggtgccaaaatccaacgatgccccccaggccccttcctcccttcccccggccccccgggcctcatgaccctgggggctgcccccctcggtgctcccggagcctccagtagagtagcgtcacaagcaatctccctggcgcttcctgggtggggacccctgctccgtccccgcttcctagctgcccacttttcagtgttacgaagcctggggaccggggcaggcacccacggggctctccacacgccccctacactgcccgccaccattttgcacactgcctgttcacatgtcgcccaggcgggaaaaatggaaaataaagtgtatttacacagtcaaaaaaaa

SEQ ID NO: 454135 - DNA, 1939 bp, Homo sapiens
  misc_feature (1128)..(1128): n is a, c, g, or t
gcggccgcggtcccggggggcggctgagggggccgggccggggctgcggggcgaacggcgcggctaggatccggcggctcagcccggggcggcgaggctcggcacggagatggcggcgcgctcggcgcagacagagctgtgaaccaaccccgctcacggctaacaagcccacccaccatggcgagccccactctgagccccgactcctcatcccaggaggccctgtcggcccccacctgctccccaacctctgactccgagaacctcagccccgatgagctggagctgctggccaagctcgaagagcagaaccggctcctggaggccgactccaagtccatgcgctccatgaatggctcgcggcggaacagtggctcctcgctagtgtccagctcctcggcctcctccaacctgagccacctggaggaggacacgtggatcctgtggggccggatcgccaacgagtgggaggagtggcggcgcaggaaggagaagctgctcaaggagctgatccgcaagggcatcccccaccacttccgggccatcgtgtggcagcttctgtgcagcgccacggacatgcccgtcaagaaccagtactccgagctgctcaagatgtcctcgccgtgcgagaagctgatccgcagggacatcgcccgcacctacccggaacacgagttcttcaagggccaggacagcctgggccaggaggtcctcttcaacgtcatgaaggcatactcgctggtagaccgggaggtgggctactgccagggaagcgccttcatcgtgggcctgctcctcatgcagatgcctgaggaggaggccttctgtgtgttcgtgcggctgatgcaggagtaccggctgcgggagctcttcaaacccagcatggccgagctcgggctctgcatctatcagttcgagtacatgctgcaggagcagctcccagacctcaacacccacttccgttcccaaagcttccacacatccatgtatgcctcgtcctggttcctcacactgttcctgaccaccttcccactccccgtcgccacccgggtctttgacatcttcatgtatgaggggctggagatcgtgttccgagtgggcctcgccctgctgcaggtgaaccaggcngagctgatgcagctggacatggaggggatgtcccagtacttccagagagtgatcccccaccagttcgacagctgcccggacaagctggtcctcaaagcctaccaggtcaagtacaaccccaagaagatgaagaggctggagaaggagtacgcagccatgaagagcaaggagatggaggagcagatcgagatcaaaagacttcggacggagaaccggctcctgaaacagcggattgaaaccctagagaaggggcaagtgacacgggcgcaggaggcggaggagaactacgtcatcaagcgggagctggcggtggtgcggcagcagtgcagctcggcggccgaggacctgcagaaggcacagagcaccatccggcagctacaggagcagcaggagaacccccgcctcacagaagacttcgtgtcccacctggagaccgagctggagcagtcgaggctgcgggagacggagacactgggggcccttcgggagatgcaggacaaggttctcgacatggaaaagaggaacagctcgctgcccgacgagaacaatgtggcgcagctgcaggaggacctccagtagagtagcgtcacaagcaatctccctggcgcttcctgggtggggacccctgctccgtccccgcttcctagctgcccacttttcagtgttacgaagcctggggaccggggcaggcacccacggggctctccacacgccccctacactgcccgccaccattttgcacactgcctgttcacatgtcgcccaggcgggaaaaatggaaaataaagtgtatttacacagtcaaaaaaaa

SEQ ID NO: 454136 - DNA, 3757 bp, Homo sapiens
tcttggaaccgcgaccactggagccttagcgggcgcagcagctggaacgggagtactgcgacgcagcccggagtcggccttgtaggggcgaaggtgcagggagatcgcggcgggcgcagtcttgagcgccggagcgcgtccctgcccttagcggggcttgccccagtcgcaggggcacatccagccgctgcggctgacagcagccgcgcgcgcgggagtctgcggggtcgcggcagccgcacctgcgcgggcgaccagcgcaaggtccccgcccggctgggcgggcagcaagggccggggagagggtgcgggtgcaggcgggggccccacagggccaccttcttgcccggcggctgccgctggaaaatgtctcaggagaggcccacgttctaccggcaggagctgaacaagacaatctgggaggtgcccgagcgttaccagaacctgtctccagtgggctctggcgcctatggctctgtgtgtgctgcttttgacacaaaaacggggttacgtgtggcagtgaagaagctctccagaccatttcagtccatcattcatgcgaaaagaacctacagagaactgcggttacttaaacatatgaaacatgaaaatgtgattggtctgttggacgtttttacacctgcaaggtctctggaggaattcaatgatgtgtatctggtgacccatctcatgggggcagatctgaacaacattgtgaaatgtcagaagcttacagatgaccatgttcagttccttatctaccaaattctccgaggtctaaagtatatacattcagctgacataattcacagggacctaaaacctagtaatctagctgtgaatgaagactgtgagctgaagattctggattttggactggctcggcacacagatgatgaaatgacaggctacgtggccactaggtggtacagggctcctgagatcatgctgaactggatgcattacaaccagacagttgatatttggtcagtgggatgcataatggccgagctgttgactggaagaacattgtttcctggtacagaccatattaaccagcttcagcagattatgcgtctgacaggaacaccccccgcttatctcattaacaggatgccaagccatgaggcaagaaactatattcagtctttgactcagatgccgaagatgaactttgcgaatgtatttattggtgccaatcccctggctgtcgacttgctggagaagatgcttgtattggactcagataagagaattacagcggcccaagcccttgcacatgcctactttgctcagtaccacgatcctgatgatgaaccagtggccgatccttatgatcagtcctttgaaagcagggacctccttatagatgagtggaaaagcctgacctatgatgaagtcatcagctttgtgccaccaccccttgaccaagaagagatggagtcctgagcacctggtttctgttctgttgatcccacttcactgtgaggggaaggccttttcacgggaactctccaaatattattcaagtgcctcttgttgcagagatttcctccatggtggaagggggtgtgcgtgcgtgtgcgtgcgtgttagtgtgtgtgcatgtgtgtgtctgtctttgtgggagggtaagacaatatgaacaaactatgatcacagtgactttacaggaggttgtggatgctccagggcagcctccaccttgctcttctttctgagagttggctcaggcagacaagagctgctgtccttttaggaatatgttcaatgcaaagtaaaaaaatatgaattgtccccaatcccggtcatgcttttgccactttggcttctcctgtgaccccaccttgacggtggggcgtagacttgacaacatcccacagtggcacggagagaaggcccataccttctggttgcttcagacctgacaccgtccctcagtgatacgtacagccaaaaaggaccaactggcttctgtgcactagcctgtgattaacttgcttagtatggttctcagatcttgacagtatatttgaaactgtaaatatgtttgtgccttaaaaggagagaagaaagtgtagatagttaaaagactgcagctgctgaagttctgagccgggcaagtcgagagggctgttggacagctgcttgtgggcccggagtaatcaggcagccttcataggcggtcatgtgtgcatgtgagcacatgcgtatatgtgcgtctctctttctccctcacccccaggtgttgccatttctctgcttacccttcacctttggtgcagaggtttcttgaatatctgccccagtagtcagaagcaggttcttgatgtcatgtacttcctgtgtactctttatttctagcagagtgaggatgtgttttgcacgtcttgctatttgagcatgcacagctgcttgtcctgctctcttcaggaggccctggtgtcaggcaggtttgccagtgaagacttcttgggtagtttagatcccatgtcacctcagctgatattatggcaagtgatatcacctctcttcagcccctagtgctattctgtgttgaacacaattgatacttcaggtgcttttgatgtgaaaatcatgaaaagaggaacaggtggatgtatagcatttttattcatgccatctgttttcaaccaactatttttgaggaattatcatgggaaaagaccagggcttttcccaggaatatcccaaacttcggaaacaagttattctcttcactcccaataactaatgctaagaaatgctgaaaatcaaagtaaaaaattaaagcccataaggccagaaactccttttgctgtctttctctaaatatgattactttaaaataaaaaagtaacaaggtgtcttttccactcctatggaaaagggtcttcttggcagcttaacattgacttcttggtttggggagaaataaattttgtttcagaattttgtatattgtaggaatcctttgagaatgtgattccttttgatggggagaaagggcaaattattttaatattttgtattttcaactttataaagataaaatatcctcaggggtggagaagtgtcgttttcataacttgctgaatttcaggcattttgttctacatgaggactcatatatttaagccttttgtgtaataagaaagtataaagtcacttccagtgttggctgtgtgacagaatcttgtatttgggccaaggtgtttccatttctcaatcagtgcagtgatacatgtactccagagggacagggtggaccccctgagtcaactggagcaagaaggaaggaggcagactgatggcgattccctctcacccgggactctccccctttcaaggaaagtgaacctttaaagtaaaggcctcatctcctttattgcagttcaaatcctcaccatccacagcaagatgaattttatcagccatgtttggttgtaaatgctcgtgtgatttcctacagaaatactgctctgaatattttgtaataaaggtctttgcacatgtgaccacatacgtgttaggaggctgcatgctctggaagcctggactctaagctggagctcttggaagagctcttcggtttctgagcataatgctcccatctcctgatttctctgaacagaaaacaaaagagagaatgagggaaattgctattttatttgtattcatgaacttggctgtaatcagttatgccgtataggatgtcagacaataccactggttaaaataaagcctatttttcaaa

SEQ ID NO: 454137 - DNA, 1316 bp, Homo sapiens
tcttggaaccgcgaccactggagccttagcgggcgcagcagctggaacgggagtactgcgacgcagcccggagtcggccttgtaggggcgaaggtgcagggagatcgcggcgggcgcagtcttgagcgccggagcgcgtccctgcccttagcggggcttgccccagtcgcaggggcacatccagccgctgcggctgacagcagccgcgcgcgcgggagtctgcggggtcgcggcagccgcacctgcgcgggcgaccagcgcaaggtccccgcccggctgggcgggcagcaagggccggggagagggtgcgggtgcaggcgggggccccacagggccaccttcttgcccggcggctgccgctggaaaatgtctcaggagaggcccacgttctaccggcaggagctgaacaagacaatctgggaggtgcccgagcgttaccagaacctgtctccagtgggctctggcgcctatggctctgtgtgtgctgcttttgacacaaaaacggggttacgtgtggcagtgaagaagctctccagaccatttcagtccatcattcatgcgaaaagaacctacagagaactgcggttacttaaacatatgaaacatgaaaatgtgattggtctgttggacgtttttacacctgcaaggtctctggaggaattcaatgatgtgtatctggtgacccatctcatgggggcagatctgaacaacattgtgaaatgtcagaagcttacagatgaccatgttcagttccttatctaccaaattctccgaggtctaaagtatatacattcagctgacataattcacagggacctaaaacctagtaatctagctgtgaatgaagactgtgagctgaagattctggattttggactggctcggcacacagatgatgaaatgacaggctacgtggccactaggtggtacagggctcctgagatcatgctgaactggatgcattacaaccagacagttgatatttggtcagtgggatgcataatggccgagctgttgactggaagaacattgtttcctggtacagaccatattgatcagttgaagctcattttaagactcgttggaaccccaggggctgagcttttgaagaaaatctcctcagagtctgcaagaaactatattcagtctttgactcagatgccgaagatgaactttgcgaatgtatttattggtgccaatcccctgggtaagttgaccatatatcctcacctcatggatattgaattggttatgatataaattggggatttgaagaagagtttctccttttgaccaaataaagtaccattagttga

SEQ ID NO: 454138 - DNA, 3703 bp, Homo sapiens
tcttggaaccgcgaccactggagccttagcgggcgcagcagctggaacgggagtactgcgacgcagcccggagtcggccttgtaggggcgaaggtgcagggagatcgcggcgggcgcagtcttgagcgccggagcgcgtccctgcccttagcggggcttgccccagtcgcaggggcacatccagccgctgcggctgacagcagccgcgcgcgcgggagtctgcggggtcgcggcagccgcacctgcgcgggcgaccagcgcaaggtccccgcccggctgggcgggcagcaagggccggggagagggtgcgggtgcaggcgggggccccacagggccaccttcttgcccggcggctgccgctggaaaatgtctcaggagaggcccacgttctaccggcaggagctgaacaagacaatctgggaggtgcccgagcgttaccagaacctgtctccagtgggctctggcgcctatggctctgtgtgtgctgcttttgacacaaaaacggggttacgtgtggcagtgaagaagctctccagaccatttcagtccatcattcatgcgaaaagaacctacagagaactgcggttacttaaacatatgaaacatgaaaatgtgattggtctgttggacgtttttacacctgcaaggtctctggaggaattcaatgatgtgtatctggtgacccatctcatgggggcagatctgaacaacattgtgaaatgtcagaagcttacagatgaccatgttcagttccttatctaccaaattctccgaggtctaaagtatatacattcagctgacataattcacagggacctaaaacctagtaatctagctgtgaatgaagactgtgagctgaagattctggattttggactggctcggcacacagatgatgaaatgacaggctacgtggccactaggtggtacagggctcctgagatcatgctgaactggatgcattacaaccagacagttgatatttggtcagtgggatgcataatggccgagctgttgactggaagaacattgtttcctggtacagaccatattgatcagttgaagctcattttaagactcgttggaaccccaggggctgagcttttgaagaaaatctcctcagagtctgcaagaaactatattcagtctttgactcagatgccgaagatgaactttgcgaatgtatttattggtgccaatcccctggctgtcgacttgctggagaagatgcttgtattggactcagataagagaattacagcggcccaagcccttgcacatgcctactttgctcagtaccacgatcctgatgatgaaccagtggccgatccttatgatcagtcctttgaaagcagggacctccttatagatgagtggaaaagcctgacctatgatgaagtcatcagctttgtgccaccaccccttgaccaagaagagatggagtcctgagcacctggtttctgttctgttgatcccacttcactgtgaggggaaggccttttcacgggaactctccaaatattattcaagtgcctcttgttgcagagatttcctccatggtggaagggggtgtgcgtgcgtgtgcgtgcgtgttagtgtgtgtgcatgtgtgtgtctgtctttgtgggagggtaagacaatatgaacaaactatgatcacagtgactttacaggaggttgtggatgctccagggcagcctccaccttgctcttctttctgagagttggctcaggcagacaagagctgctgtccttttaggaatatgttcaatgcaaagtaaaaaaatatgaattgtccccaatcccggtcatgcttttgccactttggcttctcctgtgaccccaccttgacggtggggcgtagacttgacaacatcccacagtggcacggagagaaggcccataccttctggttgcttcagacctgacaccgtccctcagtgatacgtacagccaaaaaggaccaactggcttctgtgcactagcctgtgattaacttgcttagtatggttctcagatcttgacagtatatttgaaactgtaaatatgtttgtgccttaaaaggagagaagaaagtgtagatagttaaaagactgcagctgctgaagttctgagccgggcaagtcgagagggctgttggacagctgcttgtgggcccggagtaatcaggcagccttcataggcggtcatgtgtgcatgtgagcacatgcgtatatgtgcgtctctctttctccctcacccccaggtgttgccatttctctgcttacccttcacctttggtgcagaggtttcttgaatatctgccccagtagtcagaagcaggttcttgatgtcatgtacttcctgtgtactctttatttctagcagagtgaggatgtgttttgcacgtcttgctatttgagcatgcacagctgcttgtcctgctctcttcaggaggccctggtgtcaggcaggtttgccagtgaagacttcttgggtagtttagatcccatgtcacctcagctgatattatggcaagtgatatcacctctcttcagcccctagtgctattctgtgttgaacacaattgatacttcaggtgcttttgatgtgaaaatcatgaaaagaggaacaggtggatgtatagcatttttattcatgccatctgttttcaaccaactatttttgaggaattatcatgggaaaagaccagggcttttcccaggaatatcccaaacttcggaaacaagttattctcttcactcccaataactaatgctaagaaatgctgaaaatcaaagtaaaaaattaaagcccataaggccagaaactccttttgctgtctttctctaaatatgattactttaaaataaaaaagtaacaaggtgtcttttccactcctatggttttgtttcagaattttgtatattgtaggaatcctttgagaatgtgattccttttgatggggagaaagggcaaattattttaatattttgtattttcaactttataaagataaaatatcctcaggggtggagaagtgtcgttttcataacttgctgaatttcaggcattttgttctacatgaggactcatatatttaagccttttgtgtaataagaaagtataaagtcacttccagtgttggctgtgtgacagaatcttgtatttgggccaaggtgtttccatttctcaatcagtgcagtgatacatgtactccagagggacagggtggaccccctgagtcaactggagcaagaaggaaggaggcagactgatggcgattccctctcacccgggactctccccctttcaaggaaagtgaacctttaaagtaaaggcctcatctcctttattgcagttcaaatcctcaccatccacagcaagatgaattttatcagccatgtttggttgtaaatgctcgtgtgatttcctacagaaatactgctctgaatattttgtaataaaggtctttgcacatgtgaccacatacgtgttaggaggctgcatgctctggaagcctggactctaagctggagctcttggaagagctcttcggtttctgagcataatgctcccatctcctgatttctctgaacagaaaacaaaagagagaatgagggaaattgctattttatttgtattcatgaacttggctgtaatcagttatgccgtataggatgtcagacaataccactggttaaaataaagcctatttttcaaa

SEQ ID NO: 454139 - DNA, 4240 bp, Homo sapiens
tcttggaaccgcgaccactggagccttagcgggcgcagcagctggaacgggagtactgcgacgcagcccggagtcggccttgtaggggcgaaggtgcagggagatcgcggcgggcgcagtcttgagcgccggagcgcgtccctgcccttagcggggcttgccccagtcgcaggggcacatccagccgctgcggctgacagcagccgcgcgcgcgggagtctgcggggtcgcggcagccgcacctgcgcgggcgaccagcgcaaggtccccgcccggctgggcgggcagcaagggccggggagagggtgcgggtgcaggcgggggccccacagggccaccttcttgcccggcggctgccgctggaaaatgtctcaggagaggcccacgttctaccggcaggagctgaacaagacaatctgggaggtgcccgagcgttaccagaacctgtctccagtgggctctggcgcctatggctctgtgtgtgctgcttttgacacaaaaacggggttacgtgtggcagtgaagaagctctccagaccatttcagtccatcattcatgcgaaaagaacctacagagaactgcggttacttaaacatatgaaacatgaaaatgtgattggtctgttggacgtttttacacctgcaaggtctctggaggaattcaatgatgtgtatctggtgacccatctcatgggggcagatctgaacaacattgtgaaatgtcagaagcttacagatgaccatgttcagttccttatctaccaaattctccgaggtctaaagtatatacattcagctgacataattcacagggacctaaaacctagtaatctagctgtgaatgaagactgtgagctgaagattctggattttggactggctcggcacacagatgatgaaatgacaggctacgtggccactaggtggtacagggctcctgagatcatgctgaactggatgcattacaaccagacagttgatatttggtcagtgggatgcataatggccgagctgttgactggaagaacattgtttcctggtacagaccatattgatcagttgaagctcattttaagactcgttggaaccccaggggctgagcttttgaagaaaatctcctcagagtctgcaagaaactatattcagtctttgactcagatgccgaagatgaactttgcgaatgtatttattggtgccaatcccctggctgtcgacttgctggagaagatgcttgtattggactcagataagagaattacagcggcccaagcccttgcacatgcctactttgctcagtaccacgatcctgatgatgaaccagtggccgatccttatgatcagtcctttgaaagcagggacctccttatagatgagtggaaaagcctgacctatgatgaagtcatcagctttgtgccaccaccccttgaccaagaagagatggagtcctgagcacctggtttctgttctgttgatcccacttcactgtgaggggaaggccttttcacgggaactctccaaatattattcaagtgcctcttgttgcagagatttcctccatggtggaagggggtgtgcgtgcgtgtgcgtgcgtgttagtgtgtgtgcatgtgtgtgtctgtctttgtgggagggtaagacaatatgaacaaactatgatcacagtgactttacaggaggttgtggatgctccagggcagcctccaccttgctcttctttctgagagttggctcaggcagacaagagctgctgtccttttaggaatatgttcaatgcaaagtaaaaaaatatgaattgtccccaatcccggtcatgcttttgccactttggcttctcctgtgaccccaccttgacggtggggcgtagacttgacaacatcccacagtggcacggagagaaggcccataccttctggttgcttcagacctgacaccgtccctcagtgatacgtacagccaaaaaggaccaactggcttctgtgcactagcctgtgattaacttgcttagtatggttctcagatcttgacagtatatttgaaactgtaaatatgtttgtgccttaaaaggagagaagaaagtgtagatagttaaaagactgcagctgctgaagttctgagccgggcaagtcgagagggctgttggacagctgcttgtgggcccggagtaatcaggcagccttcataggcggtcatgtgtgcatgtgagcacatgcgtatatgtgcgtctctctttctccctcacccccaggtgttgccatttctctgcttacccttcacctttggtgcagaggtttcttgaatatctgccccagtagtcagaagcaggttcttgatgtcatgtacttcctgtgtactctttatttctagcagagtgaggatgtgttttgcacgtcttgctatttgagcatgcacagctgcttgtcctgctctcttcaggaggccctggtgtcaggcaggtttgccagtgaagacttcttgggtagtttagatcccatgtcacctcagctgatattatggcaagtgatatcacctctcttcagcccctagtgctattctgtgttgaacacaattgatacttcaggtgcttttgatgtgaaaatcatgaaaagaggaacaggtggatgtatagcatttttattcatgccatctgttttcaaccaactatttttgaggaattatcatgggaaaagaccagggcttttcccaggaatatcccaaacttcggaaacaagttattctcttcactcccaataactaatgctaagaaatgctgaaaatcaaagtaaaaaattaaagcccataaggccagaaactccttttgctgtctttctctaaatatgattactttaaaataaaaaagtaacaaggtgtcttttccactcctatggaaaagggtcttcttggcagcttaacattgacttcttggtttggggagaaataaattttgtttcagaattttgtatattgtaggaatcctttgagaatgtgattccttttgatggggagaaagggcaaattattttaatattttgtattttcaactttataaagataaaatatcctcaggggtggagaagtgtcgttttcataacttgctgaatttcaggcattttgttctacatgaggactcatatatttaagccttttgtgtaataagaaagtataaagtcacttccagtgttggctgtgtgacagaatcttgtatttgggccaaggtgtttccatttctcaatcagtgcagtgatacatgtactccagagggacagggtggaccccctgagtcaactggagcaagaaggaaggaggcagactgatggcgattccctctcacccgggactctccccctttcaaggaaagtgaacctttaaagtaaaggcctcatctcctttattgcagttcaaatcctcaccatccacagcaagatgaattttatcagccatgtttggttgtaaatgctcgtgtgatttcctacagaaatactgctctgaatattttgtaataaaggtctttgcacatgtgaccacatacgtgttaggaggctgcatgctctggaagcctggactctaagctggagctcttggaagagctcttcggtttctgagcataatgctcccatctcctgatttctctgaacagaaaacaaaagagagaatgagggaaattgctattttatttgtattcatgaacttggctgtaatcagttatgccgtataggatgtcagacaataccactggttaaaataaagcctatttttcaaatttagtgagtttctcaagtttattatatttttctcttgtttttatttaatgcacaatatggcattatatcaatatcctttaaactgtgacctggcatacttgtctgacagatcttaatactactcctaacatttagaaaatgttgataaagcttcttagttgtacattttttggtgaagagtatccaggtctttgctgtggatgggtaaagcaaagagcaaatgaacgaagtattaagcattggggcctgtcttatctacactcgagtgtaagagtggccgaaatgacagggctcagcagactgtggcctgaggccaaatctggcccaccacctgtttggtgtagcctgctaagaatggcttttacatttttaaatggttgggaaagaaaaaaaaaaaagaagtagtagattttgtagcatgtgatgtaagtaatgtaaaacttaaattccagtatccataaataaagttttatgagaacaga

SEQ ID NO: 454140 - DNA, 4223 bp, Homo sapiens
tcttggaaccgcgaccactggagccttagcgggcgcagcagctggaacgggagtactgcgacgcagcccggagtcggccttgtaggggcgaaggtgcagggagatcgcggcgggcgcagtcttgagcgccggagcgcgtccctgcccttagcggggcttgccccagtcgcaggggcacatccagccgctgcggctgacagcagccgcgcgcgcgggagtctgcggggtcgcggcagccgcacctgcgcgggcgaccagcgcaaggtccccgcccggctgggcgggcagcaagggccggggagagggtgcgggtgcaggcgggggccccacagggccaccttcttgcccggcggctgccgctggaaaatgtctcaggagaggcccacgttctaccggcaggagctgaacaagacaatctgggaggtgcccgagcgttaccagaacctgtctccagtgggctctggcgcctatggctctgtgtgtgctgcttttgacacaaaaacggggttacgtgtggcagtgaagaagctctccagaccatttcagtccatcattcatgcgaaaagaacctacagagaactgcggttacttaaacatatgaaacatgaaaatgtgattggtctgttggacgtttttacacctgcaaggtctctggaggaattcaatgatgtgtatctggtgacccatctcatgggggcagatctgaacaacattgtgaaatgtcagaagcttacagatgaccatgttcagttccttatctaccaaattctccgaggtctaaagtatatacattcagctgacataattcacagggacctaaaacctagtaatctagctgtgaatgaagactgtgagctgaagattctggattttggactggctcggcacacagatgatgaaatgacaggctacgtggccactaggtggtacagggctcctgagatcatgctgaactggatgcattacaaccagacagttgatatttggtcagtgggatgcataatggccgagctgttgactggaagaacattgtttcctggtacagaccatattgatcagttgaagctcattttaagactcgttggaaccccaggggctgagcttttgaagaaaatctcctcagagtctgcaagaaactatattcagtctttgactcagatgccgaagatgaactttgcgaatgtatttattggtgccaatcccctggctgtcgacttgctggagaagatgcttgtattggactcagataagagaattacagcggcccaagcccttgcacatgcctactttgctcagtaccacgatcctgatgatgaaccagtggccgatccttatgatcagtcctttgaaagcagggacctccttatagatgagtggaaaagcctgacctatgatgaagtcatcagctttgtgccaccaccccttgaccaagaagagatggagtcctgagcacctggtttctgttctgttgatcccacttcactgtgaggggaaggccttttcacgggaactctccaaatattattcaagtgcctcttgttgcagagatttcctccatggtggaagggggtgtgcgtgcgtgtgcgtgcgtgttagtgtgtgtgcatgtgtgtgtctgtctttgtgggagggtaagacaatatgaacaaactatgatcacagtgactttacaggaggttgtggatgctccagggcagcctccaccttgctcttctttctgagagttggctcaggcagacaagagctgctgtccttttaggaatatgttcaatgcaaagtaaaaaaatatgaattgtccccaatcccggtcatgcttttgccactttggcttctcctgtgaccccaccttgacggtggggcgtagacttgacaacatcccacagtggcacggagagaaggcccataccttctggttgcttcagacctgacaccgtccctcagtgatacgtacagccaaaaaggaccaactggcttctgtgcactagcctgtgattaacttgcttagtatggttctcagatcttgacagtatatttgaaactgtaaatatgtttgtgccttaaaaggagagaagaaagtgtagatagttaaaagactgcagctgctgaagttctgagccgggcaagtcgagagggctgttggacagctgcttgtgggcccggagtaatcaggcagccttcataggcggtcatgtgtgcatgtgagcacatgcgtatatgtgcgtctctctttctccctcacccccaggtgttgccatttctctgcttacccttcacctttggtgcagaggtttcttgaatatctgccccagtagtcagaagcaggttcttgatgtcatgtacttcctgtgtactctttatttctagcagagtgaggatgtgttttgcacgtcttgctatttgagcatgcacagctgcttgtcctgctctcttcaggaggccctggtgtcaggcaggtttgccagtgaagacttcttgggtagtttagatcccatgtcacctcagctgatattatggcaagtgatatcacctctcttcagcccctagtgctattctgtgttgaacacaattgatacttcaggtgcttttgatgtgaaaatcatgaaaagaggaacaggtggatgtatagcatttttattcatgccatctgttttcaaccaactatttttgaggaattatcatgggaaaagaccagggcttttcccaggaatatcccaaacttcggaaacaagttattctcttcactcccaataactaatgctaagaaatgctgaaaatcaaagtaaaaaattaaagcccataaggccagaaactccttttgctgtctttctctaaatatgattactttaaaataaaaaagtaacaaggtgtcttttccactcctatggaaaagggtcttcttggcagcttaacattgacttcttggtttggggagaaataaattttgtttcagaattttgtatattgtaggaatcctttgagaatgtgattccttttgatggggagaaagggcaaattattttaatattttgtattttcaactttataaagataaaatatcctcaggggtggagaagtgtcgttttcataacttgctgaatttcaggcattttgttctacatgaggactcatatatttaagccttttgtgtaataagaaagtataaagtcacttccagtgttggctgtgtgacagaatcttgtatttgggccaaggtgtttccatttctcaatcagtgcagtgatacatgtactccagagggacagggtggaccccctgagtcaactggagcaagaaggaaggaggcagactgatggcgattccctctcacccgggactctccccctttcaaggaaagtgaacctttaaagtaaaggcctcatctcctttattgcagttcaaatcctcaccatccacagcaagatgaattttatcagccatgtttggttgtaaatgctcgtgtgatttcctacagaaatactgctctgaatattttgtaataaaggtctttgcacatgtgaccacatacgtgttaggaggctgcatgctctggaagcctggactctaaagctcttcggtttctgagcataatgctcccatctcctgatttctctgaacagaaaacaaaagagagaatgagggaaattgctattttatttgtattcatgaacttggctgtaatcagttatgccgtataggatgtcagacaataccactggttaaaataaagcctatttttcaaatttagtgagtttctcaagtttattatatttttctcttgtttttatttaatgcacaatatggcattatatcaatatcctttaaactgtgacctggcatacttgtctgacagatcttaatactactcctaacatttagaaaatgttgataaagcttcttagttgtacattttttggtgaagagtatccaggtctttgctgtggatgggtaaagcaaagagcaaatgaacgaagtattaagcattggggcctgtcttatctacactcgagtgtaagagtggccgaaatgacagggctcagcagactgtggcctgaggccaaatctggcccaccacctgtttggtgtagcctgctaagaatggcttttacatttttaaatggttgggaaagaaaaaaaaaaaagaagtagtagattttgtagcatgtgatgtaagtaatgtaaaacttaaattccagtatccataaataaagttttatgagaacaga

SEQ ID NO: 454141 - DNA, 3597 bp, Homo sapiens
tcttggaaccgcgaccactggagccttagcgggcgcagcagctggaacgggagtactgcgacgcagcccggagtcggccttgtaggggcgaaggtgcagggagatcgcggcgggcgcagtcttgagcgccggagcgcgtccctgcccttagcggggcttgccccagtcgcaggggcacatccagccgctgcggctgacagcagccgcgcgcgcgggagtctgcggggtcgcggcagccgcacctgcgcgggcgaccagcgcaaggtccccgcccggctgggcgggcagcaagggccggggagagggtgcgggtgcaggcgggggccccacagggccaccttcttgcccggcggctgccgctggaaaatgtctcaggagaggcccacgttctaccggcaggagctgaacaagacaatctgggaggtgcccgagcgttaccagaacctgtctccagtgggctctggcgcctatggctctgtgtgtgctgcttttgacacaaaaacggggttacgtgtggcagtgaagaagctctccagaccatttcagtccatcattcatgcgaaaagaacctacagagaactgcggttacttaaacatatgaaacatgaaaatgtgattggtctgttggacgtttttacacctgcaaggtctctggaggaattcaatgatgtgtatctggtgacccatctcatgggggcagatctgaacaacattgtgaaatgtcagaagcttacagatgaccatgttcagttccttatctaccaaattctccgaggtctaaagtatatacattcagctgacataattcacagggacctaaaacctagtaatctagctgtgaatgaagactgtgagctgaagattctggattttggactggctcggcacacagatgatgaaatgacaggctacgtggccactaggtggtacagggctcctgagatcatgctgaactggatgcattacaaccagacagttgatatttggtcagtgggatgcataatggccgagctgttgactggaagaacattgtttcctggtacagaccatattgatcagttgaagctcattttaagactcgttggaaccccaggggctgagcttttgaagaaaatctcctcagagtctgcaagaaactatattcagtctttgactcagatgccgaagatgaactttgcgaatgtatttattggtgccaatcccctggctgtcgacttgctggagaagatgcttgtattggactcagataagagaattacagcggcccaagcccttgcacatgcctactttgctcagtaccacgatcctgatgatgaaccagtggccgatccttatgatcagtcctttgaaagcagggacctccttatagatgagtggaaaagcctgacctatgatgaagtcatcagctttgtgccaccaccccttgaccaagaagagatggagtcctgagcacctggtttctgttctgttgatcccacttcactgtgaggggaaggccttttcacgggaactctccaaatattattcaagtgcctcttgttgcagagatttcctccatggtggaagggggtgtgcgtgcgtgtgcgtgcgtgttagtgtgtgtgcatgtgtgtgtctgtctttgtgggagggtaagacaatatgaacaaactatgatcacagtgactttacaggaggttgtggatgctccagggcagcctccaccttgctcttctttctgagagttggctcaggcagacaagagctgctgtccttttaggaatatgttcaatgcaaagtaaaaaaatatgaattgtccccaatcccggtcatgcttttgccactttggcttctcctgtgaccccaccttgacggtggggcgtagacttgacaacatcccacagtggcacggagagaaggcccataccttctggttgcttcagacctgacaccgtccctcagtgatacgtacagccaaaaaggaccaactggcttctgtgcactagcctgtgattaacttgcttagtatggttctcagatcttgacagtatatttgaaactgtaaatatgtttgtgccttaaaaggagagaagaaagtgtagatagttaaaagactgcagctgctgaagttctgagccgggcaagtcgagagggctgttggacagctgcttgtgggcccggagtaatcaggcagccttcataggcggtcatgtgtgcatgtgagcacatgcgtatatgtgcgtctctctttctccctcacccccaggtgttgccatttctctgcttacccttcacctttggtgcagaggtttcttgaatatctgccccagtagtcagaagcaggttcttgatgtcatgtacttcctgtgtactctttatttctagcagagtgaggatgtgttttgcacgtcttgctatttgagcatgcacagctgcttgtcctgctctcttcaggaggccctggtgtcaggcaggtttgccagtgaagacttcttgggtagtttagatcccatgtcacctcagctgatattatggcaagtgatatcacctctcttcagcccctagtgctattctgtgttgaacacaattgatacttcaggtgcttttgatgtgaaaatcatgaaaagaggaacaggtggatgtatagcatttttattcatgccatctgttttcaaccaactatttttgaggaattatcatgggaaaagaccagggcttttcccaggaatatcccaaacttcggaaacaagttattctcttcactcccaataactaatgctaagaaatgctgaaaatcaaagtaaaaaattaaagcccataaggccagaaactccttttgctgtctttctctaaatatgattactttaaaataaaaaagtaacaaggtgtcttttccactcctatggaaaagggtcttcttggcagcttaacattgacttcttggtttggggagaaataaattttgtttcagaattttgtatattgtaggaatcctttgagaatgtgattccttttgatggggagaaagggcaaattattttaatattttgtattttcaactttataaagataaaatatcctcaggggtggagaagtgtcgttttcataacttgctgaatttcaggcattttgttctacatgaggactcatatatttaagccttttgtgtaataagaaagtataaagtcacttccagtgttggctgtgtgacagaatcttgtatttgggccaaggtgtttccatttctcaatcagtgcagtgatacatgtactccagagggacagggtggaccccctgagtcaactggagcaagaaggaaggaggcagactgatggcgattccctctcacccgggactctccccctttcaaggaaagtgaacctttaaagtaaaggcctcatctcctttattgcagttcaaatcctcaccatccacagcaagatgaattttatcagccatgtttggttgtaaatgctcgtgtgatttcctacagaaatactgctctgaatattttgtaataaaggtctttgcacatgtgaccacatacgtgttaggagtaggaggattcaggaggaggagaattcgccagagcaggagattcgcccgggtcctctagat

SEQ ID NO: 454142 - DNA, 1974 bp, Homo sapiens
tcttggaaccgcgaccactggagccttagcgggcgcagcagctggaacgggagtactgcgacgcagcccggagtcggccttgtaggggcgaaggtgcagggagatcgcggcgggcgcagtcttgagcgccggagcgcgtccctgcccttagcggggcttgccccagtcgcaggggcacatccagccgctgcggctgacagcagccgcgcgcgcgggagtctgcggggtcgcggcagccgcacctgcgcgggcgaccagcgcaaggtccccgcccggctgggcgggcagcaagggccggggagagggtgcgggtgcaggcgggggccccacagggccaccttcttgcccggcggctgccgctggaaaatgtctcaggagaggcccacgttctaccggcaggagctgaacaagacaatctgggaggtgcccgagcgttaccagaacctgtctccagtgggctctggcgcctatggctctgtgtgtgctgcttttgacacaaaaacggggttacgtgtggcagtgaagaagctctccagaccatttcagtccatcattcatgcgaaaagaacctacagagaactgcggttacttaaacatatgaaacatgaaaatgtgattggtctgttggacgtttttacacctgcaaggtctctggaggaattcaatgatgtgtatctggtgacccatctcatgggggcagatctgaacaacattgtgaaatgtcagaagcttacagatgaccatgttcagttccttatctaccaaattctccgaggtctaaagtatatacattcagctgacataattcacagggacctaaaacctagtaatctagctgtgaatgaagactgtgagctgaagattctggattttggactggctcggcacacagatgatgaaatgacaggctacgtggccactaggtggtacagggctcctgagatcatgctgaactggatgcattacaaccagacagttgatatttggtcagtgggatgcataatggccgagctgttgactggaagaacattgtttcctggtacagaccatattgatcagttgaagctcattttaagactcgttggaaccccaggggctgagcttttgaagaaaatctcctcagagtctgcaagaaactatattcagtctttgactcagatgccgaagatgaactttgcgaatgtatttattggtgccaatcccctggctgtcgacttgctggagaagatgcttgtattggactcagataagagaattacagcggcccaagcccttgcacatgcctactttgctcagtaccacgatcctgatgatgaaccagtggccgatccttatgatcagtcctttgaaagcagggacctccttatagatgagtggaaaagcctgacctatgatgaagtcatcagctttgtgccaccaccccttgaccaagaagagatggagtcctgagcacctggtttctgttctgttgatcccacttcactgtgaggggaaggccttttcacgggaactctccaaatattattcaagtgcctcttgttgcagagatttcctccatggtggaagggggtgtgcgtgcgtgtgcgtgcgtgttagtgtgtgtgcatgtgtgtgtctgtctttgtgggagggtaagacaatatgaacaaactatgatcacagtgactttacaggaggttgtggatgctccagggcagcctccaccttgctcttctttctgagagttggctcaggcagacaagagctgctgtccttttaggaatatgttcaatgcaaagtaaaaaaatatgaattgtcccgcaaaaaaaaaaagaattcacaaagaacaccgcaaacaaaaaacgccgggggccaatatgggggggcgggaaacacgggtttagcagggggcggggcacagggttttccggcccccctttggtgcaagggggggaagggggggcccaaagggggggaaaatcgaaccggacccgt

SEQ ID NO: 454143 - DNA, 498 bp, Homo sapiens
tagcttgtgagagtgctctttcattcttgagcacctccgtagagagcttaaaagaagaggcactcagcgatgaaaaacatgagaaaaaaaatggttcttttctatgtcccttgaacttctgtgtgataacgtgttccagtaggctattacatacaagctgtgaggtagcccatcaaaccactacctggacagagaggaaggatcttgagcttagaagtcagagtgcttgccagcaaagagaatagcctaaactctcacatcttacttttccttcccaatttctaggcctgacctatgatgaagtcatcagctttgtgccaccaccccttgaccaagaagagatggagtcctgagcacctggtttctgttctgttgatcccacttcactgtgaggggaaggccttttcacgggaactctccaaatattattcaagtgcctcttgttgcagagatttcctccatggtggaagggggtgtgcgtgcgtgtgcgtgcgtgtt

SEQ ID NO: 454144 - DNA, 3757 bp, Homo sapiens
tcttggaaccgcgaccactggagccttagcgggcgcagcagctggaacgggagtactgcgacgcagcccggagtcggccttgtaggggcgaaggtgcagggagatcgcggcgggcgcagtcttgagcgccggagcgcgtccctgcccttagcggggcttgccccagtcgcaggggcacatccagccgctgcggctgacagcagccgcgcgcgcgggagtctgcggggtcgcggcagccgcacctgcgcgggcgaccagcgcaaggtccccgcccggctgggcgggcagcaagggccggggagagggtgcgggtgcaggcgggggccccacagggccaccttcttgcccggcggctgccgctggaaaatgtctcaggagaggcccacgttctaccggcaggagctgaacaagacaatctgggaggtgcccgagcgttaccagaacctgtctccagtgggctctggcgcctatggctctgtgtgtgctgcttttgacacaaaaacggggttacgtgtggcagtgaagaagctctccagaccatttcagtccatcattcatgcgaaaagaacctacagagaactgcggttacttaaacatatgaaacatgaaaatgtgattggtctgttggacgtttttacacctgcaaggtctctggaggaattcaatgatgtgtatctggtgacccatctcatgggggcagatctgaacaacattgtgaaatgtcagaagcttacagatgaccatgttcagttccttatctaccaaattctccgaggtctaaagtatatacattcagctgacataattcacagggacctaaaacctagtaatctagctgtgaatgaagactgtgagctgaagattctggattttggactggctcggcacacagatgatgaaatgacaggctacgtggccactaggtggtacagggctcctgagatcatgctgaactggatgcattacaaccagacagttgatatttggtcagtgggatgcataatggccgagctgttgactggaagaacattgtttcctggtacagaccatattgatcagttgaagctcattttaagactcgttggaaccccaggggctgagcttttgaagaaaatctcctcagagtctgcaagaaactatattcagtctttgactcagatgccgaagatgaactttgcgaatgtatttattggtgccaatcccctggctgtcgacttgctggagaagatgcttgtattggactcagataagagaattacagcggcccaagcccttgcacatgcctactttgctcagtaccacgatcctgatgatgaaccagtggccgatccttatgatcagtcctttgaaagcagggacctccttatagatgagtggaaaagcctgacctatgatgaagtcatcagctttgtgccaccaccccttgaccaagaagagatggagtcctgagcacctggtttctgttctgttgatcccacttcactgtgaggggaaggccttttcacgggaactctccaaatattattcaagtgcctcttgttgcagagatttcctccatggtggaagggggtgtgcgtgcgtgtgcgtgcgtgttagtgtgtgtgcatgtgtgtgtctgtctttgtgggagggtaagacaatatgaacaaactatgatcacagtgactttacaggaggttgtggatgctccagggcagcctccaccttgctcttctttctgagagttggctcaggcagacaagagctgctgtccttttaggaatatgttcaatgcaaagtaaaaaaatatgaattgtccccaatcccggtcatgcttttgccactttggcttctcctgtgaccccaccttgacggtggggcgtagacttgacaacatcccacagtggcacggagagaaggcccataccttctggttgcttcagacctgacaccgtccctcagtgatacgtacagccaaaaaggaccaactggcttctgtgcactagcctgtgattaacttgcttagtatggttctcagatcttgacagtatatttgaaactgtaaatatgtttgtgccttaaaaggagagaagaaagtgtagatagttaaaagactgcagctgctgaagttctgagccgggcaagtcgagagggctgttggacagctgcttgtgggcccggagtaatcaggcagccttcataggcggtcatgtgtgcatgtgagcacatgcgtatatgtgcgtctctctttctccctcacccccaggtgttgccatttctctgcttacccttcacctttggtgcagaggtttcttgaatatctgccccagtagtcagaagcaggttcttgatgtcatgtacttcctgtgtactctttatttctagcagagtgaggatgtgttttgcacgtcttgctatttgagcatgcacagctgcttgtcctgctctcttcaggaggccctggtgtcaggcaggtttgccagtgaagacttcttgggtagtttagatcccatgtcacctcagctgatattatggcaagtgatatcacctctcttcagcccctagtgctattctgtgttgaacacaattgatacttcaggtgcttttgatgtgaaaatcatgaaaagaggaacaggtggatgtatagcatttttattcatgccatctgttttcaaccaactatttttgaggaattatcatgggaaaagaccagggcttttcccaggaatatcccaaacttcggaaacaagttattctcttcactcccaataactaatgctaagaaatgctgaaaatcaaagtaaaaaattaaagcccataaggccagaaactccttttgctgtctttctctaaatatgattactttaaaataaaaaagtaacaaggtgtcttttccactcctatggaaaagggtcttcttggcagcttaacattgacttcttggtttggggagaaataaattttgtttcagaattttgtatattgtaggaatcctttgagaatgtgattccttttgatggggagaaagggcaaattattttaatattttgtattttcaactttataaagataaaatatcctcaggggtggagaagtgtcgttttcataacttgctgaatttcaggcattttgttctacatgaggactcatatatttaagccttttgtgtaataagaaagtataaagtcacttccagtgttggctgtgtgacagaatcttgtatttgggccaaggtgtttccatttctcaatcagtgcagtgatacatgtactccagagggacagggtggaccccctgagtcaactggagcaagaaggaaggaggcagactgatggcgattccctctcacccgggactctccccctttcaaggaaagtgaacctttaaagtaaaggcctcatctcctttattgcagttcaaatcctcaccatccacagcaagatgaattttatcagccatgtttggttgtaaatgctcgtgtgatttcctacagaaatactgctctgaatattttgtaataaaggtctttgcacatgtgaccacatacgtgttaggaggctgcatgctctggaagcctggactctaagctggagctcttggaagagctcttcggtttctgagcataatgctcccatctcctgatttctctgaacagaaaacaaaagagagaatgagggaaattgctattttatttgtattcatgaacttggctgtaatcagttatgccgtataggatgtcagacaataccactggttaaaataaagcctatttttcaaa

SEQ ID NO: 454145 - DNA, 3685 bp, Homo sapiens
ggaattccgggcccggtctttcctcccgccgccgccggcctggtcccggggactggcctccacgtccgactcgtccgagctgaagcccagcagcactttgctgccagccgcgggggcggcggaggcgcccccgggccctcccaggaggctctctgggccagaggccgagattcggcacaggcccccaggagtccgtaagtaggagaggtcgcccgagaccggccggacccccatccccgcggccgccgccgccgctggtcccgcggctgcgaccgtggcggctgccgctggaaaatgtctcaggagaggcccacgttctaccggcaggagctgaacaagacaatctgggaggtgcccgagcgttaccagaacctgtctccagtgggctctggcgcctatggctctgtgtgtgctgcttttgacacaaaaacggggttacgtgtggcagtgaagaagctctccagaccatttcagtccatcattcatgcgaaaagaacctacagagaactgcggttacttaaacatatgaaacatgaaaatgtgattggtctgttggacgtttttacacctgcaaggtctctggaggaattcaatgatgtgtatctggtgacccatctcatgggggcagatctgaacaacattgtgaaatgtcagaagcttacagatgaccatgttcagttccttatctaccaaattctccgaggtctaaagtatatacattcagctgacataattcacagggacctaaaacctagtaatctagctgtgaatgaagactgtgagctgaagattctggattttggactggctcggcacacagatgatgaaatgacaggctacgtggccactaggtggtacagggctcctgagatcatgctgaactggatgcattacaaccagacagttgatatttggtcagtgggatgcataatggccgagctgttgactggaagaacattgtttcctggtacagaccatattgatcagttgaagctcattttaagactcgttggaaccccaggggctgagcttttgaagaaaatctcctcagagtctgcaagaaactatattcagtctttgactcagatgccgaagatgaactttgcgaatgtatttattggtgccaatcccctggctgtcgacttgctggagaagatgcttgtattggactcagataagagaattacagcggcccaagcccttgcacatgcctactttgctcagtaccacgatcctgatgatgaaccagtggccgatccttatgatcagtcctttgaaagcagggacctccttatagatgagtggaaaagcctgacctatgatgaagtcatcagctttgtgccaccaccccttgaccaagaagagatggagtcctgagcacctggtttctgttctgttgatcccacttcactgtgaggggaaggccttttcacgggaactctccaaatattattcaagtgcctcttgttgcagagatttcctccatggtggaagggggtgtgcgtgcgtgtgcgtgcgtgttagtgtgtgtgcatgtgtgtgtctgtctttgtgggagggtaagacaatatgaacaaactatgatcacagtgactttacaggaggttgtggatgctccagggcagcctccaccttgctcttctttctgagagttggctcaggcagacaagagctgctgtccttttaggaatatgttcaatgcaaagtaaaaaaatatgaattgtccccaatcccggtcatgcttttgccactttggcttctcctgtgaccccaccttgacggtggggcgtagacttgacaacatcccacagtggcacggagagaaggcccataccttctggttgcttcagacctgacaccgtccctcagtgatacgtacagccaaaaaggaccaactggcttctgtgcactagcctgtgattaacttgcttagtatggttctcagatcttgacagtatatttgaaactgtaaatatgtttgtgccttaaaaggagagaagaaagtgtagatagttaaaagactgcagctgctgaagttctgagccgggcaagtcgagagggctgttggacagctgcttgtgggcccggagtaatcaggcagccttcataggcggtcatgtgtgcatgtgagcacatgcgtatatgtgcgtctctctttctccctcacccccaggtgttgccatttctctgcttacccttcacctttggtgcagaggtttcttgaatatctgccccagtagtcagaagcaggttcttgatgtcatgtacttcctgtgtactctttatttctagcagagtgaggatgtgttttgcacgtcttgctatttgagcatgcacagctgcttgtcctgctctcttcaggaggccctggtgtcaggcaggtttgccagtgaagacttcttgggtagtttagatcccatgtcacctcagctgatattatggcaagtgatatcacctctcttcagcccctagtgctattctgtgttgaacacaattgatacttcaggtgcttttgatgtgaaaatcatgaaaagaggaacaggtggatgtatagcatttttattcatgccatctgttttcaaccaactatttttgaggaattatcatgggaaaagaccagggcttttcccaggaatatcccaaacttcggaaacaagttattctcttcactcccaataactaatgctaagaaatgctgaaaatcaaagtaaaaaattaaagcccataaggccagaaactccttttgctgtctttctctaaatatgattactttaaaataaaaaagtaacaaggtgtcttttccactcctatggaaaagggtcttcttggcagcttaacattgacttcttggtttggggagaaataaattttgtttcagaattttgtatattgtaggaatcctttgagaatgtgattccttttgatggggagaaagggcaaattattttaatattttgtattttcaactttataaagataaaatatcctcaggggtggagaagtgtcgttttcataacttgctgaatttcaggcattttgttctacatgaggactcatatatttaagccttttgtgtaataagaaagtataaagtcacttccagtgttggctgtgtgacagaatcttgtatttgggccaaggtgtttccatttctcaatcagtgcagtgatacatgtactccagagggacagggtggaccccctgagtcaactggagcaagaaggaaggaggcagactgatggcgattccctctcacccgggactctccccctttcaaggaaagtgaacctttaaagtaaaggcctcatctcctttattgcagttcaaatcctcaccatccacagcaagatgaattttatcagccatgtttggttgtaaatgctcgtgtgatttcctacagaaatactgctctgaatattttgtaataaaggtctttgcacatgtgaccacatacgtgttaggaggctgcatgctctggaagcctggactctaagctggagctcttggaagagctcttcggtttctgagcataatgctcccatctcctgatttctctgaacagaaaacaaaagagagaatgagggaaattgctattttatttgtattcatgaacttggctgtaatcagttatgccgtataggatgtcagacaataccactggttaaaataaagcctatttttcaaa

SEQ ID NO: 454146 - DNA, 4302 bp, Homo sapiens
tcttggaaccgcgaccactggagccttagcgggcgcagcagctggaacgggagtactgcgacgcagcccggagtcggccttgtaggggcgaaggtgcagggagatcgcggcgggcgcagtcttgagcgccggagcgcgtccctgcccttagcggggcttgccccagtcgcaggggcacatccagccgctgcggctgacagcagccgcgcgcgcgggagtctgcggggtcgcggcagccgcacctgcgcgggcgaccagcgcaaggtccccgcccggctgggcgggcagcaagggccggggagagggtgcgggtgcaggcgggggccccacagggccaccttcttgcccggcggctgccgctggaaaatgtctcaggagaggcccacgttctaccggcaggagctgaacaagacaatctgggaggtgcccgagcgttaccagaacctgtctccagtgggctctggcgcctatggctctgtgtgtgctgcttttgacacaaaaacggggttacgtgtggcagtgaagaagctctccagaccatttcagtccatcattcatgcgaaaagaacctacagagaactgcggttacttaaacatatgaaacatgaaaatgtgattggtctgttggacgtttttacacctgcaaggtctctggaggaattcaatgatgtgtatctggtgacccatctcatgggggcagatctgaacaacattgtgaaatgtcagaagcttacagatgaccatgttcagttccttatctaccaaattctccgaggtctaaagtatatacattcagctgacataattcacagggacctaaaacctagtaatctagctgtgaatgaagactgtgagctgaagattctggattttggactggctcggcacacagatgatgaaatgacaggctacgtggccactaggtggtacagggctcctgagatcatgctgaactggatgcattacaaccagacagttgatatttggtcagtgggatgcataatggccgagctgttgactggaagaacattgtttcctggtacagaccatattgatcagttgaagctcattttaagactcgttggaaccccaggggctgagcttttgaagaaaatctcctcagagtctgcaagaaactatattcagtctttgactcagatgccgaagatgaactttgcgaatgtatttattggtgccaatcccctggctgtcgacttgctggagaagatgcttgtattggactcagataagagaattacagcggcccaagcccttgcacatgcctactttgctcagtaccacgatcctgatgatgaaccagtggccgatccttatgatcagtcctttgaaagcagggacctccttatagatgagtggaaaagcctgacctatgatgaagtcatcagctttgtgccaccaccccttgaccaagaagagatggagtcctgagcacctggtttctgttctgttgatcccacttcactgtgaggggaaggccttttcacgggaactctccaaatattattcaagtgcctcttgttgcagagatttcctccatggtggaagggggtgtgcgtgcgtgtgcgtgcgtgttagtgtgtgtgcatgtgtgtgtctgtctttgtgggagggtaagacaatatgaacaaactatgatcacagtgactttacaggaggttgtggatgctccagggcagcctccaccttgctcttctttctgagagttggctcaggcagacaagagctgctgtccttttaggaatatgttcaatgcaaagtaaaaaaatatgaattgtccccaatcccggtcatgcttttgccactttggcttctcctgtgaccccaccttgacggtggggcgtagacttgacaacatcccacagtggcacggagagaaggcccataccttctggttgcttcagacctgacaccgtccctcagtgatacgtacagccaaaaaggaccaactggcttctgtgcactagcctgtgattaacttgcttagtatggttctcagatcttgacagtatatttgaaactgtaaatatgtttgtgccttaaaaggagagaagaaagtgtagatagttaaaagactgcagctgctgaagttctgagccgggcaagtcgagagggctgttggacagctgcttgtgggcccggagtaatcaggcagccttcataggcggtcatgtgtgcatgtgagcacatgcgtatatgtgcgtctctctttctccctcacccccaggtgttgccatttctctgcttacccttcacctttggtgcagaggtttcttgaatatctgccccagtagtcagaagcaggttcttgatgtcatgtacttcctgtgtactctttatttctagcagagtgaggatgtgttttgcacgtcttgctatttgagcatgcacagctgcttgtcctgctctcttcaggaggccctggtgtcaggcaggtttgccagtgaagacttcttgggtagtttagatcccatgtcacctcagctgatattatggcaagtgatatcacctctcttcagcccctagtgctattctgtgttgaacacaattgatacttcaggtgcttttgatgtgaaaatcatgaaaagaggaacaggtggatgtatagcatttttattcatgccatctgttttcaaccaactatttttgaggaattatcatgggaaaagaccagggcttttcccaggaatatcccaaacttcggaaacaagttattctcttcactcccaataactaatgctaagaaatgctgaaaatcaaagtaaaaaattaaagcccataaggccagaaactccttttgctgtctttctctaaatatgattactttaaaataaaaaagtaacaaggtgtcttttccactcctatggaaaagggtcttcttggcagcttaacattgacttcttggtttggggagaaataaattttgtttcagaattttgtatattgtaggaatcctttgagaatgtgattccttttgatggggagaaagggcaaattattttaatattttgtattttcaactttataaagataaaatatcctcaggggtggagaagtgtcgttttcataacttgctgaatttcaggcattttgttctacatgaggactcatatatttaagccttttgtgtaataagaaagtataaagtcacttccagtgttggctgtgtgacagaatcttgtatttgggccaaggtgtttccatttctcaatcagtgcagtgatacatgtactccagagggacagggtggaccccctgagtcaactggagcaagaaggaaggaggcagactgatggcgattccctctcacccgggactctccccctttcaaggaaagtgaacctttaaagtaaaggcctcatctcctttattgcagttcaaatcctcaccatccacagcaagatgaattttatcagccatgtttggttgtaaatgctcgtgtgatttcctacagaaatactgctctgaatattttgtaataaaggtctttgcacatgtgaccacatacgtgttaggaggctgcatgctctggaagcctggactctaagctggagctcttggaagagctcttcggtttctgagcataatgctcccatctcctgatttctctgaacagaaaacaaaagagagaatgagggaaattgctattttatttgtattcatgaacttggctgtaatcagttatgccgtataggatgtcagacaataccactggttaaaataaagcctatttttcaaaaaaaaaaaaaaaaaaaaaaaaaaaaaaaaaaaaaaaaaaaaaaaaaaaaaaaaaaaaaaaaaaaaaaaaaaaaaaaaaaaaaaaaaaaaaaaaaaaaaaaaaaaaaaaaaaaaaaaggaaagagagggggggggcgggaaaccggggggggcaaaaacagaagcacaccaacaacaggatattaagagagaagaagagaggcgccacacaaagagaagaagtgaaaaaaaaaaaagggagaggcgagggagataaataaaaagacgatagaggagaggaaaaaacaatcgagagaggagcaaaagtgaaaagagagacgaaaaaaccccaacccgcgacgagggcggcaccaacagacgcgaagcgcccaagcacacgaacgaagacataaaaataaggacccacgggagggagagacacacaaacacaagaggaacaattatgcaactagagggcgaaacacaaccacaacggaataggcgagagcacgaaggaaaaacacgccgcagaggagaggaacacagacacaaaaaatacccaggagg

SEQ ID NO: 454147 - DNA, 3492 bp, Homo sapiens
tcttggaaccgcgaccactggagccttagcgggcgcagcagctggaacgggagtactgcgacgcagcccggagtcggccttgtaggggcgaaggtgcagggagatcgcggcgggcgcagtcttgagcgccggagcgcgtccctgcccttagcggggcttgccccagtcgcaggggcacatccagccgctgcggctgacagcagccgcgcgcgcgggagtctgcggggtcgcggcagccgcacctgcgcgggcgaccagcgcaaggtccccgcccggctgggcgggcagcaagggccggggagagggtgcgggtgcaggcgggggccccacagggccaccttcttgcccggcggctgccgctggaaaatgtctcaggagaggcccacgttctaccggcaggagctgaacaagacaatctgggaggtgcccgagcgttaccagaacctgtctccagtgggctctggcgcctatggctctgtgtgtgctgcttttgacacaaaaacggggttacgtgtggcagtgaagaagctctccagaccatttcagtccatcattcatgcgaaaagaacctacagagaactgcggttacttaaacatatgaaacatgaaaatgtgattggtctgttggacgtttttacacctgcaaggtctctggaggaattcaatgatgtgtatctggtgacccatctcatgggggcagatctgaacaacattgtgaaatgtcagaagcttacagatgaccatgttcagttccttatctaccaaattctccgaggtctaaagtatatacattcagctgacataattcacagggacctaaaacctagtaatctagctgtgaatgaagactgtgagctgaagattctggattttggactggctcggcacacagatgatgaaatgacaggctacgtggccactaggtggtacagggctcctgagatcatgctgaactggatgcattacaaccagacagttgatatttggtcagtgggatgcataatggccgagctgttgactggaagaacattgtttcctggtacagaccatattgatcagttgaagctcattttaagactcgttggaaccccaggggctgagcttttgaagaaaatctcctcagagtctgcaagaaactatattcagtctttgactcagatgccgaagatgaactttgcgaatgtatttattggtgccaatcccctggctgtcgacttgctggagaagatgcttgtattggactcagataagagaattacagcggcccaagcccttgcacatgcctactttgctcagtaccacgatcctgatgatgaaccagtggccgatccttatgatcagtcctttgaaagcagggacctccttatagatgagtggaaaagcctgacctatgatgaagtcatcagctttgtgccaccaccccttgaccaagaagagatggagtcctgagcacctggtttctgttctgttgatcccacttcactgtgaggggaaggccttttcacgggaactctccaaatattattcaagtgcctcttgttgcagagatttcctccatggtggaagggggtgtgcgtgcgtgtgcgtgcgtgttagtgtgtgtgcatgtgtgtgtctgtctttgtgggagggtaagacaatatgaacaaactatgatcacagtgactttacaggaggttgtggatgctccagggcagcctccaccttgctcttctttctgagagttggctcaggcagacaagagctgctgtccttttaggaatatgttcaatgcaaagtaaaaaaatatgaattgtccccaatcccggtcatgcttttgccactttggcttctcctgtgaccccaccttgacggtggggcgtagacttgacaacatcccacagtggcacggagagaaggcccataccttctggttgcttcagacctgacaccgtccctcagtgatacgtacagccaaaaaggaccaactggcttctgtgcactagcctgtgattaacttgcttagtatggttctcagatcttgacagtatatttgaaactgtaaatatgtttgtgccttaaaaggagagaagaaagtgtagatagttaaaagactgcagctgctgaagttctgagccgggcaagtcgagagggctgttggacagctgcttgtgggcccggagtaatcaggcagccttcataggcggtcatgtgtgcatgtgagcacatgcgtatatgtgcgtctctctttctccctcacccccaggtgttgccatttctctgcttacccttcacctttggtgcagaggtttcttgaatatctgccccagtagtcagaagcaggttcttgatgtcatgtacttcctgtgtactctttatttctagcagagtgaggatgtgttttgcacgtcttgctatttgagcatgcacagctgcttgtcctgctctcttcaggaggccctggtgtcaggcaggtttgccagtgaagacttcttgggtagtttagatcccatgtcacctcagctgatattatggcaagtgatatcacctctcttcagcccctagtgctattctgtgttgaacacaattgatacttcaggtgcttttgatgtgaaaatcatgaaaagaggaacaggtggatgtatagcatttttattcatgccatctgttttcaaccaactatttttgaggaattatcatgggaaaagaccagggcttttcccaggaatatcccaaacttcggaaacaagttattctcttcactcccaataactaatgctaagaaatgctgaaaatcaaagtaaaaaattaaagcccataaggccagaaactccttttgctgtctttctctaaatatgattactttaaaataaaaaagtaacaaggtgtcttttccactcctatggaaaagggtcttcttggcagcttaacattgacttcttggtttggggagaaataaattttgtttcagaattttgtatattgtaggaatcctttgagaatgtgattccttttgatggggagaaagggcaaattattttaatattttgtattttcaactttataaagataaaatatcctcaggggtggagaagtgtcgttttcataacttgctgaatttcaggcattttgttctacatgaggactcatatatttaagccttttgtgtaataagaaagtataaagtcacttccagtgttggctgtgtgacagaatcttgtatttgggccaaggtgtttccatttctcaatcagtgcagtgatacatgtactccagagggacagggtggaccccctgagtcaactggagcaagaaggaaggaggcagactgatggcgattccctctcacccgggactctccccctttcaaggaaagtgaacctttaaagtaaaggcctcatctcctttattgcagttcaaatcctcaccatccacagcaagatgaattaagttattttctagtggactcctgctggcccggtggtgcaaaccgaagcgtgttccgaagcatgc

SEQ ID NO: 454148 - DNA, 718 bp, Homo sapiens
gtgactgctcagaacttgctgctgtcaggccccaggttcacagcagtaggggctgggcttccagcaggctcatgattcaggccttaacccttgccctgggagcccccaaggataataacatcccttgctgtgaaccctggggcctgactgctcagaacttgctgctgtcttgttgcggatggatggaaggttggatggatgggtggatggccgtggatggccgtggatgcgcagtgccttgcatacccaaaccaggtgggagcgttttgttgagcatgacagcctgcagcaggaatatatgtgtgcctatttgtgtggacaaaaatatttacacttagggtttggagctattcaagaggaaatgtcacagaagcagctaaaccaaggactgagcaccctctggattctgaatctcaagatgggggcagggctgtgcttgaaggccctgctgagtcatctgttagggccttggttcaataaagcactgagcaagttgagaaaaaaaaaaatatataacaaaaaacaaaaaacataaaaaaaaaaaaaaggggggggctttttttgggggggggggaacaaaaagaggtgtaaatagataggggaacatggggggaaaaggtggttttggggacaaccatttttttggcaaaaaggggggaaaaagggggggcccacaaaggggggggagaaaaaattagaaaggagggatacgttagtg

SEQ ID NO: 454149 - DNA, 3649 bp, Homo sapiens
tgcgcggtcagaggcgcctggagcgagcgaatcctggcccaccgcctgcccaaccgcgtgaccttgattgagttaatgaacttcacgcctcagcgtccaggtctgtaaaatggggtgtctaacgcagaccgtacagcccagctgggtttagcaaacttccgggagccagttggagcctctccccatccctagcggtgatcccaggtgacgacatgccgcggggggtcctgcggaggccaccctagggcgttgctgctgcctttgggagtgtggagctccaaaccatgtcgcgagaggcggattttgggaggccgggatcctcgcgccagggggatgtgcgagggtgtgggataaatcttaattcctccggcccacccaaagcctggaaatccagcctccgcgcctcttgccctgcgggccccgccctcagtcccgccctcatctaacccgctaccccattggtggcgtccggcggcgcggctgctgttatttttcgaatatataaggaggtggaagtggcagctgcaactagaggcttccctggctggtgcctgagcccggcgtccctcgccccccgccctccccgcatccctctcctccctcgcgcctggccctgtggctcttcctccctccctccttccccccccccccacccctcgcccgctgcctccctcggcccagccagctgtgccggcgtttgttggctgccctgcgcccggccctccagccagccttctgccggccccgccgcgatggaggtgccccagccggagcccgcgccaggctcggctctcagtccagcaggcgtgtgcggtggcgcccagcgtccgggccacctcccgggcctcctgctgggatctcatggcctcctggggtccccggtgcgggcggccgcttcctcgccggtcaccaccctcacccagaccatgcacgacctcgccgggctcggcagcgaaaccccaaagagtcaggtagggaccctgctcttccgcagccgcagccgcctgacgcacctatccctgtctcgacgggcatccgaatcctccctgtcgtctgaatcctccgaatcttctgatgcaggtctctgcatggattcccccagccctatggacccccacatggcggagcagacgtttgaacaggccatccaggcagccagccggatcattcgaaacgagcagtttgccatcagacgcttccagtctatgccggtgaggctgctgggccacagccccgtgcttcggaacatcaccaactcccaggcgcccgacggccggaggaagagcgaggcgggcagtggagctgccagcagctctggggaagacaaggagaatgatggatttgtcttcaagatgccatggaagcccacacatcccagctccacccatgctctggcagagtgggccagccgcagggaagcctttgcccagagacccagctcggcccccgacctgatgtgtctcagtcctgaccggaagatggaagtggaggagctcagccccctggccctaggtcgcttctctctgacccctgcagagggggatactgaggaagatgatggatttgtggacatcctagagagtgacttaaaggatgatgatgcagttcccccaggcatggagagtctcattagtgccccactggtcaagaccttggaaaaggaagaggaaaaggacctcgtcatgtacagcaagtgccagcggctcttccgctctccgtccatgccctgcagcgtgatccggcccatcctcaagaggctggagcggccccaggacagggacacgcccgtgcagaataagcggaggcggagcgtgacccctcctgaggagcagcaggaggctgaggaacctaaagcccgcgtcctccgctcaaaatcactgtgtcacgatgagatcgagaacctcctggacagtgaccaccgagagctgattggagattactctaaggccttcctcctacagacagtagacggaaagcaccaagacctcaagtacatctcaccagaaacgatggtggccctattgacgggcaagttcagcaacatcgtggataagtttgtgattgtagactgcagatacccctatgaatatgaaggcgggcacatcaagactgcggtgaacttgcccctggaacgcgacgccgagagcttcctactgaagagccccatcgcgccctgtagcctggacaagagagtcatcctcattttccactgtgaattctcatctgagcgtgggccccgcatgtgccgtttcatcagggaacgagaccgtgctgtcaacgactaccccagcctctactaccctgagatgtatatcctgaaaggcggctacaaggagttcttccctcagcacccgaacttctgtgaaccccaggactaccggcccatgaaccacgaggccttcaaggatgagctaaagaccttccgcctcaagactcgcagctgggctggggagcggagccggcgggagctctgtagccggctgcaggaccagtgaggggcctgcgccagtcctgctacctcccttgcctttcgaggcctgaagccagctgccctatgggcctgccgggctgagggcctgctggaggcctcaggtgctgtccatgggaaagatggtgtgggtgtcctgcctgtctgccccagcccagattcccctgtgtcatcccatcattttccatatcctggtgccccccacccctggaagagcccagtctgttgagttagttaagttgggttaataccagcttaaaggcagtattttgtgtcctccaggagcttcttgtttccttgttagggttaacccttcatcttcctgtgtcctgaaacgctcctttgtgtgtgtgtcagctgaggctgggggagagccgtggtccctgaggatgggtcagagctaaactccttcctggcctgagagtcagctctctgccctgtgtacttcccgggccagggctgcccctaatctctgtaggaaccgtggtatgtctgccatgttgcccctttctcttttcccctttcctgtcccaccatacgagcacctccagcctgaacagaagctcttactctttcctatttcagtgttacctgtgtgcttggtctgtttgactttacgcccatctcaggacacttccgtagactgtttaggttcccctgtcaaatatcagttacccactcggtcccagttttgttgccccagaaagggatgttattatccttgggggctcccagggcaagggttaaggcctgaatcatgagcctgctggaagcccagcccctactgctgtgaaccctggggcctgactgctcagaacttgctgctgtcttgttgcggatggatggaaggttggatggatgggtggatggccgtggatggccgtggatgcgcagtgccttgcatacccaaaccaggtgggagcgttttgttgagcatgacagcctgcagcaggaatatatgtgtgcctatttgtgtggacaaaaatatttacacttagggtttggagctattcaagaggaaatgtcacagaagcagctaaaccaaggactgagcaccctctggattctgaatctcaagatgggggcagggctgtgcttgaaggccctgctgagtcatctgttagggccttggttcaataaagcactgagcaagttgagaaa

SEQ ID NO: 454150 - DNA, 3712 bp, Homo sapiens
tgcgcggtcagaggcgcctggagcgagcgaatcctggcccaccgcctgcccaaccgcgtgaccttgattgagttaatgaacttcacgcctcagcgtccaggtctgtaaaatggggtgtctaacgcagaccgtacagcccagctgggtttagcaaacttccgggagccagttggagcctctccccatccctagcggtgatcccaggtgacgacatgccgcggggggtcctgcggaggccaccctagggcgttgctgctgcctttgggagtgtggagctccaaaccatgtcgcgagaggcggattttgggaggccgggatcctcgcgccagggggatgtgcgagggtgtgggataaatcttaattcctccggcccacccaaagcctggaaatccagcctccgcgcctcttgccctgcgggccccgccctcagtcccgccctcatctaacccgctaccccattggtggcgtccggcggcgcggctgctgttatttttcgaatatataaggaggtggaagtggcagctgcaactagaggcttccctggctggtgcctgagcccggcgtccctcgccccccgccctccccgcatccctctcctccctcgcgcctggccctgtggctcttcctccctccctccttccccccccccccacccctcgcccgctgcctccctcggcccagccagctgtgccggcgtttgttggctgccctgcgcccggccctccagccagccttctgccggccccgccgcgatggaggtgccccagccggagcccgcgccaggctcggctctcagtccagcaggcgtgtgcggtggcgcccagcgtccgggccacctcccgggcctcctgctgggatctcatggcctcctggggtccccggtgcgggcggccgcttcctcgccggtcaccaccctcacccagaccatgcacgacctcgccgggctcggcagccgcagccgcctgacgcacctatccctgtctcgacgggcatccgaatcctccctgtcgtctgaatcctccgaatcttctgatgcaggtctctgcatggattcccccagccctatggacccccacatggcggagcagacgtttgaacaggccatccaggcagccagccggatcattcgaaacgagcagtttgccatcagacgcttccagtctatgccggtgaggctgctgggccacagccccgtgcttcggaacatcaccaactcccaggcgcccgacggccggaggaagagcgaggcgggcagtggagctgccagcagctctggggaagacaaggagaatgtgcgcttctggaaggccggggtgggagctctccgggaagaggagggggcatgctggggtggttccctggcatgtgaggaccctcctctcccatcttggctgcaggatggatttgtcttcaagatgccatggaagcccacacatcccagctccacccatgctctggcagagtgggccagccgcagggaagcctttgcccagagacccagctcggcccccgacctgatgtgtctcagtcctgaccggaagatggaagtggaggagctcagccccctggccctaggtcgcttctctctgacccctgcagagggggatactgaggaagatgatggatttgtggacatcctagagagtgacttaaaggatgatgatgcagttcccccaggcatggagagtctcattagtgccccactggtcaagaccttggaaaaggaagaggaaaaggacctcgtcatgtacagcaagtgccagcggctcttccgctctccgtccatgccctgcagcgtgatccggcccatcctcaagaggctggagcggccccaggacagggacacgcccgtgcagaataagcggaggcggagcgtgacccctcctgaggagcagcaggaggctgaggaacctaaagcccgcgtcctccgctcaaaatcactgtgtcacgatgagatcgagaacctcctggacagtgaccaccgagagctgattggagattactctaaggccttcctcctacagacagtagacggaaagcaccaagacctcaagtacatctcaccagaaacgatggtggccctattgacgggcaagttcagcaacatcgtggataagtttgtgattgtagactgcagatacccctatgaatatgaaggcgggcacatcaagactgcggtgaacttgcccctggaacgcgacgccgagagcttcctactgaagagccccatcgcgccctgtagcctggacaagagagtcatcctcattttccactgtgaattctcatctgagcgtgggccccgcatgtgccgtttcatcagggaacgagaccgtgctgtcaacgactaccccagcctctactaccctgagatgtatatcctgaaaggcggctacaaggagttcttccctcagcacccgaacttctgtgaaccccaggactaccggcccatgaaccacgaggccttcaaggatgagctaaagaccttccgcctcaagactcgcagctgggctggggagcggagccggcgggagctctgtagccggctgcaggaccagtgaggggcctgcgccagtcctgctacctcccttgcctttcgaggcctgaagccagctgccctatgggcctgccgggctgagggcctgctggaggcctcaggtgctgtccatgggaaagatggtgtgggtgtcctgcctgtctgccccagcccagattcccctgtgtcatcccatcattttccatatcctggtgccccccacccctggaagagcccagtctgttgagttagttaagttgggttaataccagcttaaaggcagtattttgtgtcctccaggagcttcttgtttccttgttagggttaacccttcatcttcctgtgtcctgaaacgctcctttgtgtgtgtgtcagctgaggctgggggagagccgtggtccctgaggatgggtcagagctaaactccttcctggcctgagagtcagctctctgccctgtgtacttcccgggccagggctgcccctaatctctgtaggaaccgtggtatgtctgccatgttgcccctttctcttttcccctttcctgtcccaccatacgagcacctccagcctgaacagaagctcttactctttcctatttcagtgttacctgtgtgcttggtctgtttgactttacgcccatctcaggacacttccgtagactgtttaggttcccctgtcaaatatcagttacccactcggtcccagttttgttgccccagaaagggatgttattatccttgggggctcccagggcaagggttaaggcctgaatcatgagcctgctggaagcccagcccctactgctgtgaaccctggggcctgactgctcagaacttgctgctgtcttgttgcggatggatggaaggttggatggatgggtggatggccgtggatggccgtggatgcgcagtgccttgcatacccaaaccaggtgggagcgttttgttgagcatgacagcctgcagcaggaatatatgtgtgcctatttgtgtggacaaaaatatttacacttagggtttggagctattcaagaggaaatgtcacagaagcagctaaaccaaggactgagcaccctctggattctgaatctcaagatgggggcagggctgtgcttgaaggccctgctgagtcatctgttagggccttggttcaataaagcactgagcaagttgagaaa

SEQ ID NO: 454151 - DNA, 4539 bp, Homo sapiens
tgcgcggtcagaggcgcctggagcgagcgaatcctggcccaccgcctgcccaaccgcgtgaccttgattgagttaatgaacttcacgcctcagcgtccaggtctgtaaaatggggtgtctaacgcagaccgtacagcccagctgggtttagcaaacttccgggagccagttggagcctctccccatccctagcggtgatcccaggtgacgacatgccgcggggggtcctgcggaggccaccctagggcgttgctgctgcctttgggagtgtggagctccaaaccatgtcgcgagaggcggattttgggaggccgggatcctcgcgccagggggatgtgcgagggtgtgggataaatcttaattcctccggcccacccaaagcctggaaatccagcctccgcgcctcttgccctgcgggccccgccctcagtcccgccctcatctaacccgctaccccattggtggcgtccggcggcgcggctgctgttatttttcgaatatataaggaggtggaagtggcagctgcaactagaggcttccctggctggtgcctgagcccggcgtccctcgccccccgccctccccgcatccctctcctccctcgcgcctggccctgtggctcttcctccctccctccttccccccccccccacccctcgcccgctgcctccctcggcccagccagctgtgccggcgtttgttggctgccctgcgcccggccctccagccagccttctgccggccccgccgcgatggaggtgccccagccggagcccgcgccaggctcggctctcagtccagcaggcgtgtgcggtggcgcccagcgtccgggccacctcccgggcctcctgctgggatctcatggcctcctggggtccccggtgcgggcggccgcttcctcgccggtcaccaccctcacccagaccatgcacgacctcgccgggctcggcaggtaggacaccccaaggaggctgcatatgggggtgagaggctaggtctggagtcctgggcctcctggagaactgggcatggtagtcgaatccaggaggtggagtccggggaggcatcctgagcagtggagaggtacgcccttgttccctcctaggggcccaggacatgggaagtgagacctgggctgtgccccccacacctccaggtgacctgctctcagtctgcacaagcctctccaaatcttctttcccctcactccctcctccctcattgtgcctccaccacgctgcctccgtaatctctgcccggatagccaccattttgccccaggatgggaatctcaagcctggagagggaacttaagggtggcagagccgtggagcactcacacatccatgcccctgctccctccaccccagttctgcccccagaattaagacaattaattaaacactgatcctgctccctaagtctgcaaggggagagctgggttgttccagtaggagaacctggtcttggtccatccttcaggaagggtcctggaaaggtgggggtctgacagtttaggagaaggctctctggggcggctctgctagaccaccaacccttaggctggcctccagccaggcagccttgctcacaccctgggctcaccttgccctgctcctgagaggacctttcctaaaccagtcaacgaagagaagacgctttagggcctctgtagaatgaaccttccttgacctgagaagagggggccctcagggccattgctttcccggtgtagtgtttcgctcagttcttttctcagcaagggagtgggaacgtgggctagccaggccttgagccccacgtttacctttctcctttcccgggtccctgttcccttcccagcgaaaccccaaagagtcaggtagggaccctgctcttccgcagccgcagccgcctgacgcacctatccctgtctcgacgggcatccgaatcctccctgtcgtctgaatcctccgaatcttctgatgcaggtctctgcatggattcccccagccctatggacccccacatggcggagcagacgtttgaacaggccatccaggcagccagccggatcattcgaaacgagcagtttgccatcagacgcttccagtctatgccggtgaggctgctgggccacagccccgtgcttcggaacatcaccaactcccaggcgcccgacggccggaggaagagcgaggcgggcagtggagctgccagcagctctggggaagacaaggagaatgatggatttgtcttcaagatgccatggaagcccacacatcccagctccacccatgctctggcagagtgggccagccgcagggaagcctttgcccagagacccagctcggcccccgacctgatgtgtctcagtcctgaccggaagatggaagtggaggagctcagccccctggccctaggtcgcttctctctgacccctgcagagggggatactgaggaagatgatggatttgtggacatcctagagagtgacttaaaggatgatgatgcagttcccccaggcatggagagtctcattagtgccccactggtcaagaccttggaaaaggaagaggaaaaggacctcgtcatgtacagcaagtgccagcggctcttccgctctccgtccatgccctgcagcgtgatccggcccatcctcaagaggctggagcggccccaggacagggacacgcccgtgcagaataagcggaggcggagcgtgacccctcctgaggagcagcaggaggctgaggaacctaaagcccgcgtcctccgctcaaaatcactgtgtcacgatgagatcgagaacctcctggacagtgaccaccgagagctgattggagattactctaaggccttcctcctacagacagtagacggaaagcaccaagacctcaagtacatctcaccagaaacgatggtggccctattgacgggcaagttcagcaacatcgtggataagtttgtgattgtagactgcagatacccctatgaatatgaaggcgggcacatcaagactgcggtgaacttgcccctggaacgcgacgccgagagcttcctactgaagagccccatcgcgccctgtagcctggacaagagagtcatcctcattttccactgtgaattctcatctgagcgtgggccccgcatgtgccgtttcatcagggaacgagaccgtgctgtcaacgactaccccagcctctactaccctgagatgtatatcctgaaaggcggctacaaggagttcttccctcagcacccgaacttctgtgaaccccaggactaccggcccatgaaccacgaggccttcaaggatgagctaaagaccttccgcctcaagactcgcagctgggctggggagcggagccggcgggagctctgtagccggctgcaggaccagtgaggggcctgcgccagtcctgctacctcccttgcctttcgaggcctgaagccagctgccctatgggcctgccgggctgagggcctgctggaggcctcaggtgctgtccatgggaaagatggtgtgggtgtcctgcctgtctgccccagcccagattcccctgtgtcatcccatcattttccatatcctggtgccccccacccctggaagagcccagtctgttgagttagttaagttgggttaataccagcttaaaggcagtattttgtgtcctccaggagcttcttgtttccttgttagggttaacccttcatcttcctgtgtcctgaaacgctcctttgtgtgtgtgtcagctgaggctgggggagagccgtggtccctgaggatgggtcagagctaaactccttcctggcctgagagtcagctctctgccctgtgtacttcccgggccagggctgcccctaatctctgtaggaaccgtggtatgtctgccatgttgcccctttctcttttcccctttcctgtcccaccatacgagcacctccagcctgaacagaagctcttactctttcctatttcagtgttacctgtgtgcttggtctgtttgactttacgcccatctcaggacacttccgtagactgtttaggttcccctgtcaaatatcagttacccactcggtcccagttttgttgccccagaaagggatgttattatccttgggggctcccagggcaagggttaaggcctgaatcatgagcctgctggaagcccagcccctactgctgtgaaccctggggcctgactgctcagaacttgctgctgtcttgttgcggatggatggaaggttggatggatgggtggatggccgtggatggccgtggatgcgcagtgccttgcatacccaaaccaggtgggagcgttttgttgagcatgacagcctgcagcaggaatatatgtgtgcctatttgtgtggacaaaaatatttacacttagggtttggagctattcaagaggaaatgtcacagaagcagctaaaccaaggactgagcaccctctggattctgaatctcaagatgggggcagggctgtgcttgaaggccctgctgagtcatctgttagggccttggttcaataaagcactgagcaagttgagaaa

SEQ ID NO: 454152 - DNA, 2793 bp, Homo sapiens
taattaaggtaaaaataacgcacttttttttttgcggaacctgaaaaattcaagaagttgaaaaacgcttttcacgtcacctggagagatgcacagcgaaaccccaaagagtcaggtagggaccctgctcttccgcagccgcagccgcctgacgcacctatccctgtctcgacgggcatccgaatcctccctgtcgtctgaatcctccgaatcttctgatgcaggtctctgcatggattcccccagccctatggacccccacatggcggagcagacgtttgaacaggccatccaggcagccagccggatcattcgaaacgagcagtttgccatcagacgcttccagtctatgccggtgaggctgctgggccacagccccgtgcttcggaacatcaccaactcccaggcgcccgacggccggaggaagagcgaggcgggcagtggagctgccagcagctctggggaagacaaggagaatgatggatttgtcttcaagatgccatggaagcccacacatcccagctccacccatgctctggcagagtgggccagccgcagggaagcctttgcccagagacccagctcggcccccgacctgatgtgtctcagtcctgaccggaagatggaagtggaggagctcagccccctggccctaggtcgcttctctctgacccctgcagagggggatactgaggaagatgatggatttgtggacatcctagagagtgacttaaaggatgatgatgcagttcccccaggcatggagagtctcattagtgccccactggtcaagaccttggaaaaggaagaggaaaaggacctcgtcatgtacagcaagtgccagcggctcttccgctctccgtccatgccctgcagcgtgatccggcccatcctcaagaggctggagcggccccaggacagggacacgcccgtgcagaataagcggaggcggagcgtgacccctcctgaggagcagcaggaggctgaggaacctaaagcccgcgtcctccgctcaaaatcactgtgtcacgatgagatcgagaacctcctggacagtgaccaccgagagctgattggagattactctaaggccttcctcctacagacagtagacggaaagcaccaagacctcaagtacatctcaccagaaacgatggtggccctattgacgggcaagttcagcaacatcgtggataagtttgtgattgtagactgcagatacccctatgaatatgaaggcgggcacatcaagactgcggtgaacttgcccctggaacgcgacgccgagagcttcctactgaagagccccatcgcgccctgtagcctggacaagagagtcatcctcattttccactgtgaattctcatctgagcgtgggccccgcatgtgccgtttcatcagggaacgagaccgtgctgtcaacgactaccccagcctctactaccctgagatgtatatcctgaaaggcggctacaaggagttcttccctcagcacccgaacttctgtgaaccccaggactaccggcccatgaaccacgaggccttcaaggatgagctaaagaccttccgcctcaagactcgcagctgggctggggagcggagccggcgggagctctgtagccggctgcaggaccagtgaggggcctgcgccagtcctgctacctcccttgcctttcgaggcctgaagccagctgccctatgggcctgccgggctgagggcctgctggaggcctcaggtgctgtccatgggaaagatggtgtgggtgtcctgcctgtctgccccagcccagattcccctgtgtcatcccatcattttccatatcctggtgccccccacccctggaagagcccagtctgttgagttagttaagttgggttaataccagcttaaaggcagtattttgtgtcctccaggagcttcttgtttccttgttagggttaacccttcatcttcctgtgtcctgaaacgctcctttgtgtgtgtgtcagctgaggctgggggagagccgtggtccctgaggatgggtcagagctaaactccttcctggcctgagagtcagctctctgccctgtgtacttcccgggccagggctgcccctaatctctgtaggaaccgtggtatgtctgccatgttgcccctttctcttttcccctttcctgtcccaccatacgagcacctccagcctgaacagaagctcttactctttcctatttcagtgttacctgtgtgcttggtctgtttgactttacgcccatctcaggacacttccgtagactgtttaggttcccctgtcaaatatcagttacccactcggtcccagttttgttgccccagaaagggatgttattatccttgggggctcccagggcaagggttaaggcctgaatcatgagcctgctggaagcccagcccctactgctgtgaaccctggggcctgactgctcagaacttgctgctgtcttgttgcggatggatggaaggttggatggatgggtggatggccgtggatggccgtggatgcgcagtgccttgcatacccaaaccaggtgggagcgttttgttgagcatgacagcctgcagcaggaatatatgtgtgcctatttgtgtggacaaaaatatttacacttagggtttggagctattcaagaggaaatgtcacagaagcagctaaaccaaggactgagcaccctctggattctgaatctcaagatgggggcagggctgtgcttgaaggccctgctgagtcatctgttagggccttggttcaataaagcactgagcaagttgagaaa

SEQ ID NO: 454153 - DNA, 3568 bp, Homo sapiens
tgcgcggtcagaggcgcctggagcgagcgaatcctggcccaccgcctgcccaaccgcgtgaccttgattgagttaatgaacttcacgcctcagcgtccaggtctgtaaaatggggtgtctaacgcagaccgtacagcccagctgggtttagcaaacttccgggagccagttggagcctctccccatccctagcggtgatcccaggtgacgacatgccgcggggggtcctgcggaggccaccctagggcgttgctgctgcctttgggagtgtggagctccaaaccatgtcgcgagaggcggattttgggaggccgggatcctcgcgccagggggatgtgcgagggtgtgggataaatcttaattcctccggcccacccaaagcctggaaatccagcctccgcgcctcttgccctgcgggccccgccctcagtcccgccctcatctaacccgctaccccattggtggcgtccggcggcgcggctgctgttatttttcgaatatataaggaggtggaagtggcagctgcaactagaggcttccctggctggtgcctgagcccggcgtccctcgccccccgccctccccgcatccctctcctccctcgcgcctggccctgtggctcttcctccctccctccttccccccccccccacccctcgcccgctgcctccctcggcccagccagctgtgccggcgtttgttggctgccctgcgcccggccctccagccagccttctgccggccccgccgcgatggaggtgccccagccggagcccgcgccaggctcggctctcagtccagcaggcgtgtgcggtggcgcccagcgtccgggccacctcccgggcctcctgctgggatctcatggcctcctggggtccccggtgcgggcggccgcttcctcgccggtcaccaccctcacccagaccatgcacgacctcgccgggctcggcagcgaaaccccaaagagtcaggtagggaccctgctcttccgcagccgcagccgcctgacgcacctatccctgtctcgacgggcatccgaatcctccctgtcgtctgaatcctccgaatcttctgatgcaggtctctgcatggattcccccagccctatggacccccacatggcggagcagacgtttgaacaggccatccaggcagccagccggatcattcgaaacgagcagtttgccatcagacgcttccagtctatgccggtgaggctgctgggccacagccccgtgcttcggaacatcaccaactcccaggcgcccgacggccggaggaagagcgaggcgggcagtggagctgccagcagctctggggaagacaaggagaatgatggatttgtcttcaagatgccatggaagcccacacatcccagctccacccatgctctggcagagtgggccagccgcagggaagcctttgcccagagacccagctcggcccccgacctgatgtgtctcagtcctgaccggaagatggaagtggaggagctcagccccctggccctaggtcgcttctctctgacccctgcagagggggatactgaggaagatgatggatttgtggacatcctagagagtgacttaaaggacctcgtcatgtacagcaagtgccagcggctcttccgctctccgtccatgccctgcagcgtgatccggcccatcctcaagaggctggagcggccccaggacagggacacgcccgtgcagaataagcggaggcggagcgtgacccctcctgaggagcagcaggaggctgaggaacctaaagcccgcgtcctccgctcaaaatcactgtgtcacgatgagatcgagaacctcctggacagtgaccaccgagagctgattggagattactctaaggccttcctcctacagacagtagacggaaagcaccaagacctcaagtacatctcaccagaaacgatggtggccctattgacgggcaagttcagcaacatcgtggataagtttgtgattgtagactgcagatacccctatgaatatgaaggcgggcacatcaagactgcggtgaacttgcccctggaacgcgacgccgagagcttcctactgaagagccccatcgcgccctgtagcctggacaagagagtcatcctcattttccactgtgaattctcatctgagcgtgggccccgcatgtgccgtttcatcagggaacgagaccgtgctgtcaacgactaccccagcctctactaccctgagatgtatatcctgaaaggcggctacaaggagttcttccctcagcacccgaacttctgtgaaccccaggactaccggcccatgaaccacgaggccttcaaggatgagctaaagaccttccgcctcaagactcgcagctgggctggggagcggagccggcgggagctctgtagccggctgcaggaccagtgaggggcctgcgccagtcctgctacctcccttgcctttcgaggcctgaagccagctgccctatgggcctgccgggctgagggcctgctggaggcctcaggtgctgtccatgggaaagatggtgtgggtgtcctgcctgtctgccccagcccagattcccctgtgtcatcccatcattttccatatcctggtgccccccacccctggaagagcccagtctgttgagttagttaagttgggttaataccagcttaaaggcagtattttgtgtcctccaggagcttcttgtttccttgttagggttaacccttcatcttcctgtgtcctgaaacgctcctttgtgtgtgtgtcagctgaggctgggggagagccgtggtccctgaggatgggtcagagctaaactccttcctggcctgagagtcagctctctgccctgtgtacttcccgggccagggctgcccctaatctctgtaggaaccgtggtatgtctgccatgttgcccctttctcttttcccctttcctgtcccaccatacgagcacctccagcctgaacagaagctcttactctttcctatttcagtgttacctgtgtgcttggtctgtttgactttacgcccatctcaggacacttccgtagactgtttaggttcccctgtcaaatatcagttacccactcggtcccagttttgttgccccagaaagggatgttattatccttgggggctcccagggcaagggttaaggcctgaatcatgagcctgctggaagcccagcccctactgctgtgaaccctggggcctgactgctcagaacttgctgctgtcttgttgcggatggatggaaggttggatggatgggtggatggccgtggatggccgtggatgcgcagtgccttgcatacccaaaccaggtgggagcgttttgttgagcatgacagcctgcagcaggaatatatgtgtgcctatttgtgtggacaaaaatatttacacttagggtttggagctattcaagaggaaatgtcacagaagcagctaaaccaaggactgagcaccctctggattctgaatctcaagatgggggcagggctgtgcttgaaggccctgctgagtcatctgttagggccttggttcaataaagcactgagcaagttgagaaa

SEQ ID NO: 454154 - DNA, 2246 bp, Homo sapiens
atcgcccacgcgtccgcggacgcgtggggacccagctcgggccccgacctgatgtgtctcagtcctgaccggaagatggaagtggaggagctcagccccctggccctaggtcgcttctctctgacccctgcagagggggatactgaggaagatgatggatttgtggacatcctagagagtgacttaaaggatgatgatgcagttcccccaggcatggagagtctcattagtgccccactggtcaagaccttggaaaaggaagaggaaaaggacctcgtcatgtacagcaagtgccagcggctcttccgctctccgtccatgccctgcagcgtgatccggcccatcctcaagaggctggagcggccccaggacagggacacgcccgtgcagaataagcggaggcggagcgtgacccctcctgaggagcagcaggaggctgaggaacctaaagcccgcgtcctccgctcaaaatcactgtgtcacgatgagatcgagaacctcctggacagtgaccaccgagagctgattggagattactctaaggccttcctcctacagacagtagacggaaagcaccaagacctcaagtacatctcaccagaaacgatggtggccctattgacgggcaagttcagcaacatcgtggataagtttgtgattgtagactgcagatacccctatgaatatgaaggcgggcacatcaagactgcggtgaacttgcccctggaacgcgacgccgagagcttcctactgaagagccccatcgcgccctgtagcctggacaagagagtcatcctcattttccactgtgaattctcatctgagcgtgggccccgcatgtgccgtttcatcagggaacgagaccgtgctgtcaacgactaccccagcctctactaccctgagatgtatatcctgaaaggcggctacaaggagttcttccctcagcacccgaacttctgtgaaccccaggactaccggcccatgaaccacgaggccttcaaggatgagctaaagaccttccgcctcaagactcgcagctgggctggggagcggagccggcgggagctctgtagccggctgcaggaccagtgaggggcctgcgccagtcctgctacctcccttgcctttcgaggcctgaagccagctgccctatgggcctgccgggctgagggcctgctggaggcctcaggtgctgtccatgggaaagatggtgtgggtgtcctgcctgtctgccccagcccagattcccctgtgtcatcccatcattttccatatcctggtgccccccacccctggaagagcccagtctgttgagttagttaagttgggttaataccagcttaaaggcagtattttgtgtcctccaggagcttcttgtttccttgttagggttaacccttcatcttcctgtgtcctgaaacgctcctttgtgtgtgtgtcagctgaggctgggggagagccgtggtccctgaggatgggtcagagctaaactccttcctggcctgagagtcagctctctgccctgtgtacttcccgggccagggctgcccctaatctctgtaggaaccgtggtatgtctgccatgttgcccctttctcttttcccctttcctgtcccaccatacgagcacctccagcctgaacagaagctcttactctttcctatttcagtgttacctgtgtgcttggtctgtttgactttacgcccatctcaggacacttccgtagactgtttaggttcccctgtcaaatatcagttacccactcggtcccagttttgttgccccagaaagggatgttattatccttgggggctcccagggcaagggttaaggcctgaatcatgagcctgctggaagcccagcccctactgctgtgaaccctggggcctgactgctcagaacttgctgctgtcttgttgcggatggatggaaggttggatggatgggtggatggccgtggatggccgtggatgcgcagtgccttgcatacccaaaccaggtgggagcgttttgttgagcatgacagcctgcagcaggaatatatgtgtgcctatttgtgtggacaaaaatatttacacttagggtttggagctattcaagaggaaatgtcacagaagcagctaaaccaaggactgagcaccctctggattctgaatctcaagatgggggcagggctgtgcttgaaggccctgctgagtcatctgttagggccttggttcaataaagcactgagcaagttgagaaa

SEQ ID NO: 454155 - DNA, 3712 bp, Homo sapiens
tgcgcggtcagaggcgcctggagcgagcgaatcctggcccaccgcctgcccaaccgcgtgaccttgattgagttaatgaacttcacgcctcagcgtccaggtctgtaaaatggggtgtctaacgcagaccgtacagcccagctgggtttagcaaacttccgggagccagttggagcctctccccatccctagcggtgatcccaggtgacgacatgccgcggggggtcctgcggaggccaccctagggcgttgctgctgcctttgggagtgtggagctccaaaccatgtcgcgagaggcggattttgggaggccgggatcctcgcgccagggggatgtgcgagggtgtgggataaatcttaattcctccggcccacccaaagcctggaaatccagcctccgcgcctcttgccctgcgggccccgccctcagtcccgccctcatctaacccgctaccccattggtggcgtccggcggcgcggctgctgttatttttcgaatatataaggaggtggaagtggcagctgcaactagaggcttccctggctggtgcctgagcccggcgtccctcgccccccgccctccccgcatccctctcctccctcgcgcctggccctgtggctcttcctccctccctccttccccccccccccacccctcgcccgctgcctccctcggcccagccagctgtgccggcgtttgttggctgccctgcgcccggccctccagccagccttctgccggccccgccgcgatggaggtgccccagccggagcccgcgccaggctcggctctcagtccagcaggcgtgtgcggtggcgcccagcgtccgggccacctcccgggcctcctgctgggatctcatggcctcctggggtccccggtgcgggcggccgcttcctcgccggtcaccaccctcacccagaccatgcacgacctcgccgggctcggcagcgaaaccccaaagagtcaggtagggaccctgctcttccgcagccgcagccgcctgacgcacctatccctgtctcgacgggcatccgaatcctccctgtcgtctgaatcctccgaatcttctgatgcaggtctctgcatggattcccccagccctatggacccccacatggcggagcagacgtttgaacaggccatccaggcagccagccggatcattcgaaacgagcagtttgccatcagacgcttccagtctatgccggtgaggctgctgggccacagccccgtgcttcggaacatcaccaactcccaggcgcccgacggccggaggaagagcgaggcgggcagtggagctgccagcagctctggggaagacaaggagaatgatggatttgtcttcaagatgccatggaagcccacacatcccagctccacccatgctctggcagagtgggccagccgcagggaagcctttgcccagagacccagctcggcccccgacctgatgtgtctcagtcctgaccggaagatggaagtggaggagctcagccccctggccctaggtcgcttctctctgacccctgcagagggggatactgaggaagatgatggatttgtggacatcctagagagtgacttaaaggatgatgatgcagttcccccaggcatggagagtctcattagtgccccactggtcaagaccttggaaaaggaagaggaaaaggacctcgtcatgtacagcaagtgccagcggctcttccgctctccgtccatgccctgcagcgtgatccggcccatcctcaagaggctggagcggccccaggacagggacacgcccgtgcagaataagcggaggcggagcgtgacccctcctgaggagcagcaggaggctgaggaacctaaagcccgcgtcctccgctcaaaatcactgtgtcacgatgagatcgagaacctcctggacagtgaccaccgagagctgattggagattactctaaggccttcctcctacagacagtagacggaaagcaccaagacctcaagtacatctcaccagaaacgatggtggccctattgacgggcaagttcagcaacatcgtggataagtttgtgattgtagactgcagatacccctatgaatatgaaggcgggcacatcaagactgcggtgaacttgcccctggaacgcgacgccgagagcttcctactgaaggcgggcacatcaactgcggtgaacttgcccctggaacgcgacgccgagagcttcctactgaagagccccatcgcgccctgtagcctggacaagagagtcatcctcattttccactgtgaattctcatctgagcgtgggccccgcatgtgccgtttcatcagggaacgagaccgtgctgtcaacgactaccccagcctctactaccctgagatgtatatcctgaaaggcggctacaaggagttcttccctcagcacccgaacttctgtgaaccccaggactaccggcccatgaaccacgaggccttcaaggatgagctaaagaccttccgcctcaagactcgcagctgggctggggagcggagccggcgggagctctgtagccggctgcaggaccagtgaggggcctgcgccagtcctgctacctcccttgcctttcgaggcctgaagccagctgccctatgggcctgccgggctgagggcctgctggaggcctcaggtgctgtccatgggaaagatggtgtgggtgtcctgcctgtctgccccagcccagattcccctgtgtcatcccatcattttccatatcctggtgccccccacccctggaagagcccagtctgttgagttagttaagttgggttaataccagcttaaaggcagtattttgtgtcctccaggagcttcttgtttccttgttagggttaacccttcatcttcctgtgtcctgaaacgctcctttgtgtgtgtgtcagctgaggctgggggagagccgtggtccctgaggatgggtcagagctaaactccttcctggcctgagagtcagctctctgccctgtgtacttcccgggccagggctgcccctaatctctgtaggaaccgtggtatgtctgccatgttgcccctttctcttttcccctttcctgtcccaccatacgagcacctccagcctgaacagaagctcttactctttcctatttcagtgttacctgtgtgcttggtctgtttgactttacgcccatctcaggacacttccgtagactgtttaggttcccctgtcaaatatcagttacccactcggtcccagttttgttgccccagaaagggatgttattatccttgggggctcccagggcaagggttaaggcctgaatcatgagcctgctggaagcccagcccctactgctgtgaaccctggggcctgactgctcagaacttgctgctgtcttgttgcggatggatggaaggttggatggatgggtggatggccgtggatggccgtggatgcgcagtgccttgcatacccaaaccaggtgggagcgttttgttgagcatgacagcctgcagcaggaatatatgtgtgcctatttgtgtggacaaaaatatttacacttagggtttggagctattcaagaggaaatgtcacagaagcagctaaaccaaggactgagcaccctctggattctgaatctcaagatgggggcagggctgtgcttgaaggccctgctgagtcatctgttagggccttggttcaataaagcactgagcaagttgagaaa

SEQ ID NO: 454156 - DNA, 3648 bp, Homo sapiens
tgcgcggtcagaggcgcctggagcgagcgaatcctggcccaccgcctgcccaaccgcgtgaccttgattgagttaatgaacttcacgcctcagcgtccaggtctgtaaaatggggtgtctaacgcagaccgtacagcccagctgggtttagcaaacttccgggagccagttggagcctctccccatccctagcggtgatcccaggtgacgacatgccgcggggggtcctgcggaggccaccctagggcgttgctgctgcctttgggagtgtggagctccaaaccatgtcgcgagaggcggattttgggaggccgggatcctcgcgccagggggatgtgcgagggtgtgggataaatcttaattcctccggcccacccaaagcctggaaatccagcctccgcgcctcttgccctgcgggccccgccctcagtcccgccctcatctaacccgctaccccattggtggcgtccggcggcgcggctgctgttatttttcgaatatataaggaggtggaagtggcagctgcaactagaggcttccctggctggtgcctgagcccggcgtccctcgccccccgccctccccgcatccctctcctccctcgcgcctggccctgtggctcttcctccctccctccttccccccccccccacccctcgcccgctgcctccctcggcccagccagctgtgccggcgtttgttggctgccctgcgcccggccctccagccagccttctgccggccccgccgcgatggaggtgccccagccggagcccgcgccaggctcggctctcagtccagcaggcgtgtgcggtggcgcccagcgtccgggccacctcccgggcctcctgctgggatctcatggcctcctggggtccccggtgcgggcggccgcttcctcgccggtcaccaccctcacccagaccatgcacgacctcgccgggctcggcagcgaaaccccaaagagtcaggtagggaccctgctcttccgcagccgcagccgcctgacgcacctatccctgtctcgacgggcatccgaatcctccctgtcgtctgaatcctccgaatcttctgatgcaggtctctgcatggattcccccagccctatggacccccacatggcggagcagacgtttgaacaggccatccaggcagccagccggatcattcgaaacgagcagtttgccatcagacgcttccagtctatgccggtgaggctgctgggccacagccccgtgcttcggaacatcaccaactcccaggcgcccgacggccggaggaagagcgaggcgggcagtggagctgccagcagctctggggaagacaaggagaatgatggatttgtcttcaagatgccatggaagcccacacatcccagctccacccatgctctggcagagtgggccagccgcagggaagcctttgcccagagacccagctcggcccccgacctgatgtgtctcagtcctgaccggaagatggaagtggaggagctcagccccctggccctaggtcgcttctctctgacccctgcagagggggatactgaggaagatgatggatttgtggacatcctagagagtgacttaaaggatgatgatgcagttcccccaggcatggagagtctcattagtgccccactggtcaagaccttggaaaaggaagaggaaaaggacctcgtcatgtacagcaagtgccagcggctcttccgctctccgtccatgccctgcagcgtgatccggcccatcctcaagaggctggagcggccccaggacagggacacgcccgtgcagaataagcggaggcggagcgtgacccctcctgaggagcagcaggaggctgaggaacctaaagcccgcgtcctccgctcaaaatcactgtgtcacgatgagatcgagaacctcctggacagtgaccaccgagagctgattggagattactctaaggccttcctcctacagacagtagacggaaagcaccaagacctcaagtacatctcaccagaaacgatggtggccctattgacgggcaagttcagcaacatcgtggataagtttgtgattgtagactgcagatacccctatgaatatgaaggcgggcacatcaagactgcggtgaacttgcccctggaacgcgacgccgagagcttcctactgaagagccccatcgcgccctgtagcctggacaagagagtcatcctcattttccactgtgaattctcatctgagcgtgggccccgcatgtgccgtttcatcagggaacgagaccgtgctgtcaacgactaccccagcctctactaccctgagatgtatatcctgaaaggcggctacaaggagttcttccctcagcacccgaacttctgtgaaccccaggactaccggcccatgaaccacgaggccttcaaggatgagctaaagaccttccgcctcaagactcgcagctgggctggggagcggagccggcgggagctctgtagccggctgcaggaccagtgaggggcctgcgccagtcctgctacctcccttgcctttcgaggcctgaagccagctgccctatgggcctgccgggctgagggcctgctggaggcctcaggtgctgtccatgggaaagatggtgtgggtgtcctgcctgtctgccccagcccagattcccctgtgtcatcccatcattttccatatcctggtgccccccacccctggaagagcccagtctgttgagttagttaagttgggttaataccagcttaaaggcagtattttgtgtcctccaggagcttcttgtttccttgttagggttaacccttcatcttcctgtgtcctgaaacgctcctttgtgtgtgtgtcagctgaggctgggggagagccgtggtccctgaggatgggtcagagctaaactccttcctggcctgagagtcagctctctgccctgtgtacttcccgggccagggctgcccctaatctctgtaggaaccgtggtatgtctgccatgttgcccctttctcttttcccctttcctgtcccaccatacgagcacctccagcctgaacagaagctcttactctttcctatttcagtgttacctgtgtgcttggtctgtttgactttacgcccatctcaggacacttccgtagactgtttaggttcccctgtcaaatatcagttacccactcggtcccagttttgttgccccagaaagggatgttattatccttgggggctcccagggcaagggttaaggcctgaatcatgagcctgctggaagcccagcccctactgctgtgaaccctggggcctgactgctcagaacttgctgctgtcttgttgcggatggatggaaggttggatggatgggtggatggccgtggatggccgtggatgcgcagtgccttgcatacccaaaccaggtgggagcgttttgttgagcatgacagcctgcagcaggaatatatgtgtgcctatttgtgtggacaaaaatatttacacttagggtttggagctattcaagacctacctcacgtcacctcccagctccaccgagcgtcttagcgccctctgggatgtaagtatccataggggcccaccagtgggccataaggtcctgttgtgtctttcgttagggcctcaaaacaccccagcaccgaacaatgtc

SEQ ID NO: 454157 - DNA, 3606 bp, Homo sapiens
tgcgcggtcagaggcgcctggagcgagcgaatcctggcccaccgcctgcccaaccgcgtgaccttgattgagttaatgaacttcacgcctcagcgtccaggtctgtaaaatggggtgtctaacgcagaccgtacagcccagctgggtttagcaaacttccgggagccagttggagcctctccccatccctagcggtgatcccaggtgacgacatgccgcggggggtcctgcggaggccaccctagggcgttgctgctgcctttgggagtgtggagctccaaaccatgtcgcgagaggcggattttgggaggccgggatcctcgcgccagggggatgtgcgagggtgtgggataaatcttaattcctccggcccacccaaagcctggaaatccagcctccgcgcctcttgccctgcgggccccgccctcagtcccgccctcatctaacccgctaccccattggtggcgtccggcggcgcggctgctgttatttttcgaatatataaggaggtggaagtggcagctgcaactagaggcttccctggctggtgcctgagcccggcgtccctcgccccccgccctccccgcatccctctcctccctcgcgcctggccctgtggctcttcctccctccctccttccccccccccccacccctcgcccgctgcctccctcggcccagccagctgtgccggcgtttgttggctgccctgcgcccggccctccagccagccttctgccggccccgccgcgatggaggtgccccagccggagcccgcgccaggctcggctctcagtccagcaggcgtgtgcggtggcgcccagcgtccgggccacctcccgggcctcctgctgggatctcatggcctcctggggtccccggtgcgggcggccgcttcctcgccggtcaccaccctcacccagaccatgcacgacctcgccgggctcggcagcgaaaccccaaagagtcaggtagggaccctgctcttccgcagccgcagccgcctgacgcacctatccctgtctcgacgggcatccgaatcctccctgtcgtctgaatcctccgaatcttctgatgcaggtctctgcatggattcccccagccctatggacccccacatggcggagcagacgtttgaacaggccatccaggcagccagccggatcattcgaaacgagcagtttgccatcagacgcttccagtctatgccggtgaggctgctgggccacagccccgtgcttcggaacatcaccaactcccaggcgcccgacggccggaggaagagcgaggcgggcagtggagctgccagcagctctggggaagacaaggagaatgatggatttgtcttcaagatgccatggaagcccacacatcccagctccacccatgctctggcagagtgggccagccgcagggaagcctttgcccagagacccagctcggcccccgacctgatgtgtctcagtcctgaccggaagatggaagtggaggagctcagccccctggccctaggtcgcttctctctgacccctgcagagggggatactgaggaagatgatggatttgtggacatcctagagagtgacttaaaggatgatgatgcagttcccccaggcatggagagtctcattagtgccccactggtcaagaccttggaaaaggaagaggaaaaggacctcgtcatgtacagcaagtgccagcggctcttccgctctccgtccatgccctgcagcgtgatccggcccatcctcaagaggctggagcggccccaggacagggacacgcccgtgcagaataagcggaggcggagcgtgacccctcctgaggagcagcaggaggctgaggaacctaaagcccgcgtcctccgctcaaaatcactgtgtcacgatgagatcgagaacctcctggacagtgaccaccgagagctgattggagattactctaaggccttcctcctacagacagtagacggaaagcaccaagacctcaagtacatctcaccagaaacgatggtggccctattgacgggcaagttcagcaacatcgtggataagtttgtgattgtagactgcagatacccctatgaatatgaaggcgggcacatcaagactgcggtgaacttgcccctggaacgcgacgccgagagcttcctactgaagagccccatcgcgccctgtagcctggacaagagagtcatcctcattttccactgtgaattctcatctgagcgtgggccccgcatgtgccgtttcatcagggaacgagaccgtgctgtcaacgactaccccagcctctactaccctgagatgtatatcctgaaaggcggctacaaggagttcttccctcagcacccgaacttctgtgaaccccaggactaccggcccatgaaccacgaggccttcaaggatgagctaaagaccttccgcctcaagactcgcagctgggctggggagcggagccggcgggagctctgtagccggctgcaggaccagtgaggggcctgcgccagtcctgctacctcccttgcctttcgaggcctgaagccagctgccctatgggcctgccgggctgagggcctgctggaggcctcaggtgctgtccatgggaaagatggtgtgggtgtcctgcctgtctgccccagcccagattcccctgtgtcatcccatcattttccatatcctggtgccccccacccctggaagagcccagtctgttgagttagttaagttgggttaataccagcttaaaggcagtattttgtgtcctccaggagcttcttgtttccttgttagggttaacccttcatcttcctgtgtcctgaaacgctcctttgtgtgtgtgtcagctgaggctgggggagagccgtggtccctgaggatgggtcagagctaaactccttcctggcctgagagtcagctctctgccctgtgtacttcccgggccagggctgcccctaatctctgtaggaaccgtggtatgtctgccatgttgcccctttctcttttcccctttcctgtcccaccatacgagcacctccagcctgaacagaagctcttactctttcctatttcagtgttacctgtgtgcttggtctgtttgactttacgcccatctcaggacacttccgtagactgtttaggttcccctgtcaaatatcagttacccactcggtcccagttttgttgccccagaaagggatgttattatccttgggggctcccagggcaagggttaaggcctgaatcatgagcctgctggaagcccagcccctactgctgtgaaccctggggcctgactgctcagaacttgctgctgtcttgttgcggatggatggaaggttggatggatgggtggatggccgtggatggccgtggatgcgcagtgccttgcatacccaaaccaggtgggagcgttttgttgagcatgacagcctgcagcaggaatatatgtgtgcctatttgtggaaatgtcacagaagcagctaaaccaaggactgagcaccctctggattctgaatctcaagatgggggcagggctgtgcttgaaggccctgctgagtcatctgttagggccttggttcaataaagcactgagcaagttgagaaa

SEQ ID NO: 454158 - DNA, 3613 bp, Homo sapiens
tgcgcggtcagaggcgcctggagcgagcgaatcctggcccaccgcctgcccaaccgcgtgaccttgattgagttaatgaacttcacgcctcagcgtccaggtctgtaaaatggggtgtctaacgcagaccgtacagcccagctgggtttagcaaacttccgggagccagttggagcctctccccatccctagcggtgatcccaggtgacgacatgccgcggggggtcctgcggaggccaccctagggcgttgctgctgcctttgggagtgtggagctccaaaccatgtcgcgagaggcggattttgggaggccgggatcctcgcgccagggggatgtgcgagggtgtgggataaatcttaattcctccggcccacccaaagcctggaaatccagcctccgcgcctcttgccctgcgggccccgccctcagtcccgccctcatctaacccgctaccccattggtggcgtccggcggcgcggctgctgttatttttcgaatatataaggaggtggaagtggcagctgcaactagaggcttccctggctggtgcctgagcccggcgtccctcgccccccgccctccccgcatccctctcctccctcgcgcctggccctgtggctcttcctccctccctccttccccccccccccacccctcgcccgctgcctccctcggcccagccagctgtgccggcgtttgttggctgccctgcgcccggccctccagccagccttctgccggccccgccgcgatggaggtgccccagccggagcccgcgccaggctcggctctcagtccagcaggcgtgtgcggtggcgcccagcgtccgggccacctcccgggcctcctgctgggatctcatggcctcctggggtccccggtgcgggcggccgcttcctcgccggtcaccaccctcacccagaccatgcacgacctcgccgggctcggcagcgaaaccccaaagagtcaggtagggaccctgctcttccgcagccgcagccgcctgacgcacctatccctgtctcgacgggcatccgaatcctccctgtcgtctgaatcctccgaatcttctgatgcaggtctctgcatggattcccccagccctatggacccccacatggcggagcagacgtttgaacaggccatccaggcagccagccggatcattcgaaacgagcagtttgccatcagacgcttccagtctatgccggtgaggctgctgggccacagccccgtgcttcggaacatcaccaactcccaggcgcccgacggccggaggaagagcgaggcgggcagtggagctgccagcagctctggggaagacaaggagaatgatggatttgtcttcaagatgccatggaagcccacacatcccagctccacccatgctctggcagagtgggccagccgcagggaagcctttgcccagagacccagctcggcccccgacctgatgtgtctcagtcctgaccggaagatggaagtggaggagctcagccccctggccctaggtcgcttctctctgacccctgcagagggggatactgaggaagatgatggatttgtggacatcctagagagtgacttaaaggatgatgatgcagttcccccaggcatggagagtctcattagtgccccactggtcaagaccttggaaaaggaagaggaaaaggacctcgtcatgtacagcaagtgccagcggctcttccgctctccgtccatgccctgcagcgtgatccggcccatcctcaagaggctggagcggccccaggacagggacacgcccgtgcagaataagcggaggcggagcgtgacccctcctgaggagcagcaggaggctgaggaacctaaagcccgcgtcctccgctcaaaatcactgtgtcacgatgagatcgagaacctcctggacagtgaccaccgagagctgattggagattactctaaggccttcctcctacagacagtagacggaaagcaccaagacctcaagtacatctcaccagaaacgatggtggccctattgacgggcaagttcagcaacatcgtggataagtttgtgattgtagactgcagatacccctatgaatatgaaggcgggcacatcaagactgcggtgaacttgcccctggaacgcgacgccgagagcttcctactgaagagccccatcgcgccctgtagcctggacaagagagtcatcctcattttccactgtgaattctcatctgagcgtgggccccgcatgtgccgtttcatcagggaacgagaccgtgctgtcaacgactaccccagcctctactaccctgagatgtatatcctgaaaggcggctacaaggagttcttccctcagcacccgaacttctgtgaaccccaggactaccggcccatgaaccacgaggccttcaaggatgagctaaagaccttccgcctcaagactcgcagctgggctggggagcggagccggcgggagctctgtagccggctgcaggaccagtgaggggcctgcgccagtcctgctacctcccttgcctttcgaggcctgaagccagctgccctatgggcctgccgggctgagggcctgctggaggcctcaggtgctgtccatgggaaagatggtgtgggtgtcctgcctgtctgccccagcccagattcccctgtgtcatcccatcattttccatatcctggtgccccccacccctggaagagcccagtctgttgagttagttaagttgggttaataccagcttaaaggcagtattttgtgtcctccaggagcttcttgtttccttgttagggttaacccttcatcttcctgtgtcctgaaacgctcctttgtgtgtgtgtcagctgaggctgggggagagccgtggtccctgaggatgggtcagagctaaactccttcctggcctgagagtcagctctctgccctgtgtacttcccgggccagggctgcccctaatctctgtaggaaccgtggtatgtctgccatgttgcccctttctcttttcccctttcctgtcccaccatacgagcacctccagcctgaacagaagctcttactctttcctatttcagtgttacctgtgtgcttggtctgtttgactttacgcccatctcaggacacttccgtagactgtttaggttcccctgtcaaatatcagttacccactcggtcccagttttgttgccccagaaagggatgttattatccttgggggctcccagggcaagggttaaggcgctgtgaaccctggggcctgactgctcagaacttgctgctgtcttgttgcggatggatggaaggttggatggatgggtggatggccgtggatggccgtggatgcgcagtgccttgcatacccaaaccaggtgggagcgttttgttgagcatgacagcctgcagcaggaatatatgtgtgcctatttgtgtggacaaaaatatttacacttagggtttggagctattcaagaggaaatgtcacagaagcagctaaaccaaggactgagcaccctctggattctgaatctcaagatgggggcagggctgtgcttgaaggccctgctgagtcatctgttagggccttggttcaataaagcactgagcaagttgagaaa

SEQ ID NO: 454159 - DNA, 3525 bp, Homo sapiens
tgcgcggtcagaggcgcctggagcgagcgaatcctggcccaccgcctgcccaaccgcgtgaccttgattgagttaatgaacttcacgcctcagcgtccaggtctgtaaaatggggtgtctaacgcagaccgtacagcccagctgggtttagcaaacttccgggagccagttggagcctctccccatccctagcggtgatcccaggtgacgacatgccgcggggggtcctgcggaggccaccctagggcgttgctgctgcctttgggagtgtggagctccaaaccatgtcgcgagaggcggattttgggaggccgggatcctcgcgccagggggatgtgcgagggtgtgggataaatcttaattcctccggcccacccaaagcctggaaatccagcctccgcgcctcttgccctgcgggccccgccctcagtcccgccctcatctaacccgctaccccattggtggcgtccggcggcgcggctgctgttatttttcgaatatataaggaggtggaagtggcagctgcaactagaggcttccctggctggtgcctgagcccggcgtccctcgccccccgccctccccgcatccctctcctccctcgcgcctggccctgtggctcttcctccctccctccttccccccccccccacccctcgcccgctgcctccctcggcccagccagctgtgccggcgtttgttggctgccctgcgcccggccctccagccagccttctgccggccccgccgcgatggaggtgccccagccggagcccgcgccaggctcggctctcagtccagcaggcgtgtgcggtggcgcccagcgtccgggccacctcccgggcctcctgctgggatctcatggcctcctggggtccccggtgcgggcggccgcttcctcgccggtcaccaccctcacccagaccatgcacgacctcgccgggctcggcagcgaaaccccaaagagtcaggtagggaccctgctcttccgcagccgcagccgcctgacgcacctatccctgtctcgacgggcatccgaatcctccctgtcgtctgaatcctccgaatcttctgatgcaggtctctgcatggattcccccagccctatggacccccacatggcggagcagacgtttgaacaggccatccaggcagccagccggatcattcgaaacgagcagtttgccatcagacgcttccagtctatgccggtgaggctgctgggccacagccccgtgcttcggaacatcaccaactcccaggcgcccgacggccggaggaagagcgaggcgggcagtggagctgccagcagctctggggaagacaaggagaatgatggatttgtcttcaagatgccatggaagcccacacatcccagctccacccatgctctggcagagtgggccagccgcagggaagcctttgcccagagacccagctcggcccccgacctgatgtgtctcagtcctgaccggaagatggaagtggaggagctcagccccctggccctaggtcgcttctctctgacccctgcagagggggatactgaggaagatgatggatttgtggacatcctagagagtgacttaaaggatgatgatgcagttcccccaggcatggagagtctcattagtgccccactggtcaagaccttggaaaaggaagaggaaaaggacctcgtcatgtacagcaagtgccagcggctcttccgctctccgtccatgccctgcagcgtgatccggcccatcctcaagaggctggagcggccccaggacagggacacgcccgtgcagaataagcggaggcggagcgtgacccctcctgaggagcagcaggaggctgaggaacctaaagcccgcgtcctccgctcaaaatcactgtgtcacgatgagatcgagaacctcctggacagtgaccaccgagagctgattggagattactctaaggccttcctcctacagacagtagacggaaagcaccaagacctcaagtacatctcaccagaaacgatggtggccctattgacgggcaagttcagcaacatcgtggataagtttgtgattgtagactgcagatacccctatgaatatgaaggcgggcacatcaagactgcggtgaacttgcccctggaacgcgacgccgagagcttcctactgaagagccccatcgcgccctgtagcctggacaagagagtcatcctcattttccactgtgaattctcatctgagcgtgggccccgcatgtgccgtttcatcagggaacgagaccgtgctgtcaacgactaccccagcctctactaccctgagatgtatatcctgaaaggcggctacaaggagttcttccctcagcacccgaacttctgtgaaccccaggactaccggcccatgaaccacgaggccttcaaggatgagctaaagaccttccgcctcaagactcgcagctgggctggggagcggagccggcgggagctctgtagccggctgcaggaccagtgaggggcctgcgccagtcctgctacctcccttgcctttcgaggcctgaagccagctgccctatgggcctgccgggctgagggcctgctggaggcctcaggtgctgtccatgggaaagatggtgtgggtgtcctgcctgtctgccccagcccagattcccctgtgtcatcccatcattttccatatcctggtgccccccacccctggaagagcccagtctgttgagttagttaagttgggttaataccagcttaaaggcagtattttgtgtcctccaggagcttcttgtttccttgttagggttaacccttcatcttcctgtgtcctgaaacgctcctttgtgtgtgtgtcagctgaggctgggggagagccgtggtccctgaggatgggtcagagctaaactccttcctggcctgagagtcagctctctgccctgtgtacttcccgggccagggctgcccctaatctctgtaggaaccgtggtatgtctgccatgttgcccctttctcttttcccctttcctgtcccaccatacgagcacctccagcctgaacagaagctcttactctttcctatttcagtgttacctgtgtgcttggtctgtttgactttacgcccatctcaggacacttccgtagactgtttaggttcccctgtcgctgtgaaccctggggcctgactgctcagaacttgctgctgtcttgttgcggatggatggaaggttggatggatgggtggatggccgtggatggccgtggatgcgcagtgccttgcatacccaaaccaggtgggagcgttttgttgagcatgacagcctgcagcaggaatatatgtgtgcctatttgtgtggacaaaaatatttacacttagggtttggagctattcaagaggaaatgtcacagaagcagctaaaccaaggactgagcaccctctggattctgaatctcaagatgggggcagggctgtgcttgaaggccctgctgagtcatctgttagggccttggttcaataaagcactgagcaagttgagaaa

SEQ ID NO: 454160 - DNA, 3260 bp, Homo sapiens
tgcgcggtcagaggcgcctggagcgagcgaatcctggcccaccgcctgcccaaccgcgtgaccttgattgagttaatgaacttcacgcctcagcgtccaggtctgtaaaatggggtgtctaacgcagaccgtacagcccagctgggtttagcaaacttccgggagccagttggagcctctccccatccctagcggtgatcccaggtgacgacatgccgcggggggtcctgcggaggccaccctagggcgttgctgctgcctttgggagtgtggagctccaaaccatgtcgcgagaggcggattttgggaggccgggatcctcgcgccagggggatgtgcgagggtgtgggataaatcttaattcctccggcccacccaaagcctggaaatccagcctccgcgcctcttgccctgcgggccccgccctcagtcccgccctcatctaacccgctaccccattggtggcgtccggcggcgcggctgctgttatttttcgaatatataaggaggtggaagtggcagctgcaactagaggcttccctggctggtgcctgagcccggcgtccctcgccccccgccctccccgcatccctctcctccctcgcgcctggccctgtggctcttcctccctccctccttccccccccccccacccctcgcccgctgcctccctcggcccagccagctgtgccggcgtttgttggctgccctgcgcccggccctccagccagccttctgccggccccgccgcgatggaggtgccccagccggagcccgcgccaggctcggctctcagtccagcaggcgtgtgcggtggcgcccagcgtccgggccacctcccgggcctcctgctgggatctcatggcctcctggggtccccggtgcgggcggccgcttcctcgccggtcaccaccctcacccagaccatgcacgacctcgccgggctcggcagcgaaaccccaaagagtcaggtagggaccctgctcttccgcagccgcagccgcctgacgcacctatccctgtctcgacgggcatccgaatcctccctgtcgtctgaatcctccgaatcttctgatgcaggtctctgcatggattcccccagccctatggacccccacatggcggagcagacgtttgaacaggccatccaggcagccagccggatcattcgaaacgagcagtttgccatcagacgcttccagtctatgccggtgaggctgctgggccacagccccgtgcttcggaacatcaccaactcccaggcgcccgacggccggaggaagagcgaggcgggcagtggagctgccagcagctctggggaagacaaggagaatgatggatttgtcttcaagatgccatggaagcccacacatcccagctccacccatgctctggcagagtgggccagccgcagggaagcctttgcccagagacccagctcggcccccgacctgatgtgtctcagtcctgaccggaagatggaagtggaggagctcagccccctggccctaggtcgcttctctctgacccctgcagagggggatactgaggaagatgatggatttgtggacatcctagagagtgacttaaaggatgatgatgcagttcccccaggcatggagagtctcattagtgccccactggtcaagaccttggaaaaggaagaggaaaaggacctcgtcatgtacagcaagtgccagcggctcttccgctctccgtccatgccctgcagcgtgatccggcccatcctcaagaggctggagcggccccaggacagggacacgcccgtgcagaataagcggaggcggagcgtgacccctcctgaggagcagcaggaggctgaggaacctaaagcccgcgtcctccgctcaaaatcactgtgtcacgatgagatcgagaacctcctggacagtgaccaccgagagctgattggagattactctaaggccttcctcctacagacagtagacggaaagcaccaagacctcaagtacatctcaccagaaacgatggtggccctattgacgggcaagttcagcaacatcgtggataagtttgtgattgtagactgcagatacccctatgaatatgaaggcgggcacatcaagactgcggtgaacttgcccctggaacgcgacgccgagagcttcctactgaagagccccatcgcgccctgtagcctggacaagagagtcatcctcattttccactgtgaattctcatctgagcgtgggccccgcatgtgccgtttcatcagggaacgagaccgtgctgtcaacgactaccccagcctctactaccctgagatgtatatcctgaaaggcggctacaaggagttcttccctcagcacccgaacttctgtgaaccccaggactaccggcccatgaaccacgaggccttcaaggatgagctaaagaccttccgcctcaagactcgcagctgggctggggagcggagccggcgggagctctgtagccggctgcaggaccagtgaggggcctgcgccagtcctgctacctcccttgcctttcgaggcctgaagccagctgccctatgggcctgccgggctgagggcctgctggaggcctcaggtgctgtccatgggaaagatggtgtgggtgtcctgcctgtctgccccagcccagattcccctgtgtcatcccatcattttccatatcctggtgccccccacccctggaagagcccagtctgttgagttagttaagttgggttaataccagcttaaaggcagtattttgtgtcctccaggagcttcttgtttccttgttagggttaacccttcatcttcctgtgtcctgaaacgctcctttgtgtgtgtgtcagctgaggctgggggagagccgtggtccctgaggatgggtcagagctaaactccttcctggcctgagagtcagctctctgccctgtgtacttcccgggccagggctgcccctaatctctgtaggaaccgtggatggccgtggatgcgcagtgccttgcatacccaaaccaggtgggagcgttttgttgagcatgacagcctgcagcaggaatatatgtgtgcctatttgtgtggacaaaaatatttacacttagggtttggagctattcaagaggaaatgtcacagaagcagctaaaccaaggactgagcaccctctggattctgaatctcaagatgggggcagggctgtgcttgaaggccctgctgagtcatctgttagggccttggttcaataaagcactgagcaagttgagaaa

SEQ ID NO: 454161 - DNA, 1804 bp, Homo sapiens
tgcgcggtcagaggcgcctggagcgagcgaatcctggcccaccgcctgcccaaccgcgtgaccttgattgagttaatgaacttcacgcctcagcgtccaggtctgtaaaatggggtgtctaacgcagaccgtacagcccagctgggtttagcaaacttccgggagccagttggagcctctccccatccctagcggtgatcccaggtgacgacatgccgcggggggtcctgcggaggccaccctagggcgttgctgctgcctttgggagtgtggagctccaaaccatgtcgcgagaggcggattttgggaggccgggatcctcgcgccagggggatgtgcgagggtgtgggataaatcttaattcctccggcccacccaaagcctggaaatccagcctccgcgcctcttgccctgcgggccccgccctcagtcccgccctcatctaacccgctaccccattggtggcgtccggcggcgcggctgctgttatttttcgaatatataaggaggtggaagtggcagctgcaactagaggcttccctggctggtgcctgagcccggcgtccctcgccccccgccctccccgcatccctctcctccctcgcgcctggccctgtggctcttcctccctccctccttccccccccccccacccctcgcccgctgcctccctcggcccagccagctgtgccggcgtttgttggctgccctgcgcccggccctccagccagccttctgccggccccgccgcgatggaggtgccccagccggagcccgcgccaggctcggctctcagtccagcaggcgtgtgcggtggcgcccagcgtccgggccacctcccgggcctcctgctgggatctcatggcctcctggggtccccggtgcgggcggccgcttcctcgccggtcaccaccctcacccagaccatgcacgacctcgccgggctcggcagcgaaaccccaaagagtcaggtagggaccctgctcttccgcagccgcagccgcctgacgcacctatccctgtctcgacgggcatccgaatcctccctgtcgtctgaatcctccgaatcttctgatgcaggtctctgcatggattcccccagccctatggacccccacatggcggagcagacgtttgaacaggccatccaggcagccagccggatcattcgaaacgagcagtttgccatcagacgcttccagtctatgccggtgaggctgctgggccacagccccgtgcttcggaacatcaccaactcccaggcgcccgacggccggaggaagagcgaggcgggcagtggagctgccagcagctctggggaagacaaggagaatgatggatttgtcttcaagatgccatggaagcccacacatcccagctccacccatgctctggcagagtgggccagccgcagggaagcctttgcccagagacccagctcggcccccgacctgatgtgtctcagtcctgaccggaagatggaagtggaggagctcagccccctggccctaggtcgcttctctctgacccctgcagagggggatactgaggaagatgatggatttgtggacatcctagagagtgacttaaagggcttgtgtgtgtcactgtatagagaataagttgtatgtggaaacaggaggagaaaggaagggacccaaggcatgagccaccattttggtttcccagggtggcccacgccccgacttacccactccggaggcctgctgggcagcgttggtagctggccagaccaagccagagaagcccagtaacccaaccagcactccagtgtcctgcctcc

SEQ ID NO: 454162 - DNA, 297 bp, Homo sapiens
cagtgaccaccgagagctgattggagattactctaaggtacctgcagcagcgaagggggtaccttgggggcttgacctcttactgactaggggtcctctagcccaggggctgcttgggttcctccctttctccccggagccccccttttctttgtcctttgtatcttttcatcctttgttctcacatagactcctccctctggccctccttgtctcctgactccacctcaagtcagtccaggcatctgttgagtctccgtcttatttccaagctcatacctagcttggaaccccctc

SEQ ID NO: 454163 - DNA, 3060 bp, Homo sapiens
ggcacgaggaagacaaaaaaaaaataagcgtaacttccctcaaagcaacaacccccccccccacccctcgcccgctgcctccctcggcccagccagctgtgccggcgtttgttggctgccctgcgcccggccctccagccagccttctgccggccccgccgcgatggaggtgccccagccggagcccgcgccaggctcggctctcagtccagcaggcgtgtgcggtggcgcccagcgtccgggccacctcccgggcctcctgctgggatctcatggcctcctggggtccccggtgcgggcggccgcttcctcgccggtcaccaccctcacccagaccatgcacgacctcgccgggctcggcagcgaaaccccaaagagtcaggtagggaccctgctcttccgcagccgcagccgcctgacgcacctatccctgtctcgacgggcatccgaatcctccctgtcgtctgaatcctccgaatcttctgatgcaggtctctgcatggattcccccagccctatggacccccacatggcggagcagacgtttgaacaggccatccaggcagccagccggatcattcgaaacgagcagtttgccatcagacgcttccagtctatgccggtgaggctgctgggccacagccccgtgcttcggaacatcaccaactcccaggcgcccgacggccggaggaagagcgaggcgggcagtggagctgccagcagctctggggaagacaaggagaatgatggatttgtcttcaagatgccatggaagcccacacatcccagctccacccatgctctggcagagtgggccagccgcagggaagcctttgcccagagacccagctcggcccccgacctgatgtgtctcagtcctgaccggaagatggaagtggaggagctcagccccctggccctaggtcgcttctctctgacccctgcagagggggatactgaggaagatgatggatttgtggacatcctagagagtgacttaaaggatgatgatgcagttcccccaggcatggagagtctcattagtgccccactggtcaagaccttggaaaaggaagaggaaaaggacctcgtcatgtacagcaagtgccagcggctcttccgctctccgtccatgccctgcagcgtgatccggcccatcctcaagaggctggagcggccccaggacagggacacgcccgtgcagaataagcggaggcggagcgtgacccctcctgaggagcagcaggaggctgaggaacctaaagcccgcgtcctccgctcaaaatcactgtgtcacgatgagatcgagaacctcctggacagtgaccaccgagagctgattggagattactctaaggccttcctcctacagacagtagacggaaagcaccaagacctcaagtacatctcaccagaaacgatggtggccctattgacgggcaagttcagcaacatcgtggataagtttgtgattgtagactgcagatacccctatgaatatgaaggcgggcacatcaagactgcggtgaacttgcccctggaacgcgacgccgagagcttcctactgaagagccccatcgcgccctgtagcctggacaagagagtcatcctcattttccactgtgaattctcatctgagcgtgggccccgcatgtgccgtttcatcagggaacgagaccgtgctgtcaacgactaccccagcctctactaccctgagatgtatatcctgaaaggcggctacaaggagttcttccctcagcacccgaacttctgtgaaccccaggactaccggcccatgaaccacgaggccttcaaggatgagctaaagaccttccgcctcaagactcgcagctgggctggggagcggagccggcgggagctctgtagccggctgcaggaccagtgaggggcctgcgccagtcctgctacctcccttgcctttcgaggcctgaagccagctgccctatgggcctgccgggctgagggcctgctggaggcctcaggtgctgtccatgggaaagatggtgtgggtgtcctgcctgtctgccccagcccagattcccctgtgtcatcccatcattttccatatcctggtgccccccacccctggaagagcccagtctgttgagttagttaagttgggttaataccagcttaaaggcagtattttgtgtcctccaggagcttcttgtttccttgttagggttaacccttcatcttcctgtgtcctgaaacgctcctttgtgtgtgtgtcagctgaggctgggggagagccgtggtccctgaggatgggtcagagctaaactccttcctggcctgagagtcagctctctgccctgtgtacttcccgggccagggctgcccctaatctctgtaggaaccgtggtatgtctgccatgttgcccctttctcttttcccctttcctgtcccaccatacgagcacctccagcctgaacagaagctcttactctttcctatttcagtgttacctgtgtgcttggtctgtttgactttacgcccatctcaggacacttccgtagactgtttaggttcccctgtcaaatatcagttacccactcggtcccagttttgttgccccagaaagggatgttattatccttgggggctcccagggcaagggttaaggcctgaatcatgagcctgctggaagcccagcccctactgctgtgaaccctggggcctgactgctcagaacttgctgctgtcttgttgcggatggatggaaggttggatggatgggtggatggccgtggatggccgtggatgcgcagtgccttgcatacccaaaccaggtgggagcgttttgttgagcatgacagcctgcagcaggaatatatgtgtgcctatttgtgtggacaaaaatatttacacttagggtttggagctattcaagaggaaatgtcacagaagcagctaaaccaaggactgagcaccctctggattctgaatctcaagatgggggcagggctgtgcttgaaggccctgctgagtcatctgttagggccttggttcaataaagcactgagcaagttgagaaa

SEQ ID NO: 454164 - DNA, 3607 bp, Homo sapiens
tgcgcggtcagaggcgcctggagcgagcgaatcctggcccaccgcctgcccaaccgcgtgaccttgattgagttaatgaacttcacgcctcagcgtccaggtctgtaaaatggggtgtctaacgcagaccgtacagcccagctgggtttagcaaacttccgggagccagttggagcctctccccatccctagcggtgatcccaggtgacgacatgccgcggggggtcctgcggaggccaccctagggcgttgctgctgcctttgggagtgtggagctccaaaccatgtcgcgagaggcggattttgggaggccgggatcctcgcgccagggggatgtgcgagggtgtgggataaatcttaattcctccggcccacccaaagcctggaaatccagcctccgcgcctcttgccctgcgggccccgccctcagtcccgccctcatctaacccgctaccccattggtggcgtccggcggcgcggctgctgttatttttcgaatatataaggaggtggaagtggcagctgcaactagaggcttccctggctggtgcctgagcccggcgtccctcgccccccgccctccccgcatccctctcctccctcgcgcctggccctgtggctcttcctccctccctccttccccccccccccacccctcgcccgctgcctccctcggcccagccagctgtgccggcgtttgttggctgccctgcgcccggccctccagccagccttctgccggccccgccgcgatggaggtgccccagccggagcccgcgccaggctcggctctcagtccagcaggcgtgtgcggtggcgcccagcgtccgggccacctcccgggcctcctgctgggatctcatggcctcctggggtccccggtgcgggcggccgcttcctcgccggtcaccaccctcacccagaccatgcacgacctcgccgggctcggcagccgcagccgcctgacgcacctatccctgtctcgacgggcatccgaatcctccctgtcgtctgaatcctccgaatcttctgatgcaggtctctgcatggattcccccagccctatggacccccacatggcggagcagacgtttgaacaggccatccaggcagccagccggatcattcgaaacgagcagtttgccatcagacgcttccagtctatgccggtgaggctgctgggccacagccccgtgcttcggaacatcaccaactcccaggcgcccgacggccggaggaagagcgaggcgggcagtggagctgccagcagctctggggaagacaaggagaatgatggatttgtcttcaagatgccatggaagcccacacatcccagctccacccatgctctggcagagtgggccagccgcagggaagcctttgcccagagacccagctcggcccccgacctgatgtgtctcagtcctgaccggaagatggaagtggaggagctcagccccctggccctaggtcgcttctctctgacccctgcagagggggatactgaggaagatgatggatttgtggacatcctagagagtgacttaaaggatgatgatgcagttcccccaggcatggagagtctcattagtgccccactggtcaagaccttggaaaaggaagaggaaaaggacctcgtcatgtacagcaagtgccagcggctcttccgctctccgtccatgccctgcagcgtgatccggcccatcctcaagaggctggagcggccccaggacagggacacgcccgtgcagaataagcggaggcggagcgtgacccctcctgaggagcagcaggaggctgaggaacctaaagcccgcgtcctccgctcaaaatcactgtgtcacgatgagatcgagaacctcctggacagtgaccaccgagagctgattggagattactctaaggccttcctcctacagacagtagacggaaagcaccaagacctcaagtacatctcaccagaaacgatggtggccctattgacgggcaagttcagcaacatcgtggataagtttgtgattgtagactgcagatacccctatgaatatgaaggcgggcacatcaagactgcggtgaacttgcccctggaacgcgacgccgagagcttcctactgaagagccccatcgcgccctgtagcctggacaagagagtcatcctcattttccactgtgaattctcatctgagcgtgggccccgcatgtgccgtttcatcagggaacgagaccgtgctgtcaacgactaccccagcctctactaccctgagatgtatatcctgaaaggcggctacaaggagttcttccctcagcacccgaacttctgtgaaccccaggactaccggcccatgaaccacgaggccttcaaggatgagctaaagaccttccgcctcaagactcgcagctgggctggggagcggagccggcgggagctctgtagccggctgcaggaccagtgaggggcctgcgccagtcctgctacctcccttgcctttcgaggcctgaagccagctgccctatgggcctgccgggctgagggcctgctggaggcctcaggtgctgtccatgggaaagatggtgtgggtgtcctgcctgtctgccccagcccagattcccctgtgtcatcccatcattttccatatcctggtgccccccacccctggaagagcccagtctgttgagttagttaagttgggttaataccagcttaaaggcagtattttgtgtcctccaggagcttcttgtttccttgttagggttaacccttcatcttcctgtgtcctgaaacgctcctttgtgtgtgtgtcagctgaggctgggggagagccgtggtccctgaggatgggtcagagctaaactccttcctggcctgagagtcagctctctgccctgtgtacttcccgggccagggctgcccctaatctctgtaggaaccgtggtatgtctgccatgttgcccctttctcttttcccctttcctgtcccaccatacgagcacctccagcctgaacagaagctcttactctttcctatttcagtgttacctgtgtgcttggtctgtttgactttacgcccatctcaggacacttccgtagactgtttaggttcccctgtcaaatatcagttacccactcggtcccagttttgttgccccagaaagggatgttattatccttgggggctcccagggcaagggttaaggcctgaatcatgagcctgctggaagcccagcccctactgctgtgaaccctggggcctgactgctcagaacttgctgctgtcttgttgcggatggatggaaggttggatggatgggtggatggccgtggatggccgtggatgcgcagtgccttgcatacccaaaccaggtgggagcgttttgttgagcatgacagcctgcagcaggaatatatgtgtgcctatttgtgtggacaaaaatatttacacttagggtttggagctattcaagaggaaatgtcacagaagcagctaaaccaaggactgagcaccctctggattctgaatctcaagatgggggcagggctgtgcttgaaggccctgctgagtcatctgttagggccttggttcaataaagcactgagcaagttgagaaa

SEQ ID NO: 454165 - DNA, 3526 bp, Homo sapiens
tgcgcggtcagaggcgcctggagcgagcgaatcctggcccaccgcctgcccaaccgcgtgaccttgattgagttaatgaacttcacgcctcagcgtccaggtctgtaaaatggggtgtctaacgcagaccgtacagcccagctgggtttagcaaacttccgggagccagttggagcctctccccatccctagcggtgatcccaggtgacgacatgccgcggggggtcctgcggaggccaccctagggcgttgctgctgcctttgggagtgtggagctccaaaccatgtcgcgagaggcggattttgggaggccgggatcctcgcgccagggggatgtgcgagggtgtgggataaatcttaattcctccggcccacccaaagcctggaaatccagcctccgcgcctcttgccctgcgggccccgccctcagtcccgccctcatctaacccgctaccccattggtggcgtccggcggcgcggctgctgttatttttcgaatatataaggaggtggaagtggcagctgcaactagaggcttccctggctggtgcctgagcccggcgtccctcgccccccgccctccccgcatccctctcctccctcgcgcctggccctgtggctcttcctccctccctccttccccccccccccacccctcgcccgctgcctccctcggcccagccagctgtgccggcgtttgttggctgccctgcgcccggccctccagccagccttctgccggccccgccgcgatggaggtgccccagccggagcccgcgccaggctcggctctcagtccagcaggcgtgtgcggtggcgcccagcgtccgggccacctcccgggcctcctgctgggatctcatggcctcctggggtccccggtgcgggcggccgcttcctcgccggtcaccaccctcacccagaccatgcacgacctcgccgggctcggcagcgaaaccccaaagagtcaggtagggaccctgctcttccgcagccgcagccgcctgacgcacctatccctgtctcgacgggcatccgaatcctccctgtcgtctgaatcctccgaatcttctgatgcaggtctctgcatggattcccccagccctatggacccccacatggcggagcagacgtttgaacaggccatccaggcagccagccggatcattcgaaacgagcagtttgccatcagacgcttccagtctatgccggatggatttgtcttcaagatgccatggaagcccacacatcccagctccacccatgctctggcagagtgggccagccgcagggaagcctttgcccagagacccagctcggcccccgacctgatgtgtctcagtcctgaccggaagatggaagtggaggagctcagccccctggccctaggtcgcttctctctgacccctgcagagggggatactgaggaagatgatggatttgtggacatcctagagagtgacttaaaggatgatgatgcagttcccccaggcatggagagtctcattagtgccccactggtcaagaccttggaaaaggaagaggaaaaggacctcgtcatgtacagcaagtgccagcggctcttccgctctccgtccatgccctgcagcgtgatccggcccatcctcaagaggctggagcggccccaggacagggacacgcccgtgcagaataagcggaggcggagcgtgacccctcctgaggagcagcaggaggctgaggaacctaaagcccgcgtcctccgctcaaaatcactgtgtcacgatgagatcgagaacctcctggacagtgaccaccgagagctgattggagattactctaaggccttcctcctacagacagtagacggaaagcaccaagacctcaagtacatctcaccagaaacgatggtggccctattgacgggcaagttcagcaacatcgtggataagtttgtgattgtagactgcagatacccctatgaatatgaaggcgggcacatcaagactgcggtgaacttgcccctggaacgcgacgccgagagcttcctactgaagagccccatcgcgccctgtagcctggacaagagagtcatcctcattttccactgtgaattctcatctgagcgtgggccccgcatgtgccgtttcatcagggaacgagaccgtgctgtcaacgactaccccagcctctactaccctgagatgtatatcctgaaaggcggctacaaggagttcttccctcagcacccgaacttctgtgaaccccaggactaccggcccatgaaccacgaggccttcaaggatgagctaaagaccttccgcctcaagactcgcagctgggctggggagcggagccggcgggagctctgtagccggctgcaggaccagtgaggggcctgcgccagtcctgctacctcccttgcctttcgaggcctgaagccagctgccctatgggcctgccgggctgagggcctgctggaggcctcaggtgctgtccatgggaaagatggtgtgggtgtcctgcctgtctgccccagcccagattcccctgtgtcatcccatcattttccatatcctggtgccccccacccctggaagagcccagtctgttgagttagttaagttgggttaataccagcttaaaggcagtattttgtgtcctccaggagcttcttgtttccttgttagggttaacccttcatcttcctgtgtcctgaaacgctcctttgtgtgtgtgtcagctgaggctgggggagagccgtggtccctgaggatgggtcagagctaaactccttcctggcctgagagtcagctctctgccctgtgtacttcccgggccagggctgcccctaatctctgtaggaaccgtggtatgtctgccatgttgcccctttctcttttcccctttcctgtcccaccatacgagcacctccagcctgaacagaagctcttactctttcctatttcagtgttacctgtgtgcttggtctgtttgactttacgcccatctcaggacacttccgtagactgtttaggttcccctgtcaaatatcagttacccactcggtcccagttttgttgccccagaaagggatgttattatccttgggggctcccagggcaagggttaaggcctgaatcatgagcctgctggaagcccagcccctactgctgtgaaccctggggcctgactgctcagaacttgctgctgtcttgttgcggatggatggaaggttggatggatgggtggatggccgtggatggccgtggatgcgcagtgccttgcatacccaaaccaggtgggagcgttttgttgagcatgacagcctgcagcaggaatatatgtgtgcctatttgtgtggacaaaaatatttacacttagggtttggagctattcaagaggaaatgtcacagaagcagctaaaccaaggactgagcaccctctggattctgaatctcaagatgggggcagggctgtgcttgaaggccctgctgagtcatctgttagggccttggttcaataaagcactgagcaagttgagaaa

SEQ ID NO: 454166 - DNA, 2797 bp, Homo sapiens
tgcgcggtcagaggcgcctggagcgagcgaatcctggcccaccgcctgcccaaccgcgtgaccttgattgagttaatgaacttcacgcctcagcgtccagcgaaaccccaaagagtcaggtagggaccctgctcttccgcagccgcagccgcctgacgcacctatccctgtctcgacgggcatccgaatcctccctgtcgtctgaatcctccgaatcttctgatgcaggtctctgcatggattcccccagccctatggacccccacatggcggagcagacgtttgaacaggccatccaggcagccagccggatcattcgaaacgagcagtttgccatcagacgcttccagtctatgccggtgaggctgctgggccacagccccgtgcttcggaacatcaccaactcccaggcgcccgacggccggaggaagagcgaggcgggcagtggagctgccagcagctctggggaagacaaggagaatgatggatttgtcttcaagatgccatggaagcccacacatcccagctccacccatgctctggcagagtgggccagccgcagggaagcctttgcccagagacccagctcggcccccgacctgatgtgtctcagtcctgaccggaagatggaagtggaggagctcagccccctggccctaggtcgcttctctctgacccctgcagagggggatactgaggaagatgatggatttgtggacatcctagagagtgacttaaaggatgatgatgcagttcccccaggcatggagagtctcattagtgccccactggtcaagaccttggaaaaggaagaggaaaaggacctcgtcatgtacagcaagtgccagcggctcttccgctctccgtccatgccctgcagcgtgatccggcccatcctcaagaggctggagcggccccaggacagggacacgcccgtgcagaataagcggaggcggagcgtgacccctcctgaggagcagcaggaggctgaggaacctaaagcccgcgtcctccgctcaaaatcactgtgtcacgatgagatcgagaacctcctggacagtgaccaccgagagctgattggagattactctaaggccttcctcctacagacagtagacggaaagcaccaagacctcaagtacatctcaccagaaacgatggtggccctattgacgggcaagttcagcaacatcgtggataagtttgtgattgtagactgcagatacccctatgaatatgaaggcgggcacatcaagactgcggtgaacttgcccctggaacgcgacgccgagagcttcctactgaagagccccatcgcgccctgtagcctggacaagagagtcatcctcattttccactgtgaattctcatctgagcgtgggccccgcatgtgccgtttcatcagggaacgagaccgtgctgtcaacgactaccccagcctctactaccctgagatgtatatcctgaaaggcggctacaaggagttcttccctcagcacccgaacttctgtgaaccccaggactaccggcccatgaaccacgaggccttcaaggatgagctaaagaccttccgcctcaagactcgcagctgggctggggagcggagccggcgggagctctgtagccggctgcaggaccagtgaggggcctgcgccagtcctgctacctcccttgcctttcgaggcctgaagccagctgccctatgggcctgccgggctgagggcctgctggaggcctcaggtgctgtccatgggaaagatggtgtgggtgtcctgcctgtctgccccagcccagattcccctgtgtcatcccatcattttccatatcctggtgccccccacccctggaagagcccagtctgttgagttagttaagttgggttaataccagcttaaaggcagtattttgtgtcctccaggagcttcttgtttccttgttagggttaacccttcatcttcctgtgtcctgaaacgctcctttgtgtgtgtgtcagctgaggctgggggagagccgtggtccctgaggatgggtcagagctaaactccttcctggcctgagagtcagctctctgccctgtgtacttcccgggccagggctgcccctaatctctgtaggaaccgtggtatgtctgccatgttgcccctttctcttttcccctttcctgtcccaccatacgagcacctccagcctgaacagaagctcttactctttcctatttcagtgttacctgtgtgcttggtctgtttgactttacgcccatctcaggacacttccgtagactgtttaggttcccctgtcaaatatcagttacccactcggtcccagttttgttgccccagaaagggatgttattatccttgggggctcccagggcaagggttaaggcctgaatcatgagcctgctggaagcccagcccctactgctgtgaaccctggggcctgactgctcagaacttgctgctgtcttgttgcggatggatggaaggttggatggatgggtggatggccgtggatggccgtggatgcgcagtgccttgcatacccaaaccaggtgggagcgttttgttgagcatgacagcctgcagcaggaatatatgtgtgcctatttgtgtggacaaaaatatttacacttagggtttggagctattcaagaggaaatgtcacagaagcagctaaaccaaggactgagcaccctctggattctgaatctcaagatgggggcagggctgtgcttgaaggccctgctgagtcatctgttagggccttggttcaataaagcactgagcaagttgagaaa

SEQ ID NO: 454167 - DNA, 3873 bp, Homo sapiens
tgcgcggtcagaggcgcctggagcgagcgaatcctggcccaccgcctgcccaaccgcgtgaccttgattgagttaatgaacttcacgcctcagcgtccaggtctgtaaaatggggtgtctaacgcagaccgtacagcccagctgggtttagcaaacttccgggagccagttggagcctctccccatccctagcggtgatcccaggtgacgacatgccgcggggggtcctgcggaggccaccctagggcgttgctgctgcctttgggagtgtggagctccaaaccatgtcgcgagaggcggattttgggaggccgggatcctcgcgccagggggatgtgcgagggtgtgggataaatcttaattcctccggcccacccaaagcctggaaatccagcctccgcgcctcttgccctgcgggccccgccctcagtcccgccctcatctaacccgctaccccattggtggcgtccggcggcgcggctgctgttatttttcgaatatataaggaggtggaagtggcagctgcaactagaggcttccctggctggtgcctgagcccggcgtccctcgccccccgccctccccgcatccctctcctccctcgcgcctggccctgtggctcttcctccctccctccttccccccccccccacccctcgcccgctgcctccctcggcccagccagctgtgccggcgtttgttggctgccctgcgcccggccctccagccagccttctgccggccccgccgcgatggaggtgccccagccggagcccgcgccaggctcggctctcagtccagcaggcgtgtgcggtggcgcccagcgtccgggccacctcccgggcctcctgctgggatctcatggcctcctggggtccccggtgcgggcggccgcttcctcgccggtcaccaccctcacccagaccatgcacgacctcgccgggctcggcagcgaaaccccaaagagtcaggtagggaccctgctcttccgcagccgcagccgcctgacgcacctatccctgtctcgacgggcatccgaatcctccctgtcgtctgaatcctccgaatcttctgatgcaggtctctgcatggattcccccagccctatggacccccacatggcggagcagacgtttgaacaggccatccaggcagccagccggatcattcgaaacgagcagtttgccatcagacgcttccagtctatgccggtgaggctgctgggccacagccccgtgcttcggaacatcaccaactcccaggcgcccgacggccggaggaagagcgaggcgggcagtggagctgccagcagctctggggaagacaaggagaatgatggatttgtcttcaagatgccatggaagcccacacatcccagctccacccatgctctggcagagtgggccagccgcagggaagcctttgcccagagacccagctcggcccccgacctgatgtgtctcagtcctgaccggaagatggaagtggaggagctcagccccctggccctaggtcgcttctctctgacccctgcagagggggatactgaggaagatgatggatttgtggacatcctagagagtgacttaaaggatgatgatgcagttcccccaggcatggagagtctcattagtgccccactggtcaagaccttggaaaaggaagaggaaaaggacctcgtcatgtacagcaagtgccagcggctcttccgctctccgtccatgccctgcagcgtgatccggcccatcctcaagaggctggagcggccccaggacagggacacgcccgtgcagaataagcggaggcggagcgtgacccctcctgaggagcagcaggaggctgaggaacctaaagcccgcgtcctccgctcaaaatcactgtgtcacgatgagatcgagaacctcctggacagtgaccaccgagagctgattggagattactctaaggccttcctcctacagacagtagacggaaagcaccaagacctcaagtacatctcaccagaaacgatggtggccctattgacgggcaagttcagcaacatcgtggataagtttgtgattgtagactgcagatacccctatgaatatgaaggcgggcacatcaagactgcggtgaacttgcccctggaacgcgacgccgagagcttcctactgaagagccccatcgcgccctgtagcctggacaagagagtcatcctcattttccactgtgaattctcatctgagcgtgggccccgcatgtgccgtttcatcagggaacgagaccgtgctgtcaacgactaccccagcctctactaccctgagatgtatatcctgaaaggcggctacaaggagttcttccctcagcacccgaacttctgtgaaccccaggactaccggcccatgaaccacgaggccttcaaggatgagctaaagaccttccgcctcaagactcgcagctgggctggggagcggagccggcgggagctctgtagccggctgcaggaccagtgaggggcctgcgccagtcctgctacctcccttgcctttcgaggcctgaagccagctgccctatgggcctgccgggctgagggcctgctggaggcctcaggtgctgtccatgggaaagatggtgtgggtgtcctgcctgtctgccccagcccagattcccctgtgtcatcccatcattttccatatcctggtgccccccacccctggaagagcccagtctgttgagttagttaagttgggttaataccagcttaaaggcagtattttgtgtcctccaggagcttcttgtttccttgttagggttaacccttcatcttcctgtgtcctgaaacgctcctttgtgtgtgtgtcagctgaggctgggggagagccgtggtccctgaggatgggtcagagctaaactccttcctggcctgagagtcagctctctgccctgtgtacttcccgggccagggctgcccctaatctctgtaggaaccgtggtatgtctgccatgttgcccctttctcttttcccctttcctgtcccaccatacgagcacctccagcctgaacagaagctcttactctttcctatttcagtgttacctgtgtgcttggtctgtttgactttacgcccatctcaggacacttccgtagactgtttaggttcccctgtcaaatatcagttacccactcggtcccagttttgttgccccagaaagggatgttattatccttgggggctcccagggcaagggttaaggcctgaatcatgagcctgctggaagcccagcccctactgctgtgaaccctggggcctgactgctcagaacttgctgctgtcttgttgcggatggatggaaggttggatggatgggtggatggccgtggatggccgtggatgcgcagtgccttgcatacccaaaccaggtgggagcgttttgttgagcatgacagcctgcagcaggaatatatgtgtgcctatttgtgtggacaaaaatatttacacttagggtttggagctattcaagaggaaatgtcacagaagcagctaaaccaaggactgagcaccctctggattctgaatctcaagatgggggcagggctgtgcttgaaggccctgctgagtcatctgttagggccttggttcaataaagcactgagcaagttgagaaaaaaaaaaacagacgcgagatatagtcatatatccccgggagccaatcgtgcggagggaccccggagatatattccacgagctaagaatattacgatgcttcgggcaccatggttacccccttgccaggttatccatgaaactctgtcggggaagctactgacacgggccatgctacttgcccaaaaggtgtggccccggaatgtcgtgaagcgggggtcaaatt

SEQ ID NO: 454168 - DNA, 3728 bp, Homo sapiens
tgcgcggtcagaggcgcctggagcgagcgaatcctggcccaccgcctgcccaaccgcgtgaccttgattgagttaatgaacttcacgcctcagcgtccaggtctgtaaaatggggtgtctaacgcagaccgtacagcccagctgggtttagcaaacttccgggagccagttggagcctctccccatccctagcggtgatcccaggtgacgacatgccgcggggggtcctgcggaggccaccctagggcgttgctgctgcctttgggagtgtggagctccaaaccatgtcgcgagaggcggattttgggaggccgggatcctcgcgccagggggatgtgcgagggtgtgggataaatcttaattcctccggcccacccaaagcctggaaatccagcctccgcgcctcttgccctgcgggccccgccctcagtcccgccctcatctaacccgctaccccattggtggcgtccggcggcgcggctgctgttatttttcgaatatataaggaggtggaagtggcagctgcaactagaggcttccctggctggtgcctgagcccggcgtccctcgccccccgccctccccgcatccctctcctccctcgcgcctggccctgtggctcttcctccctccctccttccccccccccccacccctcgcccgctgcctccctcggcccagccagctgtgccggcgtttgttggctgccctgcgcccggccctccagccagccttctgccggccccgccgcgatggaggtgccccagccggagcccgcgccaggctcggctctcagtccagcaggcgtgtgcggtggcgcccagcgtccgggccacctcccgggcctcctgctgggatctcatggcctcctggggtccccggtgcgggcggccgcttcctcgccggtcaccaccctcacccagaccatgcacgacctcgccgggctcggcagcgaaaccccaaagagtcaggtagggaccctgctcttccgcagccgcagccgcctgacgcacctatccctgtctcgacgggcatccgaatcctccctgtcgtctgaatcctccgaatcttctgatgcaggtctctgcatggattcccccagccctatggacccccacatggcggagcagacgtttgaacaggccatccaggcagccagccggatcattcgaaacgagcagtttgccatcagacgcttccagtctatgccggtgaggctgctgggccacagccccgtgcttcggaacatcaccaactcccaggcgcccgacggccggaggaagagcgaggcgggcagtggagctgccagcagctctggggaagacaaggagaatgatggatttgtcttcaagatgccatggaagcccacacatcccagctccacccatgctctggcagagtgggccagccgcagggaagcctttgcccagagacccagctcggcccccgacctgatgtgtctcagtcctgaccggaagatggaagtggaggagctcagccccctggccctaggtcgcttctctctgacccctgcagagggggatactgaggaagatgatggatttgtggacatcctagagagtgacttaaaggatgatgatgcagttcccccaggcatggagagtctcattagtgccccactggtcaagaccttggaaaaggaagaggaaaaggacctcgtcatgtacagcaagtgccagcggctcttccgctctccgtccatgccctgcagcgtgatccggcccatcctcaagaggctggagcggccccaggacagggacacgcccgtgcagaataagcggaggcggagcgtgacccctcctgaggagcagcaggaggctgaggaacctaaagcccgcgtcctccgctcaaaatcactgtgtcacgatgagatcgagaacctcctggacagtgaccaccgagagctgattggagattactctaaggttgttccctgggtgtcagacccaagaggtgcctctcagttgccatgggaaccagaactgaatttgaaggccaaagcaggccttcctcctacagacagtagacggaaagcaccaagacctcaagtacatctcaccagaaacgatggtggccctattgacgggcaagttcagcaacatcgtggataagtttgtgattgtagactgcagatacccctatgaatatgaaggcgggcacatcaagactgcggtgaacttgcccctggaacgcgacgccgagagcttcctactgaagagccccatcgcgccctgtagcctggacaagagagtcatcctcattttccactgtgaattctcatctgagcgtgggccccgcatgtgccgtttcatcagggaacgagaccgtgctgtcaacgactaccccagcctctactaccctgagatgtatatcctgaaaggcggctacaaggagttcttccctcagcacccgaacttctgtgaaccccaggactaccggcccatgaaccacgaggccttcaaggatgagctaaagaccttccgcctcaagactcgcagctgggctggggagcggagccggcgggagctctgtagccggctgcaggaccagtgaggggcctgcgccagtcctgctacctcccttgcctttcgaggcctgaagccagctgccctatgggcctgccgggctgagggcctgctggaggcctcaggtgctgtccatgggaaagatggtgtgggtgtcctgcctgtctgccccagcccagattcccctgtgtcatcccatcattttccatatcctggtgccccccacccctggaagagcccagtctgttgagttagttaagttgggttaataccagcttaaaggcagtattttgtgtcctccaggagcttcttgtttccttgttagggttaacccttcatcttcctgtgtcctgaaacgctcctttgtgtgtgtgtcagctgaggctgggggagagccgtggtccctgaggatgggtcagagctaaactccttcctggcctgagagtcagctctctgccctgtgtacttcccgggccagggctgcccctaatctctgtaggaaccgtggtatgtctgccatgttgcccctttctcttttcccctttcctgtcccaccatacgagcacctccagcctgaacagaagctcttactctttcctatttcagtgttacctgtgtgcttggtctgtttgactttacgcccatctcaggacacttccgtagactgtttaggttcccctgtcaaatatcagttacccactcggtcccagttttgttgccccagaaagggatgttattatccttgggggctcccagggcaagggttaaggcctgaatcatgagcctgctggaagcccagcccctactgctgtgaaccctggggcctgactgctcagaacttgctgctgtcttgttgcggatggatggaaggttggatggatgggtggatggccgtggatggccgtggatgcgcagtgccttgcatacccaaaccaggtgggagcgttttgttgagcatgacagcctgcagcaggaatatatgtgtgcctatttgtgtggacaaaaatatttacacttagggtttggagctattcaagaggaaatgtcacagaagcagctaaaccaaggactgagcaccctctggattctgaatctcaagatgggggcagggctgtgcttgaaggccctgctgagtcatctgttagggccttggttcaataaagcactgagcaagttgagaaa

SEQ ID NO: 454169 - DNA, 3618 bp, Homo sapiens
tgcgcggtcagaggcgcctggagcgagcgaatcctggcccaccgcctgcccaaccgcgtgaccttgattgagttaatgaacttcacgcctcagcgtccaggtctgtaaaatggggtgtctaacgcagaccgtacagcccagctgggtttagcaaacttccgggagccagttggagcctctccccatccctagcggtgatcccaggtgacgacatgccgcggggggtcctgcggaggccaccctagggcgttgctgctgcctttgggagtgtggagctccaaaccatgtcgcgagaggcggattttgggaggccgggatcctcgcgccagggggatgtgcgagggtgtgggataaatcttaattcctccggcccacccaaagcctggaaatccagcctccgcgcctcttgccctgcgggccccgccctcagtcccgccctcatctaacccgctaccccattggtggcgtccggcggcgcggctgctgttatttttcgaatatataaggaggtggaagtggcagctgcaactagaggcttccctggctggtgcctgagcccggcgtccctcgccccccgccctccccgcatccctctcctccctcgcgcctggccctgtggctcttcctccctccctccttccccccccccccacccctcgcccgctgcctccctcggcccagccagctgtgccggcgtttgttggctgccctgcgcccggccctccagccagccttctgccggccccgccgcgatggaggtgccccagccggagcccgcgccaggctcggctctcagtccagcaggcgtgtgcggtggcgcccagcgtccgggccacctcccgggcctcctgctgggatctcatggcctcctggggtccccggtgcgggcggccgcttcctcgccggtcaccaccctcacccagaccatgcacgacctcgccgggctcggcagcgaaaccccaaagagtcaggtagggaccctgctcttccgcagccgcagccgcctgacgcacctatccctgtctcgacgggcatccgaatcctccctgtcgtctgaatcctccgaatcttctgatgcaggtctctgcatggattcccccagccctatggacccccacatggcggagcagacgtttgaacaggccatccaggcagccagccggatcattcgaaacgagcagtttgccatcagacgcttccagtctatgccggtgaggctgctgggccacagccccgtgcttcggaacatcaccaactcccaggcgcccgacggccggaggaagagcgaggcgggcagtggagctgccagcagctctggggaagacaaggagaatgatggatttgtcttcaagatgccatggaagcccacacatcccagctccacccatgctctggcagagtgggccagccgcagggaagcctttgcccagagacccagctcggcccccgacctgatgtgtctcagtcctgaccggaagatggaagtggaggagctcagccccctggccctaggtcgcttctctctgacccctgcagagggggatactgaggaagatgatggatttgtggacatcctagagagtgacttaaaggatgatgatgcagttcccccaggcatggagagtctcattagtgccccactggtcaagaccttggaaaaggaagaggaaaaggacctcgtcatgtacagcaagtgccagcggctcttccgctctccgtccatgccctgcagcgtgatccggcccatcctcaagaggctggagcggccccaggacagggacacgcccgtgcagaataagcggaggcggagcgtgacccctcctgaggagcagcaggaggctgaggaacctaaagcccgcgtcctccgctcaaaatcactgtgtcacgatgagatcgagaacctcctggacagtgaccaccgagagctgattggagattactctaaggccttcctcctacagacagtagacggaaagcaccaagacctcaagtacatctcaccagaaacgatggtggccctattgacgggcaagttcagcaacatcgtggataagtttgtgattgtagactgcagatacccctatgaatatgaaggcgggcacatcaagactgcggtgaacttgcccctggaacgcgacgccgagagcttcctactgaagagccccatcgcgccctgtagcctggacaagagagtcatcctcattttccactgtgaattctcatctgagcgtgggccccgcatgtgccgtttcatcagggaacgagaccgtgctgtcaacgactaccccagcctctactaccctgagatgtatatcctgaaaggcggctacaaggagttcttccctcagcacccgaacttctgtgaaccccaggactaccggcccatgaaccacgaggccttcaaggatgagctaaagaccttccgcctcaagactcgcagctgggctggggagcggagccggcgggagctctgtagccggctgcaggaccagtgaggggcctgcgccagtcctgctacctcccttgcctttcgaggcctgaagccagctgccctatgggcctgccgggctgagggcctgctggaggcctcaggtgctgtccatgggaaagatggtgtgggtgtcctgcctgtctgccccagcccagattcccctgtgtcatcccatcattttccatatcctggtgccccccacccctggaagagcccagtctgttgagttagttaagttgggttaataccagcttaaaggcagtattttgtgtcctccaggagcttcttgtttccttgttagggttaacccttcatcttcctgtgtcctgaaacgctcctttgtgtgtgtgtcagctgaggctgggggagagccgtggtccctgaggatgggtcagagctaaactccttcctggcctgagagtcagctctctgccctgtgtacttcccgggccagggctgcccctaatctctgtaggaaccgtggtatgtctgccatgttgcccctttctcttttcccctttcctgtcccaccatacgagcacctccagcctgaacagaagctcttactctttcctatttcagtgttacctgtgtgcttggtctgtttgactttacgcccatctcaggacacttccgtagactgtttaggttcccctgtcgttgccccagaaagggatgttattatccttgggggctcccagggcaagggttaaggcctgaatcatgagcctgctggaagcccagcccctactgctgtgaaccctggggcctgactgctcagaacttgctgctgtcttgttgcggatggatggaaggttggatggatgggtggatggccgtggatggccgtggatgcgcagtgccttgcatacccaaaccaggtgggagcgttttgttgagcatgacagcctgcagcaggaatatatgtgtgcctatttgtgtggacaaaaatatttacacttagggtttggagctattcaagaggaaatgtcacagaagcagctaaaccaaggactgagcaccctctggattctgaatctcaagatgggggcagggctgtgcttgaaggccctgctgagtcatctgttagggccttggttcaataaagcactgagcaagttgagaaa

SEQ ID NO: 454170 - DNA, 2582 bp, Homo sapiens
tgatatcgtcgaccacgccgtcgcgaaacgagcagtttgccatcagacgcttccagtctatggcggtgaggctgctgggccacagccccgtgcttcggaacatcaccaactcccaggcgcccgacggccggaggaagagcgaggcgggcagtggagctgccagcagctctggggaagacaaggagaatgatggatttgtcttcaagatgccatggaagcccacacatcccagctccacccatgctctggcagagtgggccagccgcagggaagcctttgcccagagacccagctcggcccccgacctgatgtgtctcagtcctgaccggaagatggaagtggaggagctcagccccctggccctaggtcgcttctctctgacccctgcagagggggatactgaggaagatgatggatttgtggacatcctagagagtgacttaaaggatgatgatgcagttcccccaggcatggagagtctcattagtgccccactggtcaagaccttggaaaaggaagaggaaaaggacctcgtcatgtacagcaagtgccagcggctcttccgctctccgtccatgccctgcagcgtgatccggcccatcctcaagaggctggagcggccccaggacagggacacgcccgtgcagaataagcggaggcggagcgtgacccctcctgaggagcagcaggaggctgaggaacctaaagcccgcgtcctccgctcaaaatcactgtgtcacgatgagatcgagaacctcctggacagtgaccaccgagagctgattggagattactctaaggttgttccctgggtgtcagacccaagaggtgcctctcagttgccatgggaaccagaactgaatttgaaggccaaagcaggccttcctcctacagacagtagacggaaagcaccaagacctcaagtacatctcaccagaaacgatggtggccctattgacgggcaagttcagcaacatcgtggataagtttgtgattgtagactgcagatacccctatgaatatgaaggcgggcacatcaagactgcggtgaacttgcccctggaacgcgacgccgagagcttcctactgaagagccccatcgcgccctgtagcctggacaagagagtcatcctcattttccactgtgaattctcatctgagcgtgggccccgcatgtgccgtttcatcagggaacgagaccgtgctgtcaacgactaccccagcctctactaccctgagatgtatatcctgaaaggcggctacaaggagttcttccctcagcacccgaacttctgtgaaccccaggactaccggcccatgaaccacgaggccttcaaggatgagctaaagaccttccgcctcaagactcgcagctgggctggggagcggagccggcgggagctctgtagccggctgcaggaccagtgaggggcctgcgccagtcctgctacctcccttgcctttcgaggcctgaagccagctgccctatgggcctgccgggctgagggcctgctggaggcctcaggtgctgtccatgggaaagatggtgtgggtgtcctgcctgtctgccccagcccagattcccctgtgtcatcccatcattttccatatcctggtgccccccacccctggaagagcccagtctgttgagttagttaagttgggttaataccagcttaaaggcagtattttgtgtcctccaggagcttcttgtttccttgttagggttaacccttcatcttcctgtgtcctgaaacgctcctttgtgtgtgtgtcagctgaggctgggggagagccgtggtccctgaggatgggtcagagctaaactccttcctggcctgagagtcagctctctgccctgtgtacttcccgggccagggctgcccctaatctctgtaggaaccgtggtatgtctgccatgttgcccctttctcttttcccctttcctgtcccaccatacgagcacctccagcctgaacagaagctcttactctttcctatttcagtgttacctgtgtgcttggtctgtttgactttacgcccatctcaggacacttccgtagactgtttaggttcccctgtcaaatatcagttacccactcggtcccagttttgttgccccagaaagggatgttattatccttgggggctcccagggcaagggttaaggcctgaatcatgagcctgctggaagcccagcccctactgctgtgaaccctggggcctgactgctcagaacttgctgctgtcttgttgcggatggatggaaggttggatggatgggtggatggccgtggatggccgtggatgcgcagtgccttgcatacccaaaccaggtgggagcgttttgttgagcatgacagcctgcagcaggaatatatgtgtgcctatttgtgtggacaaaaatatttacacttagggtttggagctattcaagaggaaatgtcacagaagcagctaaaccaaggactgagcaccctctggattctgaatctcaagatgggggcagggctgtgcttgaaggccctgctgagtcatctgttagggccttggttcaataaagcactgagcaagttgagaaa

SEQ ID NO: 454171 - DNA, 1695 bp, Homo sapiens
tcagtttacagcgtcagggtcagtttacagcgtcagggtcagtttacagcgtcagatggtggccctattgacgggcaagttcagcaacatcgtggataagtttgtgattgtagactgcagatacccctatgaatatgaaggcgggcacatcaagactgcggtgaacttgcccctggaacgcgacgccgagagcttcctactgaagagccccatcgcgccctgtagcctggacaagagagtcatcctcattttccactgtgaattctcatctgagcgtgggccccgcatgtgccgtttcatcagggaacgagaccgtgctgtcaacgactaccccagcctctactaccctgagatgtatatcctgaaaggcggctacaaggagttcttccctcagcacccgaacttctgtgaaccccaggactaccggcccatgaaccacgaggccttcaaggatgagctaaagaccttccgcctcaagactcgcagctgggctggggagcggagccggcgggagctctgtagccggctgcaggaccagtgaggggcctgcgccagtcctgctacctcccttgcctttcgaggcctgaagccagctgccctatgggcctgccgggctgagggcctgctggaggcctcaggtgctgtccatgggaaagatggtgtgggtgtcctgcctgtctgccccagcccagattcccctgtgtcatcccatcattttccatatcctggtgccccccacccctggaagagcccagtctgttgagttagttaagttgggttaataccagcttaaaggcagtattttgtgtcctccaggagcttcttgtttccttgttagggttaacccttcatcttcctgtgtcctgaaacgctcctttgtgtgtgtgtcagctgaggctgggggagagccgtggtccctgaggatgggtcagagctaaactccttcctggcctgagagtcagctctctgccctgtgtacttcccgggccagggctgcccctaatctctgtaggaaccgtggtatgtctgccatgttgcccctttctcttttcccctttcctgtcccaccatacgagcacctccagcctgaacagaagctcttactctttcctatttcagtgttacctgtgtgcttggtctgtttgactttacgcccatctcaggacacttccgtagactgtttaggttcccctgtcaaatatcagttacccactcggtcccagttttgttgccccagaaagggatgttattatccttgggggctcccagggcaagggttaaggcctgaatcatgagcctgctggaagcccagcccctactgctgtgaaccctggggcctgactgctcagaacttgctgctgtcttgttgcggatggatggaaggttggatggatgggtggatggccgtggatggccgtggatgcgcagtgccttgcatacccaaaccaggtgggagcgttttgttgagcatgacagcctgcagcaggaatatatgtgtgcctatttgtgtggacaaaaatatttacacttagggtttggagctattcaagaggaaatgtcacagaagcagctaaaccaaggactgagcaccctctggattctgaatctcaagatgggggcagggctgtgcttgaaggccctgctgagtcatctgttagggccttggttcaataaagcactgagcaagttgagaaa

SEQ ID NO: 454172 - DNA, 3113 bp, Homo sapiens
tgcgcggtcagaggcgcctggagcgagcgaatcctggcccaccgcctgcccaaccgcgtgaccttgattgagttaatgaacttcacgcctcagcgtccaggtctgtaaaatggggtgtctaacgcagaccgtacagcccagctgggtttagcaaacttccgggagccagttggagcctctccccatccctagcggtgatcccaggtgacgacatgccgcggggggtcctgcggaggccaccctagggcgttgctgctgcctttgggagtgtggagctccaaaccatgtcgcgagaggcggattttgggaggccgggatcctcgcgccagggggatgtgcgagggtgtgggataaatcttaattcctccggcccacccaaagcctggaaatccagcctccgcgcctcttgccctgcgggccccgccctcagtcccgccctcatctaacccgctaccccattggtggcgtccggcggcgcggctgctgttatttttcgaatatataaggaggtggaagtggcagctgcaactagaggcttccctggctggtgcctgagcccggcgtccctcgccccccgccctccccgcatccctctcctccctcgcgcctggccctgtggctcttcctccctccctccttccccccccccccacccctcgcccgctgcctccctcggcccagccagctgtgccggcgtttgttggctgccctgcgcccggccctccagccagccttctgccggccccgccgcgatggaggtgccccagccggagcccgcgccaggctcggctctcagtccagcaggcgtgtgcggtggcgcccagcgtccgggccacctcccgggcctcctgctgggatctcatggcctcctggggtccccggtgcgggcggccgcttcctcgccggtcaccaccctcacccagaccatgcacgacctcgccgggctcggcagcgaaaccccaaagagtcaggtagggaccctgctcttccgcagccgcagccgcctgacgcacctatccctgtctcgacgggcatccgaatcctccctgtcgtctgaatcctccgaatcttctgatgcaggtctctgcatggattcccccagccctatggacccccacatggcggagcagacgtttgaacaggccatccaggcagccagccggatcattcgaaacgagcagtttgccatcagacgcttccagtctatgccggtgaggctgctgggccacagccccgtgcttcggaacatcaccaactcccaggcgcccgacggccggaggaagagcgaggcgggcagtggagctgccagcagctctggggaagacaaggagaatgatggatttgtcttcaagatgccatggaagcccacacatcccagctccacccatgctctggcagagtgggccagccgcagggaagcctttgcccagagacccagctcggcccccgacctgatgtgtctcagtcctgaccggaagatggaagtggaggagctcagccccctggccctaggtcgcttctctctgacccctgcagagggggatactgaggaagatgatggatttgtggacatcctagagagtgacttaaaggatgatgatgcagttcccccaggcatggagagtctcattagtgccccactggtcaagaccttggaaaaggaagaggaaaaggacctcgtcatgtacagcaagtgccagcggctcttccgctctccgtccatgccctgcagcgtgatccggcccatcctcaagaggctggagcggccccaggacagggacacgcccgtgcagaataagcggaggcggagcgtgacccctcctgaggagcagcaggaggctgaggaacctaaagcccgcgtcctccgctcaaaatcactgtgtcacgatgagatcgagaacctcctggacagtgaccaccgagagctgattggagattactctaaggccttcctcctacagacagtagacggaaagcaccaagacctcaagtacatctcaccagaaacgatggtggccctattgacgggcaagttcagcaacatcgtggataagtttgtgattgtagactgcagatacccctatgaatatgaaggcgggcacatcaagactgcggtgaacttgcccctggaacgcgacgccgagagcttcctactgaagagccccatcgcgccctgtagcctggacaagagagtcatcctcattttccactgtgaattctcatctgagcgtgggccccgcatgtgccgtttcatcagggaacgagaccgtgctgtcaacgactaccccagcctctactaccctgagatgtatatcctgaaaggcggctacaaggagttcttccctcagcacccgaacttctgtgaaccccaggactaccggcccatgaaccacgaggccttcaaggatgagctaaagaccttccgcctcaagactcgcagctgggctggggagcggagccggcgggagctctgtagccggctgcaggaccagtgaggggcctgcgccagtcctgctacctcccttgcctttcgaggcctgaagccagctgccctatgggcctgccgggctgagggcctgctggaggcctcaggtgctgtccatgggaaagatggtgtgggtgtcctgcctgtctgccccagcccagattcccctgtgtcatcccatcattttccatatcctggtgccccccacccctggaagagcccagtctgttgagttagttaagttgggttaataccagcttaaaggcagtattttgtgtcctccaggagcttcttgtttccttgttagggttaacccttcatcttcctgtgtcctgaaacgctcctttgtgtgtgtgtcagctgaggctgggggagagccgtggtccctgaggatgggtcagagctaaactccttcctggcctgagagtcagctctctgccctgtgtacttcccgggccagggctgcccctaatctctgtaggaaccgtggtatgtctgccatgttgcccctttctcttttcccctttcctgtcccaccatacgagcacctccagccaccaagagccacccaacgagccccacgaagagccacacgaagagccacgctacgagcctcaccatgagccac

SEQ ID NO: 454173 - DNA, 2736 bp, Homo sapiens
tgcgcggtcagaggcgcctggagcgagcgaatcctggcccaccgcctgcccaaccgcgtgaccttgattgagttaatgaacttcacgcctcagcgtccaggtctgtaaaatggggtgtctaacgcagaccgtacagcccagctgggtttagcaaacttccgggagccagttggagcctctccccatccctagcggtgatcccaggtgacgacatgccgcggggggtcctgcggaggccaccctagggcgttgctgctgcctttgggagtgtggagctccaaaccatgtcgcgagaggcggattttgggaggccgggatcctcgcgccagggggatgtgcgagggtgtgggataaatcttaattcctccggcccacccaaagcctggaaatccagcctccgcgcctcttgccctgcgggccccgccctcagtcccgccctcatctaacccgctaccccattggtggcgtccggcggcgcggctgctgttatttttcgaatatataaggaggtggaagtggcagctgcaactagaggcttccctggctggtgcctgagcccggcgtccctcgccccccgccctccccgcatccctctcctccctcgcgcctggccctgtggctcttcctccctccctccttccccccccccccacccctcgcccgctgcctccctcggcccagccagctgtgccggcgtttgttggctgccctgcgcccggccctccagccagccttctgccggccccgccgcgatggaggtgccccagccggagcccgcgccaggctcggctctcagtccagcaggcgtgtgcggtggcgcccagcgtccgggccacctcccgggcctcctgctgggatctcatggcctcctggggtccccggtgcgggcggccgcttcctcgccggtcaccaccctcacccagaccatgcacgacctcgccgggctcggcagcgaaaccccaaagagtcaggtagggaccctgctcttccgcagccgcagccgcctgacgcacctatccctgtctcgacgggcatccgaatcctccctgtcgtctgaatcctccgaatcttctgatgcaggtctctgcatggattcccccagccctatggacccccacatggcggagcagacgtttgaacaggccatccaggcagccagccggatcattcgaaacgagcagtttgccatcagacgcttccagtctatgccggtgaggctgctgggccacagccccgtgcttcggaacatcaccaactcccaggcgcccgacggccggaggaagagcgaggcgggcagtggagctgccagcagctctggggaagacaaggagaatgatggatttgtcttcaagatgccatggaagcccacacatcccagctccacccatgctctggcagagtgggccagccgcagggaagcctttgcccagagacccagctcggcccccgacctgatgtgtctcagtcctgaccggaagatggaagtggaggagctcagccccctggccctaggtcgcttctctctgacccctgcagagggggatactgaggaagatgatggatttgtggacatcctagagagtgacttaaaggatgatgatgcagttcccccaggcatggagagtctcattagtgccccactggtcaagaccttggaaaaggaagaggaaaaggacctcgtcatgtacagcaagtgccagcggctcttccgctctccgtccatgccctgcagcgtgatccggcccatcctcaagaggctggagcggccccaggacagggacacgcccgtgcagaataagcggaggcggagcgtgacccctcctgaggagcagcaggaggctgaggaacctaaagcccgcgtcctccgctcaaaatcactgtgtcacgatgagatcgagaacctcctggacagtgaccaccgagagctgattggagattactctaaggccttcctcctacagacagtagacggaaagcaccaagacctcaagtacatctcaccagaaacgatggtggccctattgacgggcaagttcagcaacatcgtggataagtttgtgattgtagactgcagatacccctatgaatatgaaggcgggcacatcaagactgcggtgaacttgcccctggaacgcgacgccgagagcttcctactgaagagccccatcgcgccctgtagcctggacaagagagtcatcctcattttccactgtgaattctcatctgagcgtgggccccgcatgtgccgtttcatcagggaacgagaccgtgctgtcaacgactaccccagcctctactaccctgagatgtatatcctgaaaggcggctacaaggagttcttccctcagcacccgaacttctgtgaaccccaggactaccggcccatgaaccacgaggccttcaaggatgagctaaagaccttccgcctcaagactcgcagctgggctggggagcggagccggcgggagctctgtagccggctgcaggaccagtgaggggcctgcgccagtcctgctacctcccttgcctttcgaggcctgaagccagctgccctatgggcctgccgggctgagggcctgctggaggcctcagggaaatgtcacagaagcagctaaaccaaggactgagcaccctctggattctgaatctcaagatgggggcagggctgtgcttgaaggccctgctgagtcatctgttagggccttggttcaataaagcactgagcaagttgagaaa

SEQ ID NO: 454174 - DNA, 1511 bp, Homo sapiens
tgcgcggtcagaggcgcctggagcgagcgaatcctggcccaccgcctgcccaaccgcgtgaccttgattgagttaatgaacttcacgcctcagcgtccaggtctgtaaaatggggtgtctaacgcagaccgtacagcccagctgggtttagcaaacttccgggagccagttggagcctctccccatccctagcggtgatcccaggtgacgacatgccgcggggggtcctgcggaggccaccctagggcgttgctgctgcctttgggagtgtggagctccaaaccatgtcgcgagaggcggattttgggaggccgggatcctcgcgccagggggatgtgcgagggtgtgggataaatcttaattcctccggcccacccaaagcctggaaatccagcctccgcgcctcttgccctgcgggccccgccctcagtcccgccctcatctaacccgctaccccattggtggcgtccggcggcgcggctgctgttatttttcgaatatataaggaggtggaagtggcagctgcaactagaggcttccctggctggtgcctgagcccggcgtccctcgccccccgccctccccgcatccctctcctccctcgcgcctggccctgtggctcttcctccctccctccttccccccccccccacccctcgcccgctgcctccctcggcccagccagctgtgccggcgtttgttggctgccctgcgcccggccctccagccagccttctgccggccccgccgcgatggaggtgccccagccggagcccgcgccaggctcggctctcagtccagcaggcgtgtgcggtggcgcccagcgtccgggccacctcccgggcctcctgctgggatctcatggcctcctggggtccccggtgcgggcggccgcttcctcgccggtcaccaccctcacccagaccatgcacgacctcgccgggctcggcagcgaaaccccaaagagtcaggtagggaccctgctcttccgcagccgcagccgcctgacgcacctatccctgtctcgacgggcatccgaatcctccctgtcgtctgaatcctccgaatcttctgatgcaggtctctgcatggattcccccagccctatggacccccacatggcggagcagacgtttgaacaggccatccaggcagccagccggatcattcgaaacgagcagtttgccatcagacgcttccagtctatgccggtgaggctgctgggccacagccccgtgcttcggaacatcaccaactcccaggcgcccgacggccggaggaagagcgaggcgggcagtggagctgccagcagctctggggaagacaaggagaatgatggatttgtcttcaagatgccatggaagcccacacatcccagctccacccatgctctggcagagtgggccagccgcagggaagcctttgcccagagacccagctcggcccccgacctgatgtttctcagtcctgaccggaagatggatgtggaggggatgatttagaggtcgctc

SEQ ID NO: 454175 - DNA, 4759 bp, Homo sapiens
  misc_feature (4559)..(4559): n is a, c, g, or t
  misc_feature (4561)..(4561): n is a, c, g, or t
ggcgcggccgtcgcagttcggcgggcgcagtgcgcgtgcgccctgactgttggggggcgggcggcgtccgcggcgagggagcgggggcggggaggcgccgtctggctcaggctggggccggcgggagcgcgaacgagcgacggcggaacccgtgggcctgtggactgcagcctcggcggtcagcagagtgcttgtgatttcacgtatttttgctgaactcgtaaaagagacacttggatggtggattaaccagaacactaacattctgtgaaaagtttcaaattggagaatattgaattttcaccctagtccagcagctccgctgctcacttaaatacagatgaatgaagaccccattcggaaagacacctggccagcggtccagagctgatgcaggccatgctggagtatctgccaacatgatgaagaagaggacatcccacaaaaaacatcggagcagtgtgggtccgagcaaacctgtttcccagccccggcggaacatcgtaggctgcaggattcagcatgggtggaaagaggggaatggccctgttacccagtggaaaggaaccgttctggaccaggtgcctgtaaatccttctttgtatcttataaaatacgatggatttgactgtgtttatggactagaacttaataaagatgaaagagtttctgcgcttgaagtcctccctgatagagttgcgacatctcgaatcagcgatgcacacttggcagacacaatgattggcaaagcagtggaacatatgtttgagacagaggatggttctaaagatgagtggaggggaatggtcttagcacgtgcacctgtcatgaacacatggttttacattacctatgagaaagaccctgtcttgtacatgtaccaactcttagatgattacaaagaaggcgaccttcgcattatgcctgattccaatgattcacctccagcagaaagggaaccaggagaagttgtggacagcctggtaggcaaacaagtggaatatgccaaagaagatggctcgaaaaggactggcatggtcattcatcaagtagaagccaagccctccgtctatttcatcaagtttgatgatgatttccatatttatgtctacgatttggtgaaaacatcctagatgtcatcacaaactctgccaaatttgtggaactatgaaatgtattatttgtagacataaagacttgattgctttccagtttaatgaaagcttaaatgtccctgcgaacccacaatctctgccagcagaactggttttgttctgaatagtacagattgatgtgaacacaaagcattttgtgtaaggagaacccctttcttttaaaagaagtctgtctatttcgaggggagttacaggcaagtttggtaaaagttaagctagtatcatagtcatttaaaattgtaatagatcttaaccattttccccctcaccctaactctcttattctgccgccacaatgcaagcatagtttgatgttttcgttattgccttttttgagatgtatgtatctgtatctacctatatctatatgtgtgtatacatatataatatatacacacagatacaagtgtacacacacacaccacacaccacacacaccccactggcagtctttgtggattaggatgggggtgacataattttcttgagtttaacaggagtgctttacccaagtcagtcatggatatgatatcactgctctttatttaaaagtaaactttgggcacaggaaccatatgggaacattcagcttgtttaaaaaaaaaaaatcagaagttcagagcaccttttcaatctggagcccttaaaccataagtccaaatatgaattatttgtgaacagttaatgacccatattagaattttacaatctggtgaacaatctgggtaaaaggctacctttaattctaagcttcatttttttttgggggggggttacattttaatcataaattcttttttgcaaagcccaggttcttgttccacacagtgtaatgtaggtgtattttggacagcacatatggtccattgtgtacaagtcagtaatctggatttcagtacatggatttaaaaggcaacaatccatcactggtttgtgtgtttttggttaagtttctggaagaatacaatgcttttatattggaagtataagttttgagtggcattgttgccttctaacaagctctctgggacttttaaagttttattactattattgctaatgtatgattatggtcagagactttcaacccaccccttcctgcctacccctggcttttcctcacaaagaatgtctagacaaacagcagcttagtctcctgacacctcttgtggggtgcatgttcctgctccaggtatgctgttcatgtggattcattccattcagtggccccttggggtttgcatgccagtgaagcgttaccatagaagagccagccgtttgtgttcgcttggtaggtgtaagtaatagcagcccttagccacggagtctttatgtggtttattcctgcaaggttgttttaaactgaaatagaactgctagtgtgattggttgatcagcaaaacagctgctctcattttgttttggaggaaccctggtggtttgacagccaggagaaaggccatatgtgaaaccagtctcttgtggagattggaaatcctccctgatatttgggcagagcctaaacgtgcatgcttgtcactcaaacaccagaagtttgaatcagaggtctgagtgacctcttttgtggctgttcttgatggtttccaggcctcgttatgcatggtttgcttgatgcccattttttgtgccttgtgctgttggatggtaacgaccactcaccatgtaaacacagtacctcagttttctgtccacagctgcagtcgctctgtccctcgtgcttcactgtgggcagccagggacaagcttctgaaagcagtgtgatacccaagtcataggtgcttctcgtatgtgaacaggtgtcattctacagatctgttatgtgttttcctgttgactcttaagagtccctgcatgtaaatctcaaagctgagcctggctcccagagtccagactgacattacagcgcaagagtttgcaagtgtgtccagcatgcaccaactgtgcagaacttggctcggtaactttgcgtggaaaaataaagtacattttgaagtatcttgagggttgggtcaattgagacatttctagcattacttaatgacttgcattgtggtttttctgcaagcaactttaatgactttttttataccacatggtctcccagtttctagatgaatgcaacatgatgatggtgatgatgacgatgagtttaatcattgttcatttattgcctttagggctgagggaaagggaaggtttgtttttttttctccccattttcccccattctgtctttcttttggtgacttacaccacatgtaatgacgctatgactaattctgctcccaagcccttgtatcttgggcttcattttaggctcatgtgtcagatctgcatgcattgcttgcatttttctggtatctgaatgttggttccttgttccaggaattcaacattaatttccaaaagtatcatgggacttgtgacaatacaagacatgaatctatgtataaaatttatcggcctttctcatttacctgctctagtattattgtattgtgtgtgcgtgcgtgtgtgatgtcaggctgccacgtaaaacttcagagaaaaatcttaaaagcagaccatccttttttgcatgctctattctaagtagaatgttcaatgtaactgactaaaattgcatgttaaagatatttaggtttttttgttttctttatttttatttgttttcagtttcctgtatatttgcttactgtgccgttttagtggttttaggataaaaatgcactggtgaagcaaatgtagtgccaacagaaggtgattttccagttgtaaatgtcatgcagcatttgaagggactgtgttttcttaaaaaaaaatcacagttacttctaaaccagatttcatttcttttattgttttatgtgccaaaccacgaagtgcattgggcttcaatctctgaacactgtagacccattagaagactgttccgattgttacaaattgtagtgcctgaaaacactcttaagctgattgtcttaacaaaatgaaagttctccaaagacaaaacagaacaattattataacaaaataattatggttgaaatgtctgtggttccttggaaatgctgcgctctttgtgtttttccatcattagtgcagttggaatgaatgtgtataggtcagaggtcttcgtgttcacattttaaaattaggtaaatgacctcatctttcaagcttgaattcatttttaattttaattttattttatacaatgtgtagacagttccctgttctctgcatttagaagtatacacaatataaatctgttaattctgtaagtaatttttataattatgatgtaactctatcttatccttaaaacatttaaaataaaccctttatgtgcaaaaaaaaacnanagaaacacacaaacctttgtggggcagcctgggccctgaaaaaaagttctgtagaaccttcggtgtgggacgcggggcccatgatggttgtttaccgtgtgcgcaaagggtcccaagaaaaaacccgcgaaaagacacaagcggtggatttctcccgattaaaaaagcccggggcgaaacgaagtcttttaacaattg

SEQ ID NO: 454176 - DNA, 4340 bp, Homo sapiens
ggcgcggccgtcgcagttcggcgggcgcagtgcgcgtgcgccctgactgttggggggcgggcggcgtccgcggcgagggagcgggggcggggaggcgccgtctggctcaggctggggccggcgggagcgcgaacgagcgacggcggaacccgtgggcctgtggactgcagcctcggcggtcagcaggccatgctggagtatctgccaacatgatgaagaagaggacatcccacaaaaaacatcggagcagtgtgggtccgagcaaacctgtttcccagccccggcggaacatcgtaggctgcaggattcagcatgggtggaaagaggggaatggccctgttacccagtggaaaggaaccgttctggaccaggtgcctgtaaatccttctttgtatcttataaaatacgatggatttgactgtgtttatggactagaacttaataaagatgaaagagtttctgcgcttgaagtcctccctgatagagttgcgacatctcgaatcagcgatgcacacttggcagacacaatgattggcaaagcagtggaacatatgtttgagacagaggatggttctaaagatgagtggaggggaatggtcttagcacgtgcacctgtcatgaacacatggttttacattacctatgagaaagaccctgtcttgtacatgtaccaactcttagatgattacaaagaaggcgaccttcgcattatgcctgattccaatgattcacctccagcagaaagggaaccaggagaagttgtggacagcctggtaggcaaacaagtggaatatgccaaagaagatggctcgaaaaggactggcatggtcattcatcaagtagaagccaagccctccgtctatttcatcaagtttgatgatgatttccatatttatgtctacgatttggtgaaaacatcctagatgtcatcacaaactctgccaaatttgtggaactatgaaatgtattatttgtagacataaagacttgattgctttccagtttaatgaaagcttaaatgtccctgcgaacccacaatctctgccagcagaactggttttgttctgaatagtacagattgatgtgaacacaaagcattttgtgtaaggagaacccctttcttttaaaagaagtctgtctatttcgaggggagttacaggcaagtttggtaaaagttaagctagtatcatagtcatttaaaattgtaatagatcttaaccattttccccctcaccctaactctcttattctgccgccacaatgcaagcatagtttgatgttttcgttattgccttttttgagatgtatgtatctgtatctacctatatctatatgtgtgtatacatatataatatatacacacagatacaagtgtacacacacacaccacacaccacacacaccccactggcagtctttgtggattaggatgggggtgacataattttcttgagtttaacaggagtgctttacccaagtcagtcatggatatgatatcactgctctttatttaaaagtaaactttgggcacaggaaccatatgggaacattcagcttgtttaaaaaaaaaaaatcagaagttcagagcaccttttcaatctggagcccttaaaccataagtccaaatatgaattatttgtgaacagttaatgacccatattagaattttacaatctggtgaacaatctgggtaaaaggctacctttaattctaagcttcatttttttttgggggggggttacattttaatcataaattcttttttgcaaagcccaggttcttgttccacacagtgtaatgtaggtgtattttggacagcacatatggtccattgtgtacaagtcagtaatctggatttcagtacatggatttaaaaggcaacaatccatcactggtttgtgtgtttttggttaagtttctggaagaatacaatgcttttatattggaagtataagttttgagtggcattgttgccttctaacaagctctctgggacttttaaagttttattactattattgctaatgtatgattatggtcagagactttcaacccaccccttcctgcctacccctggcttttcctcacaaagaatgtctagacaaacagcagcttagtctcctgacacctcttgtggggtgcatgttcctgctccaggtatgctgttcatgtggattcattccattcagtggccccttggggtttgcatgccagtgaagcgttaccatagaagagccagccgtttgtgttcgcttggtaggtgtaagtaatagcagcccttagccacggagtctttatgtggtttattcctgcaaggttgttttaaactgaaatagaactgctagtgtgattggttgatcagcaaaacagctgctctcattttgttttggaggaaccctggtggtttgacagccaggagaaaggccatatgtgaaaccagtctcttgtggagattggaaatcctccctgatatttgggcagagcctaaacgtgcatgcttgtcactcaaacaccagaagtttgaatcagaggtctgagtgacctcttttgtggctgttcttgatggtttccaggcctcgttatgcatggtttgcttgatgcccattttttgtgccttgtgctgttggatggtaacgaccactcaccatgtaaacacagtacctcagttttctgtccacagctgcagtcgctctgtccctcgtgcttcactgtgggcagccagggacaagcttctgaaagcagtgtgatacccaagtcataggtgcttctcgtatgtgaacaggtgtcattctacagatctgttatgtgttttcctgttgactcttaagagtccctgcatgtaaatctcaaagctgagcctggctcccagagtccagactgacattacagcgcaagagtttgcaagtgtgtccagcatgcaccaactgtgcagaacttggctcggtaactttgcgtggaaaaataaagtacattttgaagtatcttgagggttgggtcaattgagacatttctagcattacttaatgacttgcattgtggtttttctgcaagcaactttaatgactttttttataccacatggtctcccagtttctagatgaatgcaacatgatgatggtgatgatgacgatgagtttaatcattgttcatttattgcctttagggctgagggaaagggaaggtttgtttttttttctccccattttcccccattctgtctttcttttggtgacttacaccacatgtaatgacgctatgactaattctgctcccaagcccttgtatcttgggcttcattttaggctcatgtgtcagatctgcatgcattgcttgcatttttctggtatctgaatgttggttccttgttccaggaattcaacattaatttccaaaagtatcatgggacttgtgacaatacaagacatgaatctatgtataaaatttatcggcctttctcatttacctgctctagtattattgtattgtgtgtgcgtgcgtgtgtgatgtcaggctgccacgtaaaacttcagagaaaaatcttaaaagcagaccatccttttttgcatgctctattctaagtagaatgttcaatgtaactgactaaaattgcatgttaaagatatttaggtttttttgttttctttatttttatttgttttcagtttcctgtatatttgcttactgtgccgttttagtggttttaggataaaaatgcactggtgaagcaaatgtagtgccaacagaaggtgattttccagttgtaaatgtcatgcagcatttgaagggactgtgttttcttaaaaaaaaatcacagttacttctaaaccagatttcatttcttttattgttttatgtgccaaaccacgaagtgcattgggcttcaatctctgaacactgtagacccattagaagactgttccgattgttacaaattgtagtgcctgaaaacactcttaagctgattgtcttaacaaaatgaaagttctccaaagacaaaacagaacaattattataacaaaataattatggttgaaatgtctgtggttccttggaaatgctgcgctctttgtgtttttccatcattagtgcagttggaatgaatgtgtataggtcagaggtcttcgtgttcacattttaaaattaggtaaatgacctcatctttcaagcttgaattcatttttaattttaattttattttatacaatgtgtagacagttccctgttctctgcatttagaagtatacacaatataaatctgttaattctgtaagtaatttttataattatgatgtaactctatcttatccttaaaacatttaaaataaaccctttatgtgcaa

SEQ ID NO: 454177 - DNA, 4404 bp, Homo sapiens
cattttattgcattgattgtgcgttctcgattttacagagagtgcttgtgatttcacgtatttttgctgaactcgtaaaagagacacttggatggtggattaaccagaacactaacattctgtgaaaagtttcaaattggagaatattgaattttcaccctagtccagcagctccgctgctcacttaaatacagatgaatgaagaccccattcggaaagacacctggccagcggtccagagctgatgcaggccatgctggagtatctgccaacatgatgaagaagaggacatcccacaaaaaacatcggagcagtgtgggtccgagcaaacctgtttcccagccccggcggaacatcgtaggctgcaggattcagcatgggtggaaagaggggaatggccctgttacccagtggaaaggaaccgttctggaccaggtgcctgtaaatccttctttgtatcttataaaatacgatggatttgactgtgtttatggactagaacttaataaagatgaaagagtttctgcgcttgaagtcctccctgatagagttgcgacatctcgaatcagcgatgcacacttggcagacacaatgattggcaaagcagtggaacatatgtttgagacagaggatggttctaaagatgagtggaggggaatggtcttagcacgtgcacctgtcatgaacacatggttttacattacctatgagaaagaccctgtcttgtacatgtaccaactcttagatgattacaaagaaggcgaccttcgcattatgcctgattccaatgattcacctccagcagaaagggaaccaggagaagttgtggacagcctggtaggcaaacaagtggaatatgccaaagaagatggctcgaaaaggactggcatggtcattcatcaagtagaagccaagccctccgtctatttcatcaagtttgatgatgatttccatatttatgtctacgatttggtgaaaacatcctagatgtcatcacaaactctgccaaatttgtggaactatgaaatgtattatttgtagacataaagacttgattgctttccagtttaatgaaagcttaaatgtccctgcgaacccacaatctctgccagcagaactggttttgttctgaatagtacagattgatgtgaacacaaagcattttgtgtaaggagaacccctttcttttaaaagaagtctgtctatttcgaggggagttacaggcaagtttggtaaaagttaagctagtatcatagtcatttaaaattgtaatagatcttaaccattttccccctcaccctaactctcttattctgccgccacaatgcaagcatagtttgatgttttcgttattgccttttttgagatgtatgtatctgtatctacctatatctatatgtgtgtatacatatataatatatacacacagatacaagtgtacacacacacaccacacaccacacacaccccactggcagtctttgtggattaggatgggggtgacataattttcttgagtttaacaggagtgctttacccaagtcagtcatggatatgatatcactgctctttatttaaaagtaaactttgggcacaggaaccatatgggaacattcagcttgtttaaaaaaaaaaaatcagaagttcagagcaccttttcaatctggagcccttaaaccataagtccaaatatgaattatttgtgaacagttaatgacccatattagaattttacaatctggtgaacaatctgggtaaaaggctacctttaattctaagcttcatttttttttgggggggggttacattttaatcataaattcttttttgcaaagcccaggttcttgttccacacagtgtaatgtaggtgtattttggacagcacatatggtccattgtgtacaagtcagtaatctggatttcagtacatggatttaaaaggcaacaatccatcactggtttgtgtgtttttggttaagtttctggaagaatacaatgcttttatattggaagtataagttttgagtggcattgttgccttctaacaagctctctgggacttttaaagttttattactattattgctaatgtatgattatggtcagagactttcaacccaccccttcctgcctacccctggcttttcctcacaaagaatgtctagacaaacagcagcttagtctcctgacacctcttgtggggtgcatgttcctgctccaggtatgctgttcatgtggattcattccattcagtggccccttggggtttgcatgccagtgaagcgttaccatagaagagccagccgtttgtgttcgcttggtaggtgtaagtaatagcagcccttagccacggagtctttatgtggtttattcctgcaaggttgttttaaactgaaatagaactgctagtgtgattggttgatcagcaaaacagctgctctcattttgttttggaggaaccctggtggtttgacagccaggagaaaggccatatgtgaaaccagtctcttgtggagattggaaatcctccctgatatttgggcagagcctaaacgtgcatgcttgtcactcaaacaccagaagtttgaatcagaggtctgagtgacctcttttgtggctgttcttgatggtttccaggcctcgttatgcatggtttgcttgatgcccattttttgtgccttgtgctgttggatggtaacgaccactcaccatgtaaacacagtacctcagttttctgtccacagctgcagtcgctctgtccctcgtgcttcactgtgggcagccagggacaagcttctgaaagcagtgtgatacccaagtcataggtgcttctcgtatgtgaacaggtgtcattctacagatctgttatgtgttttcctgttgactcttaagagtccctgcatgtaaatctcaaagctgagcctggctcccagagtccagactgacattacagcgcaagagtttgcaagtgtgtccagcatgcaccaactgtgcagaacttggctcggtaactttgcgtggaaaaataaagtacattttgaagtatcttgagggttgggtcaattgagacatttctagcattacttaatgacttgcattgtggtttttctgcaagcaactttaatgactttttttataccacatggtctcccagtttctagatgaatgcaacatgatgatggtgatgatgacgatgagtttaatcattgttcatttattgcctttagggctgagggaaagggaaggtttgtttttttttctccccattttcccccattctgtctttcttttggtgacttacaccacatgtaatgacgctatgactaattctgctcccaagcccttgtatcttgggcttcattttaggctcatgtgtcagatctgcatgcattgcttgcatttttctggtatctgaatgttggttccttgttccaggaattcaacattaatttccaaaagtatcatgggacttgtgacaatacaagacatgaatctatgtataaaatttatcggcctttctcatttacctgctctagtattattgtattgtgtgtgcgtgcgtgtgtgatgtcaggctgccacgtaaaacttcagagaaaaatcttaaaagcagaccatccttttttgcatgctctattctaagtagaatgttcaatgtaactgactaaaattgcatgttaaagatatttaggtttttttgttttctttatttttatttgttttcagtttcctgtatatttgcttactgtgccgttttagtggttttaggataaaaatgcactggtgaagcaaatgtagtgccaacagaaggtgattttccagttgtaaatgtcatgcagcatttgaagggactgtgttttcttaaaaaaaaatcacagttacttctaaaccagatttcatttcttttattgttttatgtgccaaaccacgaagtgcattgggcttcaatctctgaacactgtagacccattagaagactgttccgattgttacaaattgtagtgcctgaaaacactcttaagctgattgtcttaacaaaatgaaagttctccaaagacaaaacagaacaattattataacaaaataattatggttgaaatgtctgtggttccttggaaatgctgcgctctttgtgtttttccatcattagtgcagttggaatgaatgtgtataggtcagaggtcttcgtgttcacattttaaaattaggtaaatgacctcatctttcaagcttgaattcatttttaattttaattttattttatacaatgtgtagacagttccctgttctctgcatttagaagtatacacaatataaatctgttaattctgtaagtaatttttataattatgatgtaactctatcttatccttaaaacatttaaaataaaccctttatgtgcaa

SEQ ID NO: 454178 - DNA, 4951 bp, Homo sapiens
gtataacagctatccctttttgttacttttctacctgtgagtcttacgtcatcagcactcatttgttgaagattatggtattggctttacttcttttcctccatgatcccatcaacattcttgacatcctcaacatccacacatatgatccattaacctcacacccctgtctcccacccccatactctgtttctttgtgtcccattagacagatgggccatgctgtctaaatcttctgtgaaatcccagcatccacccttttctgatttctagcagcaggatgctttaggataataatggggatgtcagacagcagctgtattgtgttccagttgatcttggaagagcttcacttttgggtcttgcacatgtcccaggcttctttttttaaagagtctatcacctctttttctcctttctactttgtcatgtcctaagaacccaggtcttaggaaataaagttaattgctttgggacaaaatgcactttagctaatacttttgcttaaaattttatgtttaatggctcactaggcataattttgctctcttgatgctctagtaatgaactgtttcactattttacagagtgcttgtgatttcacgtatttttgctgaactcgtaaaagagacacttggatggtggattaaccagaacactaacattctgtgaaaagtttcaaattggagaatattgaattttcaccctagtccagcagctccgctgctcacttaaatacagatgaatgaagaccccattcggaaagacacctggccagcggtccagagctgatgcaggccatgctggagtatctgccaacatgatgaagaagaggacatcccacaaaaaacatcggagcagtgtgggtccgagcaaacctgtttcccagccccggcggaacatcgtaggctgcaggattcagcatgggtggaaagaggggaatggccctgttacccagtggaaaggaaccgttctggaccaggtgcctgtaaatccttctttgtatcttataaaatacgatggatttgactgtgtttatggactagaacttaataaagatgaaagagtttctgcgcttgaagtcctccctgatagagttgcgacatctcgaatcagcgatgcacacttggcagacacaatgattggcaaagcagtggaacatatgtttgagacagaggatggttctaaagatgagtggaggggaatggtcttagcacgtgcacctgtcatgaacacatggttttacattacctatgagaaagaccctgtcttgtacatgtaccaactcttagatgattacaaagaaggcgaccttcgcattatgcctgattccaatgattcacctccagcagaaagggaaccaggagaagttgtggacagcctggtaggcaaacaagtggaatatgccaaagaagatggctcgaaaaggactggcatggtcattcatcaagtagaagccaagccctccgtctatttcatcaagtttgatgatgatttccatatttatgtctacgatttggtgaaaacatcctagatgtcatcacaaactctgccaaatttgtggaactatgaaatgtattatttgtagacataaagacttgattgctttccagtttaatgaaagcttaaatgtccctgcgaacccacaatctctgccagcagaactggttttgttctgaatagtacagattgatgtgaacacaaagcattttgtgtaaggagaacccctttcttttaaaagaagtctgtctatttcgaggggagttacaggcaagtttggtaaaagttaagctagtatcatagtcatttaaaattgtaatagatcttaaccattttccccctcaccctaactctcttattctgccgccacaatgcaagcatagtttgatgttttcgttattgccttttttgagatgtatgtatctgtatctacctatatctatatgtgtgtatacatatataatatatacacacagatacaagtgtacacacacacaccacacaccacacacaccccactggcagtctttgtggattaggatgggggtgacataattttcttgagtttaacaggagtgctttacccaagtcagtcatggatatgatatcactgctctttatttaaaagtaaactttgggcacaggaaccatatgggaacattcagcttgtttaaaaaaaaaaaatcagaagttcagagcaccttttcaatctggagcccttaaaccataagtccaaatatgaattatttgtgaacagttaatgacccatattagaattttacaatctggtgaacaatctgggtaaaaggctacctttaattctaagcttcatttttttttgggggggggttacattttaatcataaattcttttttgcaaagcccaggttcttgttccacacagtgtaatgtaggtgtattttggacagcacatatggtccattgtgtacaagtcagtaatctggatttcagtacatggatttaaaaggcaacaatccatcactggtttgtgtgtttttggttaagtttctggaagaatacaatgcttttatattggaagtataagttttgagtggcattgttgccttctaacaagctctctgggacttttaaagttttattactattattgctaatgtatgattatggtcagagactttcaacccaccccttcctgcctacccctggcttttcctcacaaagaatgtctagacaaacagcagcttagtctcctgacacctcttgtggggtgcatgttcctgctccaggtatgctgttcatgtggattcattccattcagtggccccttggggtttgcatgccagtgaagcgttaccatagaagagccagccgtttgtgttcgcttggtaggtgtaagtaatagcagcccttagccacggagtctttatgtggtttattcctgcaaggttgttttaaactgaaatagaactgctagtgtgattggttgatcagcaaaacagctgctctcattttgttttggaggaaccctggtggtttgacagccaggagaaaggccatatgtgaaaccagtctcttgtggagattggaaatcctccctgatatttgggcagagcctaaacgtgcatgcttgtcactcaaacaccagaagtttgaatcagaggtctgagtgacctcttttgtggctgttcttgatggtttccaggcctcgttatgcatggtttgcttgatgcccattttttgtgccttgtgctgttggatggtaacgaccactcaccatgtaaacacagtacctcagttttctgtccacagctgcagtcgctctgtccctcgtgcttcactgtgggcagccagggacaagcttctgaaagcagtgtgatacccaagtcataggtgcttctcgtatgtgaacaggtgtcattctacagatctgttatgtgttttcctgttgactcttaagagtccctgcatgtaaatctcaaagctgagcctggctcccagagtccagactgacattacagcgcaagagtttgcaagtgtgtccagcatgcaccaactgtgcagaacttggctcggtaactttgcgtggaaaaataaagtacattttgaagtatcttgagggttgggtcaattgagacatttctagcattacttaatgacttgcattgtggtttttctgcaagcaactttaatgactttttttataccacatggtctcccagtttctagatgaatgcaacatgatgatggtgatgatgacgatgagtttaatcattgttcatttattgcctttagggctgagggaaagggaaggtttgtttttttttctccccattttcccccattctgtctttcttttggtgacttacaccacatgtaatgacgctatgactaattctgctcccaagcccttgtatcttgggcttcattttaggctcatgtgtcagatctgcatgcattgcttgcatttttctggtatctgaatgttggttccttgttccaggaattcaacattaatttccaaaagtatcatgggacttgtgacaatacaagacatgaatctatgtataaaatttatcggcctttctcatttacctgctctagtattattgtattgtgtgtgcgtgcgtgtgtgatgtcaggctgccacgtaaaacttcagagaaaaatcttaaaagcagaccatccttttttgcatgctctattctaagtagaatgttcaatgtaactgactaaaattgcatgttaaagatatttaggtttttttgttttctttatttttatttgttttcagtttcctgtatatttgcttactgtgccgttttagtggttttaggataaaaatgcactggtgaagcaaatgtagtgccaacagaaggtgattttccagttgtaaatgtcatgcagcatttgaagggactgtgttttcttaaaaaaaaatcacagttacttctaaaccagatttcatttcttttattgttttatgtgccaaaccacgaagtgcattgggcttcaatctctgaacactgtagacccattagaagactgttccgattgttacaaattgtagtgcctgaaaacactcttaagctgattgtcttaacaaaatgaaagttctccaaagacaaaacagaacaattattataacaaaataattatggttgaaatgtctgtggttccttggaaatgctgcgctctttgtgtttttccatcattagtgcagttggaatgaatgtgtataggtcagaggtcttcgtgttcacattttaaaattaggtaaatgacctcatctttcaagcttgaattcatttttaattttaattttattttatacaatgtgtagacagttccctgttctctgcatttagaagtatacacaatataaatctgttaattctgtaagtaatttttataattatgatgtaactctatcttatccttaaaacatttaaaataaaccctttatgtgcaa

SEQ ID NO: 454179 - DNA, 4296 bp, Homo sapiens
ggcgcggccgtcgcagttcggcgggcgcagtgcgcgtgcgccctgactgttggggggcgggcggcgtccgcggcgagggagcgggggcggggaggcgccgtctggctcaggctggggccggcgggagcgcgaacgagcgacggcggaacccgtgggcctgtggactgcagcctcggcggtcagcagagtgcttgtgatttcacgtatttttgctgaactcgtaaaagagacacttggatggtggattaaccagaacactaacattctgtgaaaagtttcaaattggagaatattgaattttcaccctagtccagcagctccgctgctcacttaaatacagatgaatgaagaccccattcggaaagacacctggccagcggtccagagctgatgcaggccatgctggagtatctgccaacatgatgaagaagaggacatcccacaacgacatctcgaatcagcgatgcacacttggcagacacaatgattggcaaagcagtggaacatatgtttgagacagaggatggttctaaagatgagtggaggggaatggtcttagcacgtgcacctgtcatgaacacatggttttacattacctatgagaaagaccctgtcttgtacatgtaccaactcttagatgattacaaagaaggcgaccttcgcattatgcctgattccaatgattcacctccagcagaaagggaaccaggagaagttgtggacagcctggtaggcaaacaagtggaatatgccaaagaagatggctcgaaaaggactggcatggtcattcatcaagtagaagccaagccctccgtctatttcatcaagtttgatgatgatttccatatttatgtctacgatttggtgaaaacatcctagatgtcatcacaaactctgccaaatttgtggaactatgaaatgtattatttgtagacataaagacttgattgctttccagtttaatgaaagcttaaatgtccctgcgaacccacaatctctgccagcagaactggttttgttctgaatagtacagattgatgtgaacacaaagcattttgtgtaaggagaacccctttcttttaaaagaagtctgtctatttcgaggggagttacaggcaagtttggtaaaagttaagctagtatcatagtcatttaaaattgtaatagatcttaaccattttccccctcaccctaactctcttattctgccgccacaatgcaagcatagtttgatgttttcgttattgccttttttgagatgtatgtatctgtatctacctatatctatatgtgtgtatacatatataatatatacacacagatacaagtgtacacacacacaccacacaccacacacaccccactggcagtctttgtggattaggatgggggtgacataattttcttgagtttaacaggagtgctttacccaagtcagtcatggatatgatatcactgctctttatttaaaagtaaactttgggcacaggaaccatatgggaacattcagcttgtttaaaaaaaaaaaatcagaagttcagagcaccttttcaatctggagcccttaaaccataagtccaaatatgaattatttgtgaacagttaatgacccatattagaattttacaatctggtgaacaatctgggtaaaaggctacctttaattctaagcttcatttttttttgggggggggttacattttaatcataaattcttttttgcaaagcccaggttcttgttccacacagtgtaatgtaggtgtattttggacagcacatatggtccattgtgtacaagtcagtaatctggatttcagtacatggatttaaaaggcaacaatccatcactggtttgtgtgtttttggttaagtttctggaagaatacaatgcttttatattggaagtataagttttgagtggcattgttgccttctaacaagctctctgggacttttaaagttttattactattattgctaatgtatgattatggtcagagactttcaacccaccccttcctgcctacccctggcttttcctcacaaagaatgtctagacaaacagcagcttagtctcctgacacctcttgtggggtgcatgttcctgctccaggtatgctgttcatgtggattcattccattcagtggccccttggggtttgcatgccagtgaagcgttaccatagaagagccagccgtttgtgttcgcttggtaggtgtaagtaatagcagcccttagccacggagtctttatgtggtttattcctgcaaggttgttttaaactgaaatagaactgctagtgtgattggttgatcagcaaaacagctgctctcattttgttttggaggaaccctggtggtttgacagccaggagaaaggccatatgtgaaaccagtctcttgtggagattggaaatcctccctgatatttgggcagagcctaaacgtgcatgcttgtcactcaaacaccagaagtttgaatcagaggtctgagtgacctcttttgtggctgttcttgatggtttccaggcctcgttatgcatggtttgcttgatgcccattttttgtgccttgtgctgttggatggtaacgaccactcaccatgtaaacacagtacctcagttttctgtccacagctgcagtcgctctgtccctcgtgcttcactgtgggcagccagggacaagcttctgaaagcagtgtgatacccaagtcataggtgcttctcgtatgtgaacaggtgtcattctacagatctgttatgtgttttcctgttgactcttaagagtccctgcatgtaaatctcaaagctgagcctggctcccagagtccagactgacattacagcgcaagagtttgcaagtgtgtccagcatgcaccaactgtgcagaacttggctcggtaactttgcgtggaaaaataaagtacattttgaagtatcttgagggttgggtcaattgagacatttctagcattacttaatgacttgcattgtggtttttctgcaagcaactttaatgactttttttataccacatggtctcccagtttctagatgaatgcaacatgatgatggtgatgatgacgatgagtttaatcattgttcatttattgcctttagggctgagggaaagggaaggtttgtttttttttctccccattttcccccattctgtctttcttttggtgacttacaccacatgtaatgacgctatgactaattctgctcccaagcccttgtatcttgggcttcattttaggctcatgtgtcagatctgcatgcattgcttgcatttttctggtatctgaatgttggttccttgttccaggaattcaacattaatttccaaaagtatcatgggacttgtgacaatacaagacatgaatctatgtataaaatttatcggcctttctcatttacctgctctagtattattgtattgtgtgtgcgtgcgtgtgtgatgtcaggctgccacgtaaaacttcagagaaaaatcttaaaagcagaccatccttttttgcatgctctattctaagtagaatgttcaatgtaactgactaaaattgcatgttaaagatatttaggtttttttgttttctttatttttatttgttttcagtttcctgtatatttgcttactgtgccgttttagtggttttaggataaaaatgcactggtgaagcaaatgtagtgccaacagaaggtgattttccagttgtaaatgtcatgcagcatttgaagggactgtgttttcttaaaaaaaaatcacagttacttctaaaccagatttcatttcttttattgttttatgtgccaaaccacgaagtgcattgggcttcaatctctgaacactgtagacccattagaagactgttccgattgttacaaattgtagtgcctgaaaacactcttaagctgattgtcttaacaaaatgaaagttctccaaagacaaaacagaacaattattataacaaaataattatggttgaaatgtctgtggttccttggaaatgctgcgctctttgtgtttttccatcattagtgcagttggaatgaatgtgtataggtcagaggtcttcgtgttcacattttaaaattaggtaaatgacctcatctttcaagcttgaattcatttttaattttaattttattttatacaatgtgtagacagttccctgttctctgcatttagaagtatacacaatataaatctgttaattctgtaagtaatttttataattatgatgtaactctatcttatccttaaaacatttaaaataaaccctttatgtgcaa

SEQ ID NO: 454180 - DNA, 4729 bp, Homo sapiens
ggcgcggccgtcgcagttcggcgggcgcagtgcgcgtgcgccctgactgttggggggcgggcggcgtccgcggcgagggagcgggggcggggaggcgccgtctggctcaggctggggccggcgggagcgcgaacgagcgacggcggaacccgtgggcctgtggactgcagcctcggcggtcagcagagtgcttgtgatttcacgtatttttgctgaactcgtaaaagagacacttggatggtggattaaccagaacactaacattctgtgaaaagtttcaaattggagaatattgaattttcaccctagtccagcagctccgctgctcacttaaatacagatgaatgaagaccccattcggaaagacacctggccagcggtccagagctgatgcaggccatgctggagtatctgccaacatgatgaagaagaggacatcccacaaaaaacatcggagcagtgtgggtccgagcaaacctgtttcccagccccggcggaacatcgtaggctgcaggattcagcatgggtggaaagaggggaatggccctgttacccagtggaaaggaaccgttctggaccaggtgcctgtaaatccttctttgtatcttataaaatacgatggatttgactgtgtttatggactagaacttaataaagatgaaagagtttctgcgcttgaagtcctccctgatagagttgcgacatctcgaatcagcgatgcacacttggcagacacaatgattggcaaagcagtggaacatatgtttgagacagaggatggttctaaagatgagtggaggggaatggtcttagcacgtgcacctgtcatgaacacatggttttacattacctatgagaaagaccctgtcttgtacatgtaccaactcttagatgattacaaagaaggcgaccttcgcattatgcctgattccaatgattcacctccagcagaaagggaaccaggagaagttgtggacagcctggtaggcaaacaagtggaatatgccaaagaagatggctcgaaaaggactggcatggtcattcatcaagtagaagccaagccctccgtctatttcatcaagtttgatgatgatttccatatttatgtctacgatttggtgaaaacatcctagatgtcatcacaaactctgccaaatttgtggaactatgaaatgtattatttgtagacataaagacttgattgctttccagtttaatgaaagcttaaatgtccctgcgaacccacaatctctgccagcagaactggttttgttctgaatagtacagattgatgtgaacacaaagcattttgtgtaaggagaacccctttcttttaaaagaagtctgtctatttcgaggggagttacaggcaagtttggtaaaagttaagctagtatcatagtcatttaaaattgtaatagatcttaaccattttccccctcaccctaactctcttattctgccgccacaatgcaagcatagtttgatgttttcgttattgccttttttgagatgtatgtatctgtatctacctatatctatatgtgtgtatacatatataatatatacacacagatacaagtgtacacacacacaccacacaccacacacaccccactggcagtctttgtggattaggatgggggtgacataattttcttgagtttaacaggagtgctttacccaagtcagtcatggatatgatatcactgctctttatttaaaagtaaactttgggcacaggaaccatatgggaacattcagcttgtttaaaaaaaaaaaatcagaagttcagagcaccttttcaatctggagcccttaaaccataagtccaaatatgaattatttgtgaacagttaatgacccatattagaattttacaatctggtgaacaatctgggtaaaaggctacctttaattctaagcttcatttttttttgggggggggttacattttaatcataaattcttttttgcaaagcccaggttcttgttccacacagtgtaatgtaggtgtattttggacagcacatatggtccattgtgtacaagtcagtaatctggatttcagtacatggatttaaaaggcaacaatccatcactggtttgtgtgtttttggttaagtttctggaagaatacaatgcttttatattggaagtataagttttgagtggcattgttgccttctaacaagctctctgggacttttaaagttttattactattattgctaatgtatgattatggtcagagactttcaacccaccccttcctgcctacccctggcttttcctcacaaagaatgtctagacaaacagcagcttagtctcctgacacctcttgtggggtgcatgttcctgctccaggtatgctgttcatgtggattcattccattcagtggccccttggggtttgcatgccagtgaagcgttaccatagaagagccagccgtttgtgttcgcttggtaggtgtaagtaatagcagcccttagccacggagtctttatgtggtttattcctgcaaggttgttttaaactgaaatagaactgctagtgtgattggttgatcagcaaaacagctgctctcattttgttttggaggaaccctggtggtttgacagccaggagaaaggccatatgtgaaaccagtctcttgtggagattggaaatcctccctgatatttgggcagagcctaaacgtgcatgcttgtcactcaaacaccagaagtttgaatcagaggtctgagtgacctcttttgtggctgttcttgatggtttccaggcctcgttatgcatggtttgcttgatgcccattttttgtgccttgtgctgttggatggtaacgaccactcaccatgtaaacacagtacctcagttttctgtccacagctgcagtcgctctgtccctcgtgcttcactgtgggcagccagggacaagcttctgaaagcagtgtgatacccaagtcataggtgcttctcgtatgtgaacaggtgtcattctacagatctgttatgtgttttcctgttgactcttaagagtccctgcatgtaaatctcaaagctgagcctggctcccagagtccagactgacattacagcgcaagagtttgcaagtgtgtccagcatgcaccaactgtgcagaacttggctcggtaactttgcgtggaaaaataaagtacattttgaagtatcttgagggttgggtcaattgagacatttctagcattacttaatgacttgcattgtggtttttctgcaagcaactttaatgactttttttataccacatggtctcccagtttctagatgaatgcaacatgatgatggtgatgatgacgatgagtttaatcattgttcatttattgcctttagggctgagggaaagggaaggtttgtttttttttctccccattttcccccattctgtctttcttttggtgacttacaccacatgtaatgacgctatgactaattctgctcccaagcccttgtatcttgggcttcattttaggctcatgtgtcagatctgcatgcattgcttgcatttttctggtatctgaatgttggttccttgttccaggaattcaacattaatttccaaaagtatcatgggacttgtgacaatacaagacatgaatctatgtataaaatttatcggcctttctcatttacctgctctagtattattgtattgtgtgtgcgtgcgtgtgtgatgtcaggctgccacgtaaaacttcagagaaaaatcttaaaagcagaccatccttttttgcatgctctattctaagtagaatgttcaatgtaactgactaaaattgcatgttaaagatatttaggtttttttgttttctttatttttatttgttttcagtttcctgtatatttgcttactgtgccgttttagtggttttaggataaaaatgcactggtgaagcaaatgtagtgccaacagaaggtgattttccagttgtaaatgtcatgcagcatttgaagggactgtgttttcttaaaaaaaaatcacagttacttctaaaccagatttcatttcttttattgttttatgtgccaaaccacgaagtgcattgggcttcaatctctgaacactgtagacccattagaagactgttccgattgttacaaattgtagtgcctgaaaacactcttaagctgattgtcttaacaaaatgaaagttctccaaagacaaaacagaacaattattataacaaaataattatggttgaaatgtctgtggttccttggaaatgctgcgctctttgtgtttttccatcattagtgcagttggaatgaatgtgtataggtcagaggtcttcgtgttcacattttaaaattaggtaaatgacctcatctttcaagcttgaattcatttttaattttaattttattttatacaatgtgtagacagttccctgttctctgcatttagaagtatacacaatataaatctgttaattctgtaagtaatttttataattatgatgtaactctatcttatccttaaaacatttaaaataaaccctttatgtgcaaaaaaaagtttaatcgtcaagctgactctaccaggggccaatgtcacgtggcattttcggcctgttaaccacatgagtgtcatttccattacttgccttaactgaagaacgttactactgcaaggtggagcaattgcggctaggatcgaccctttcgcaattcctaggagtttgagctcc

SEQ ID NO: 454181 - DNA, 4491 bp, Homo sapiens
ggcgcggccgtcgcagttcggcgggcgcagtgcgcgtgcgccctgactgttggggggcgggcggcgtccgcggcgagggagcgggggcggggaggcgccgtctggctcaggctggggccggcgggagcgcgaacgagcgacggcggaacccgtgggcctgtggactgcagcctcggcggtcagcagagtgcttgtgatttcacgtatttttgctgaactcgtaaaagagacacttggatggtggattaaccagaacactaacattctgtgaaaagtttcaaattggagaatattgaattttcaccctagtccagcagctccgctgctcacttaaatacagatgaatgaagaccccattcggaaagacacctggccagcggtccagagctgatgcaggccatgctggagtatctgccaacatgatgaagaagaggacatcccacaaaaaacatcggagcagtgtgggtccgagcaaacctgtttcccagccccggcggaacatcgtaggctgcaggattcagcatgggtggaaagaggggaatggccctgttacccagtggaaaggaaccgttctggaccaggtgcctgtaaatccttctttgtatcttataaaatacgatggatttgactgtgtttatggactagaacttaataaagatgaaagagtttctgcgcttgaagtcctccctgatagagttgcgacatctcgaatcagcgatgcacacttggcagacacaatgattggcaaagcagtggaacatatgtttgagacagaggatggttctaaagatgagtggaggggaatggtcttagcacgtgcacctgtcatgaacacatggttttacattacctatgagaaagaccctgtcttgtacatgtaccaactcttagatgattacaaagaaggcgaccttcgcattatgcctgattccaatgattcacctccagcagaaagggaaccaggagaagttgtggacagcctggtaggcaaacaagtggaatatgccaaagaagatggctcgaaaaggactggcatggtcattcatcaagtagaagccaagccctccgtctatttcatcaagtttgatgatgatttccatatttatgtctacgatttggtgaaaacatcctagatgtcatcacaaactctgccaaatttgtggaactatgaaatgtattatttgtagacataaagacttgattgctttccagtttaatgaaagcttaaatgtccctgcgaacccacaatctctgccagcagaactggttttgttctgaatagtacagattgatgtgaacacaaagcattttgtgtaaggagaacccctttcttttaaaagaagtctgtctatttcgaggggagttacaggcaagtttggtaaaagttaagctagtatcatagtcatttaaaattgtaatagatcttaaccattttccccctcaccctaactctcttattctgccgccacaatgcaagcatagtttgatgttttcgttattgccttttttgagatgtatgtatctgtatctacctatatctatatgtgtgtatacatatataatatatacacacagatacaagtgtacacacacacaccacacaccacacacaccccactggcagtctttgtggattaggatgggggtgacataattttcttgagtttaacaggagtgctttacccaagtcagtcatggatatgatatcactgctctttatttaaaagtaaactttgggcacaggaaccatatgggaacattcagcttgtttaaaaaaaaaaaatcagaagttcagagcaccttttcaatctggagcccttaaaccataagtccaaatatgaattatttgtgaacagttaatgacccatattagaattttacaatctggtgaacaatctgggtaaaaggctacctttaattctaagcttcatttttttttgggggggggttacattttaatcataaattcttttttgcaaagcccaggttcttgttccacacagtgtaatgtaggtgtattttggacagcacatatggtccattgtgtacaagtcagtaatctggatttcagtacatggatttaaaaggcaacaatccatcactggtttgtgtgtttttggttaagtttctggaagaatacaatgcttttatattggaagtataagttttgagtggcattgttgccttctaacaagctctctgggacttttaaagttttattactattattgctaatgtatgattatggtcagagactttcaacccaccccttcctgcctacccctggcttttcctcacaaagaatgtctagacaaacagcagcttagtctcctgacacctcttgtggggtgcatgttcctgctccaggtatgctgttcatgtggattcattccattcagtggccccttggggtttgcatgccagtgaagcgttaccatagaagagccagccgtttgtgttcgcttggtaggtgtaagtaatagcagcccttagccacggagtctttatgtggtttattcctgcaaggttgttttaaactgaaatagaactgctagtgtgattggttgatcagcaaaacagctgctctcattttgttttggaggaaccctggtggtttgacagccaggagaaaggccatatgtgaaaccagtctcttgtggagattggaaatcctccctgatatttgggcagagcctaaacgtgcatgcttgtcactcaaacaccagaagtttgaatcagaggtctgagtgacctcttttgtggctgttcttgatggtttccaggcctcgttatgcatggtttgcttgatgcccattttttgtgccttgtgctgttggatggtaacgaccactcaccatgtaaacacagtacctcagttttctgtccacagctgcagtcgctctgtccctcgtgcttcactgtgggcagccagggacaagcttctgaaagcagtgtgatacccaagtcataggtgcttctcgtatgtgaacaggtgtcattctacagatctgttatgtgttttcctgttgactcttaagagtccctgcatgtaaatctcaaagctgagcctggctcccagagtccagactgacattacagcgcaagagtttgcaagtgtgtccagcatgcaccaactgtgcagaacttggctcggtaactttgcgtggaaaaataaagtacattttgaagtatcttgagggttgggtcaattgagacatttctagcattacttaatgacttgcattgtggtttttctgcaagcaactttaatgactttttttataccacatggtctcccagtttctagatgaatgcaacatgatgatggtgatgatgacgatgagtttaatcattgttcatttattgcctttagggctgagggaaagggaaggtttgtttttttttctccccattttcccccattctgtctttcttttggtgacttacaccacatgtaatgacgctatgactaattctgctcccaagcccttgtatcttgggcttcattttaggctcatgtgtcagatctgcatgcattgcttgcatttttctggtatctgaatgttggttccttgttccaggaattcaacattaatttccaaaagtatcatgggacttgtgacaatacaagacatgaatctatgtataaaatttatcggcctttctcatttacctgctctagtattattgtattgtgtgtgcgtgcgtgtgtgatgtcaggctgccacgtaaaacttcagagaaaaatcttaaaagcagaccatccttttttgcatgctctattctaagtagaatgttcaatgtaactgactaaaattgcatgttaaagatatttaggtttttttgttttctttatttttatttgttttcagtttcctgtatatttgcttactgtgccgttttagtggttttaggataaaaatgcactggtgaagcaaatgtagtgccaacagaaggtgattttccagttgtaaatgtcatgcagcatttgaagggactgtgttttcttaaaacacgaagtgcattgggcttcaatctctgaacactgtagacccattagaagactgttccgattgttacaaattgtagtgcctgaaaacactcttaagctgattgtcttaacaaaatgaaagttctccaaagacaaaacagaacaattattataacaaaataattatggttgaaatgtctgtggttccttggaaatgctgcgctctttgtgtttttccatcattagtgcagttggaatgaatgtgtataggtcagaggtcttcgtgttcacattttaaaattaggtaaatgacctcatctttcaagcttgaattcatttttaattttaattttattttatacaatgtgtagacagttccctgttctctgcatttagaagtatacacaatataaatctgttaattctgtaagtaatttttataattatgatgtaactctatcttatccttaaaacatttaaaataaaccctttatgtgcaa

SEQ ID NO: 454182 - DNA, 4496 bp, Homo sapiens
ggcgcggccgtcgcagttcggcgggcgcagtgcgcgtgcgccctgactgttggggggcgggcggcgtccgcggcgagggagcgggggcggggaggcgccgtctggctcaggctggggccggcgggagcgcgaacgagcgacggcggaacccgtgggcctgtggactgcagcctcggcggtcagcagagtgcttgtgatttcacgtatttttgctgaactcgtaaaagagacacttggatggtggattaaccagaacactaacattctgtgaaaagtttcaaattggagaatattgaattttcaccctagtccagcagctccgctgctcacttaaatacagatgaatgaagaccccattcggaaagacacctggccagcggtccagagctgatgcaggccatgctggagtatctgccaacatgatgaagaagaggacatcccacaaaaaacatcggagcagtgtgggtccgagcaaacctgtttcccagccccggcggaacatcgtaggctgcaggattcagcatgggtggaaagaggggaatggccctgttacccagtggaaaggaaccgttctggaccaggtgcctgtaaatccttctttgtatcttataaaatacgatggatttgactgtgtttatggactagaacttaataaagatgaaagagtttctgcgcttgaagtcctccctgatagagttgcgacatctcgaatcagcgatgcacacttggcagacacaatgattggcaaagcagtggaacatatgtttgagacagaggatggttctaaagatgagtggaggggaatggtcttagcacgtgcacctgtcatgaacacatggttttacattacctatgagaaagaccctgtcttgtacatgtaccaactcttagatgattacaaagaaggcgaccttcgcattatgcctgattccaatgattcacctccagcagaaagggaaccaggagaagttgtggacagcctggtaggcaaacaagtggaatatgccaaagaagatggctcgaaaaggactggcatggtcattcatcaagtagaagccaagccctccgtctatttcatcaagtttgatgatgatttccatatttatgtctacgatttggtgaaaacatcctagatgtcatcacaaactctgccaaatttgtggaactatgaaatgtattatttgtagacataaagacttgattgctttccagtttaatgaaagcttaaatgtccctgcgaacccacaatctctgccagcagaactggttttgttctgaatagtacagattgatgtgaacacaaagcattttgtgtaaggagaacccctttcttttaaaagaagtctgtctatttcgaggggagttacaggcaagtttggtaaaagttaagctagtatcatagtcatttaaaattgtaatagatcttaaccattttccccctcaccctaactctcttattctgccgccacaatgcaagcatagtttgatgttttcgttattgccttttttgagatgtatgtatctgtatctacctatatctatatgtgtgtatacatatataatatatacacacagatacaagtgtacacacacacaccacacaccacacacaccccactggcagtctttgtggattaggatgggggtgacataattttcttgagtttaacaggagtgctttacccaagtcagtcatggatatgatatcactgctctttatttaaaagtaaactttgggcacaggaaccatatgggaacattcagcttgtttaaaaaaaaaaaatcagaagttcagagcaccttttcaatctggagcccttaaaccataagtccaaatatgaattatttgtgaacagttaatgacccatattagaattttacaatctggtgaacaatctgggtaaaaggctacctttaattctaagcttcatttttttttgggggggggttacattttaatcataaattcttttttgcaaagcccaggttcttgttccacacagtgtaatgtaggtgtattttggacagcacatatggtccattgtgtacaagtcagtaatctggatttcagtacatggatttaaaaggcaacaatccatcactggtttgtgtgtttttggttaagtttctggaagaatacaatgcttttatattggaagtataagttttgagtggcattgttgccttctaacaagctctctgggacttttaaagttttattactattattgctaatgtatgattatggtcagagactttcaacccaccccttcctgcctacccctggcttttcctcacaaagaatgtctagacaaacagcagcttagtctcctgacacctcttgtggggtgcatgttcctgctccaggtatgctgttcatgtggattcattccattcagtggccccttggggtttgcatgccagtgaagcgttaccatagaagagccagccgtttgtgttcgcttggtaggtgtaagtaatagcagcccttagccacggagtctttatgtggtttattcctgcaaggttgttttaaactgaaatagaactgctagtgtgattggttgatcagcaaaacagctgctctcattttgttttggaggaaccctggtggtttgacagccaggagaaaggccatatgtgaaaccagtctcttgtggagattggaaatcctccctgatatttgggcagagcctaaacgtgcatgcttgtcactcaaacaccagaagtttgaatcagaggtctgagtgacctcttttgtggctgttcttgatggtttccaggcctcgttatgcatggtttgcttgatgcccattttttgtgccttgtgctgttggatggtaacgaccactcaccatgtaaacacagtacctcagttttctgtccacagctgcagtcgctctgtccctcgtgcttcactgtgggcagccagggacaagcttctgaaagcagtgtgatacccaagtcataggtgcttctcgtatgtgaacaggtgtcattctacagatctgttatgtgttttcctgttgactcttaagagtccctgcatgtaaatctcaaagctgagcctggctcccagagtccagactgacattacagcgcaagagtttgcaagtgtgtccagcatgcaccaactgtgcagaacttggctcggtaactttgcgtggaaaaataaagtacattttgaagtatcttgagggttgggtcaattgagacatttctagcattacttaatgacttgcattgtggtttttctgcaagcaactttaatgactttttttataccacatggtctcccagtttctagatgaatgcaacatgatgatggtgatgatgacgatgagtttaatcattgttcatttattgcctttagggctgagggaaagggaaggtttgtttttttttctccccattttcccccattctgtctttcttttggtgacttacaccacatgtaatgacgctatgactaattctgctcccaagcccttgtatcttgggcttcattttaggctcatgtgtcagatctgcatgcattgcttgcatttttctggtatctgaatgttggttccttgttccaggaattcaacattaatttccaaaagtatcatgggacttgtgacaatacaagacatgaatctatgtataaaatttatcggcctttctcatttacctgctctagtattattgtattgtgtgtgcgtgcgtgtgtgatgtcaggctgccacgtaaaacttcagagaaaaatcttaaaagcagaccatccttttttgcatgctctattctaagtagaatgttcaatgtaactgactaaaattgcatgttaaagatatttaggtttttttgttttctttatttttatttgttttcagtttcctgtatatttgcttactgtgccgttttagtggttttaggataaaaatgcactggtgaagcaaatgtagtgccaacagaaggtgattttccagttgtaaatgtcatgcagcatttgaagggactgtgttttcttaaaaaaaaatcacagttacttctaaaccagatttcatttcttttattgttttatgtgccaaaccacgaagtgcattgggcttcaatctctgaacactgtagacccattagaagactgttccgattgttacaaattgtagtgcctgaaaacactcttaagctgattgtcttaacaaaatgaaagttctccaaagacaaaacagaacaattattataacgtttttccatcattagtgcagttggaatgaatgtgtataggtcagaggtcttcgtgttcacattttaaaattaggtaaatgacctcatctttcaagcttgaattcatttttaattttaattttattttatacaatgtgtagacagttccctgttctctgcatttagaagtatacacaatataaatctgttaattctgtaagtaatttttataattatgatgtaactctatcttatccttaaaacatttaaaataaaccctttatgtgcaa

SEQ ID NO: 454183 - DNA, 3686 bp, Homo sapiens
ggcgcggccgtcgcagttcggcgggcgcagtgcgcgtgcgccctgactgttggggggcgggcggcgtccgcggcgagggagcgggggcggggaggcgccgtctggctcaggctggggccggcgggagcgcgaacgagcgacggcggaacccgtgggcctgtggactgcagcctcggcggtcagcagagtgcttgtgatttcacgtatttttgctgaactcgtaaaagagacacttggatggtggattaaccagaacactaacattctgtgaaaagtttcaaattggagaatattgaattttcaccctagtccagcagctccgctgctcacttaaatacagatgaatgaagaccccattcggaaagacacctggccagcggtccagagctgatgcaggccatgctggagtatctgccaacatgatgaagaagaggacatcccacaaaaaacatcggagcagtgtgggtccgagcaaacctgtttcccagccccggcggaacatcgtaggctgcaggattcagcatgggtggaaagaggggaatggccctgttacccagtggaaaggaaccgttctggaccaggtgcctgtaaatccttctttgtatcttataaaatacgatggatttgactgtgtttatggactagaacttaataaagatgaaagagtttctgcgcttgaagtcctccctgatagagttgcgacatctcgaatcagcgatgcacacttggcagacacaatgattggcaaagcagtggaacatatgtttgagacagaggatggttctaaagatgagtggaggggaatggtcttagcacgtgcacctgtcatgaacacatggttttacattacctatgagaaagaccctgtcttgtacatgtaccaactcttagatgattacaaagaaggcgaccttcgcattatgcctgattccaatgattcacctccagcagaaagggaaccaggagaagttgtggacagcctggtaggcaaacaagtggaatatgccaaagaagatggctcgaaaaggactggcatggtcattcatcaagtagaagccaagccctccgtctatttcatcaagtttgatgatgatttccatatttatgtctacgatttggtgaaaacatcctagatgtcatcacaaactctgccaaatttgtggaactatgaaatgtattatttgtagacataaagacttgattgctttccagtttaatgaaagcttaaatgtccctgcgaacccacaatctctgccagcagaactggttttgttctgaatagtacagattgatgtgaacacaaagcattttgtgtaaggagaacccctttcttttaaaagaagtctgtctatttcgaggggagttacaggcaagtttggtaaaagttaagctagtatcatagtcatttaaaattgtaatagatcttaaccattttccccctcaccctaactctcttattctgccgccacaatgcaagcatagtttgatgttttcgttattgccttttttgagatgtatgtatctgtatctacctatatctatatgtgtgtatacatatataatatatacacacagatacaagtgtacacacacacaccacacaccacacacaccccactggcagtctttgtggattaggatgggggtgacataattttcttgagtttaacaggagtgctttacccaagtcagtcatggatatgatatcactgctctttatttaaaagtaaactttgggcacaggaaccatatgggaacattcagcttgtttaaaaaaaaaaaatcagaagttcagagcaccttttcaatctggagcccttaaaccataagtccaaatatgaattatttgtgaacagttaatgacccatattagaattttacaatctggtgaacaatctgggtaaaaggctacctttaattctaagcttcatttttttttgggggggggttacattttaatcataaattcttttttgcaaagcccaggttcttgttccacacagtgtaatgtaggtgtattttggacagcacatatggtccattgtgtacaagtcagtaatctggatttcagtacatggatttaaaaggcaacaatccatcactggtttgtgtgtttttggttaagtttctggaagaatacaatgcttttatattggaagtataagttttgagtggcattgttgccttctaacaagctctctgggacttttaaagttttattactattattgctaatgtatgattatggtcagagactttcaacccaccccttcctgcctacccctggcttttcctcacaaagaatgtctagacaaacagcagcttagtctcctgacacctcttgtggggtgcatgttcctgctccaggtatgctgttcatgtggattcattccattcagtggccccttggggtttgcatgccagtgaagcgttaccatagaagagccagccgtttgtgttcgcttggtaggtgtaagtaatagcagcccttagccacggagtctttatgtggtttattcctgcaaggttgttttaaactgaaatagaactgctagtgtgattggttgatcagcaaaacagctgctctcattttgttttggaggaaccctggtggtttgacagccaggagaaaggccatatgtgaaaccagtctcttgtggagattggaaatcctccctgatatttgggcagagcctaaacgtgcatgcttgtcactcaaacaccagaagtttgaatcagaggtctgagtgacctcttttgtggctgttcttgatggtttccaggcctcgttatgcatggtttgcttgatgcccattttttgtgccttgtgctgttggatggtaacgaccactcaccatgtaaacacagtacctcagttttctgtccacagctgcagtcgctctgtccctcgtgcttcactgtgggcagccagggacaagcttctgaaagcagtgtgatacccaagtcataggtgcttctcgtatgtgaacaggtgtcattctacagatctgttatgtgttttcctgttgactcttaagagtccctgcatgtaaatctcaaagctgagcctggctcccagagtccagactgacattacagcgcaagagtttgcaagtgtgtccagcatgcaccaactgtgcagaacttggctcggtaactttgcgtggaaaaataaagtacattttgaagtatcttgagggttgggtcaattgagacatttctagcattacttaatgacttgcattgtggtttttctgcaagcaactttaatgactttttttataccacatggtctcccagtttctagatgaatgtccgtccaagttgacggacgcattcataggaaggtgtttcattttggtgtgcaaccctgtcattacgtcaacgcaacgtctaactggacttcccaagataaatggtaccagcgtcctcttaaaagatgccttaatccattccttgaggacagaccttagttgaaatgatagcagaatgtgcttctctctggcagctgcccttctgcttctgagtgcacattaatcagattagcctgtattctcttcagtgaattttaataatggcttccagactctttggcgttgagacgcctgttagaatcttcaagtcccatcatagaaaattgaacacagagtgttctgctgatattttgggatacgtccgggatccta

SEQ ID NO: 454184 - DNA, 4550 bp, Homo sapiens
ggcgcggccgtcgcagttcggcgggcgcagtgcgcgtgcgccctgactgttggggggcgggcggcgtccgcggcgagggagcgggggcggggaggcgccgtctggctcaggctggggccggcgggagcgcgaacgagcgacggcggaacccgtgggcctgtggactgcagcctcggcggtcagcagagtgcttgtgatttcacgtatttttgctgaactcgtaaaagagacacttggatggtggattaaccagaacactaacattctgtgaaaagtttcaaattggagaatattgaattttcaccctagtccagcagctccgctgctcacttaaatacagatgaatgaagaccccattcggaaagacacctggccagcggtccagagctgatgcaggccatgctggagtatctgccaacatgatgaagaagaggacatcccacaaaaaacatcggagcagtgtgggtccgagcaaacctgtttcccagccccggcggaacatcgtaggctgcaggattcagcatgggtggaaagaggggaatggccctgttacccagtggaaaggaaccgttctggaccaggtgcctgtaaatccttctttgtatcttataaaatacgatggatttgactgtgtttatggactagaacttaataaagatgaaagagtttctgcgcttgaagtcctccctgatagagttgcgacatctcgaatcagcgatgcacacttggcagacacaatgattggcaaagcagtggaacatatgtttgagacagaggatggttctaaagatgagtggaggggaatggtcttagcacgtgcacctgtcatgaacacatggttttacattacctatgagaaagaccctgtcttgtacatgtaccaactcttagatgattacaaagaaggcgaccttcgcattatgcctgattccaatgattcacctccagcagaaagggaaccaggagaagttgtggacagcctggtaggcaaacaagtggaatatgccaaagaagatggctcgaaaaggactggcatggtcattcatcaagtagaagccaagccctccgtctatttcatcaagtttgatgatgatttccatatttatgtctacgatttggtgaaaacatcctagatgtcatcacaaactctgccaaatttgtggaactatgaaatgtattatttgtagacataaagacttgattgctttccagtttaatgaaagcttaaatgtccctgcgaacccacaatctctgccagcagaactggttttgttctgaatagtacagattgatgtgaacacaaagcattttgtgtaaggagaacccctttcttttaaaagaagtctgtctatttcgaggggagttacaggcaagtttggtaaaagttaagctagtatcatagtcatttaaaattgtaatagatcttaaccattttccccctcaccctaactctcttattctgccgccacaatgcaagcatagtttgatgttttcgttattgccttttttgagatgtatgtatctgtatctacctatatctatatgtgtgtatacatatataatatatacacacagatacaagtgtacacacacacaccacacaccacacacaccccactggcagtctttgtggattaggatgggggtgacataattttcttgagtttaacaggagtgctttacccaagtcagtcatggatatgatatcactgctctttatttaaaagtaaactttgggcacaggaaccatatgggaacattcagcttgtttaaaaaaaaaaaatcagaagttcagagcaccttttcaatctggagcccttaaaccataagtccaaatatgaattatttgtgaacagttaatgacccatattagaattttacaatctggtgaacaatctgggtaaaaggctacctttaattctaagcttcatttttttttgggggggggttacattttaatcataaattcttttttgcaaagcccaggttcttgttccacacagtgtaatgtaggtgtattttggacagcacatatggtccattgtgtacaagtcagtaatctggatttcagtacatggatttaaaaggcaacaatccatcactggtttgtgtgtttttggttaagtttctggaagaatacaatgcttttatattggaagtataagttttgagtggcattgttgccttctaacaagctctctgggacttttaaagttttattactattattgctaatgtatgattatggtcagagactttcaacccaccccttcctgcctacccctggcttttcctcacaaagaatgtctagacaaacagcagcttagtctcctgacacctcttgtggggtgcatgttcctgctccaggtatgctgttcatgtggattcattccattcagtggccccttggggtttgcatgccagtgaagcgttaccatagaagagccagccgtttgtgttcgcttggtaggtgtaagtaatagcagcccttagccacggagtctttatgtggtttattcctgcaaggttgttttaaactgaaatagaactgctagtgtgattggttgatcagcaaaacagctgctctcattttgttttggaggaaccctggtggtttgacagccaggagaaaggccatatgtgaaaccagtctcttgtggagattggaaatcctccctgatatttgggcagagcctaaacgtgcatgcttgtcactcaaacaccagaagtttgaatcagaggtctgagtgacctcttttgtggctgttcttgatggtttccaggcctcgttatgcatggtttgcttgatgcccattttttgtgccttgtgctgttggatggtaacgaccactcaccatgtaaacacagtacctcagttttctgtccacagctgcagtcgctctgtccctcgtgcttcactgtgggcagccagggacaagcttctgaaagcagtgtgatacccaagtcataggtgcttctcgtatgtgaacaggtgtcattctacagatctgttatgtgttttcctgttgactcttaagagtccctgcatgtaaatctcaaagctgagcctggctcccagagtccagactgacattacagcgcaagagtttgcaagtgtgtccagcatgcaccaactgtgcagaacttggctcggtaactttgcgtggaaaaataaagtacattttgaagtatcttgagggttgggtcaattgagacatttctagcattacttaatgacttgcattgtggtttttctgcaagcaactttaatgactttttttataccacatggtctcccagtttctagatgaatgcaacatgatgatggtgatgatgacgatgagtttaatcattgttcatttattgcctttagggctgagggaaagggaaggtttgtttttttttctccccattttcccccattctgtctttcttttggtgacttacaccacatgtaatgacgctatgactaattctgctcccaagcccttgtatcttgggcttcattttaggctcatgtgtcagatctgcatgcattgcttgcatttttctggtatctgaatgttggttccttgttccaggaattcaacattaatttccaaaagtatcatgggacttgtgacaatacaagacatgaatctatgtataaaatttatcggcctttctcatttacctgctctagtattattgtattgtgtgtgcgtgcgtgtgtgatgtcaggctgccacgtaaaacttcagagaaaaatcttaaaagcagaccatccttttttgcatgctctattctaagtagaatgttcaatgtaactgactaaaattgcatgttaaagatatttaggtttttttgttttctttatttttatttgttttcagtttcctgtatatttgcttactgtgccgttttagtggttttaggataaaaatgcactggtgaagcaaatgtagtgccaacagaaggtgattttccagttgtaaatgtcatgcagcatttgaagggactgtgttttcttaaaaaaaaatcacagttacttctaaaccagatttcatttcttttattgttttatgtgccaaaccacgaagtgcattgggcttcaatctctgaacactgtagacccattagaagactgttccgattgttacaaattgtagtgcctgaaaacactcttaagctgattgtcttaacaaaatgaaagttctccaaagacaaaacagaacaattattataacaaaataattatggttgaaatgtctgtggttccttggaaatgctgcgctctttgtgtttttccatcattagtgcagttggaatgaatgtgtataggtcagaggtcttcgtgttcacattttaaaattaggtaaatgacctcatctttcaagcttgaattcatttttaattttaattttattttatacaatgtgtagacagttccctgttctctgcatttagaagtatacacaatataaatctgttaattctgtaagtaatttttataattatgatgtaactctatcttatccttaaaacatttaaaataaaccctttatgtgcaa

SEQ ID NO: 454185 - DNA, 4496 bp, Homo sapiens
ggcgcggccgtcgcagttcggcgggcgcagtgcgcgtgcgccctgactgttggggggcgggcggcgtccgcggcgagggagcgggggcggggaggcgccgtctggctcaggctggggccggcgggagcgcgaacgagcgacggcggaacccgtgggcctgtggactgcagcctcggcggtcagcagagtgcttgtgatttcacgtatttttgctgaactcgtaaaagagacacttggatggtggattaaccagaacactaacattctgtgaaaagtttcaaattggagaatattgaattttcaccctagtccagcagctccgctgctcacttaaatacagatgaatgaagaccccattcggaaagacacctggccagcggtccagagctgatgcaggccatgctggagtatctgccaacatgatgaagaagaggacatcccacaaaaaacatcggagcagtgtgggtccgagcaaacctgtttcccagccccggcggaacatcgtaggctgcaggattcagcatgggtggaaagaggggaatggccctgttacccagtggaaaggaaccgttctggaccaggtgcctgtaaatccttctttgtatcttataaaatacgatggatttgactgtgtttatggactagaacttaataaagatgaaagagtttctgcgcttgaagtcctccctgatagagttgcgacatctcgaatcagcgatgcacacttggcagacacaatgattggcaaagcagtggaacatatgtttgagacagaggatggttctaaagatgagtggaggggaatggtcttagcacgtgcacctgtcatgaacacatggttttacattacctatgagaaagaccctgtcttgtacatgtaccaactcttagatgattacaaagaaggcgaccttcgcattatgcctgattccaatgattcacctccagcagaaagggaaccaggagaagttgtggacagcctggtaggcaaacaagtggaatatgccaaagaagatggctcgaaaaggactggcatggtcattcatcaagtagaagccaagccctccgtctatttcatcaagtttgatgatgatttccatatttatgtctacgatttggtgaaaacatcctagatgtcatcacaaactctgccaaatttgtggaactatgaaatgtattatttgtagacataaagacttgattgctttccagtttaatgaaagcttaaatgtccctgcgaacccacaatctctgccagcagaactggttttgttctgaatagtacagattgatgtgaacacaaagcattttgtgtaaggagaacccctttcttttaaaagaagtctgtctatttcgaggggagttacaggcaagtttggtaaaagttaagctagtatcatagtcatttaaaattgtaatagatcttaaccattttccccctcaccctaactctcttattctgccgccacaatgcaagcatagtttgatgttttcgttattgccttttttgagatgtatgtatctgtatctacctatatctatatgtgtgtatacatatataatatatacacacagatacaagtgtacacacacacaccacacaccacacacaccccactggcagtctttgtggattaggatgggggtgacataattttcttgagtttaacaggagtgctttacccaagtcagtcatggatatgatatcactgctctttatttaaaagtaaactttgggcacaggaaccatatgggaacattcagcttgtttaaaaaaaaaaaatcagaagttcagagcaccttttcaatctggagcccttaaaccataagtccaaatatgaattatttgtgaacagttaatgacccatattagaattttacaatctggtgaacaatctgggtaaaaggctacctttaattctaagcttcatttttttttgggggggggttacattttaatcataaattcttttttgcaaagcccaggttcttgttccacacagtgtaatgtaggtgtattttggacagcacatatggtccattgtgtacaagtcagtaatctggatttcagtacatggatttatacaatgcttttatattggaagtataagttttgagtggcattgttgccttctaacaagctctctgggacttttaaagttttattactattattgctaatgtatgattatggtcagagactttcaacccaccccttcctgcctacccctggcttttcctcacaaagaatgtctagacaaacagcagcttagtctcctgacacctcttgtggggtgcatgttcctgctccaggtatgctgttcatgtggattcattccattcagtggccccttggggtttgcatgccagtgaagcgttaccatagaagagccagccgtttgtgttcgcttggtaggtgtaagtaatagcagcccttagccacggagtctttatgtggtttattcctgcaaggttgttttaaactgaaatagaactgctagtgtgattggttgatcagcaaaacagctgctctcattttgttttggaggaaccctggtggtttgacagccaggagaaaggccatatgtgaaaccagtctcttgtggagattggaaatcctccctgatatttgggcagagcctaaacgtgcatgcttgtcactcaaacaccagaagtttgaatcagaggtctgagtgacctcttttgtggctgttcttgatggtttccaggcctcgttatgcatggtttgcttgatgcccattttttgtgccttgtgctgttggatggtaacgaccactcaccatgtaaacacagtacctcagttttctgtccacagctgcagtcgctctgtccctcgtgcttcactgtgggcagccagggacaagcttctgaaagcagtgtgatacccaagtcataggtgcttctcgtatgtgaacaggtgtcattctacagatctgttatgtgttttcctgttgactcttaagagtccctgcatgtaaatctcaaagctgagcctggctcccagagtccagactgacattacagcgcaagagtttgcaagtgtgtccagcatgcaccaactgtgcagaacttggctcggtaactttgcgtggaaaaataaagtacattttgaagtatcttgagggttgggtcaattgagacatttctagcattacttaatgacttgcattgtggtttttctgcaagcaactttaatgactttttttataccacatggtctcccagtttctagatgaatgcaacatgatgatggtgatgatgacgatgagtttaatcattgttcatttattgcctttagggctgagggaaagggaaggtttgtttttttttctccccattttcccccattctgtctttcttttggtgacttacaccacatgtaatgacgctatgactaattctgctcccaagcccttgtatcttgggcttcattttaggctcatgtgtcagatctgcatgcattgcttgcatttttctggtatctgaatgttggttccttgttccaggaattcaacattaatttccaaaagtatcatgggacttgtgacaatacaagacatgaatctatgtataaaatttatcggcctttctcatttacctgctctagtattattgtattgtgtgtgcgtgcgtgtgtgatgtcaggctgccacgtaaaacttcagagaaaaatcttaaaagcagaccatccttttttgcatgctctattctaagtagaatgttcaatgtaactgactaaaattgcatgttaaagatatttaggtttttttgttttctttatttttatttgttttcagtttcctgtatatttgcttactgtgccgttttagtggttttaggataaaaatgcactggtgaagcaaatgtagtgccaacagaaggtgattttccagttgtaaatgtcatgcagcatttgaagggactgtgttttcttaaaaaaaaatcacagttacttctaaaccagatttcatttcttttattgttttatgtgccaaaccacgaagtgcattgggcttcaatctctgaacactgtagacccattagaagactgttccgattgttacaaattgtagtgcctgaaaacactcttaagctgattgtcttaacaaaatgaaagttctccaaagacaaaacagaacaattattataacaaaataattatggttgaaatgtctgtggttccttggaaatgctgcgctctttgtgtttttccatcattagtgcagttggaatgaatgtgtataggtcagaggtcttcgtgttcacattttaaaattaggtaaatgacctcatctttcaagcttgaattcatttttaattttaattttattttatacaatgtgtagacagttccctgttctctgcatttagaagtatacacaatataaatctgttaattctgtaagtaatttttataattatgatgtaactctatcttatccttaaaacatttaaaataaaccctttatgtgcaa

SEQ ID NO: 454186 - DNA, 4817 bp, Homo sapiens
ggcgcggccgtcgcagttcggcgggcgcagtgcgcgtgcgccctgactgttggggggcgggcggcgtccgcggcgagggagcgggggcggggaggcgccgtctggctcaggctggggccggcgggagcgcgaacgagcgacggcggaacccgtgggcctgtggactgcagcctcggcggtcagcagcaatgaggtcttactgtgtagcccaggctgctctggaactcctggactcaagtgatcttcctaccttggtcttccaaagtgttgggattacaggaagtttatctcgacaatgctagttgcagtctgtgtgaccctgaccaagttattttaatgtctgtgctgcagtttttcagtttccaagatggaatagttatagtgcatatcttcctcatggttgtgaggagtgcatgacacatagcgagtgctcagtgaacagtcatttttctgagtgcttgtgatttcacgtatttttgctgaactcgtaaaagagacacttggatggtggattaaccagaacactaacattctgtgaaaagtttcaaattggagaatattgaattttcaccctagtccagcagctccgctgctcacttaaatacagatgaatgaagaccccattcggaaagacacctggccagcggtccagagctgatgcaggccatgctggagtatctgccaacatgatgaagaagaggacatcccacaaaaaacatcggagcagtgtgggtccgagcaaacctgtttcccagccccggcggaacatcgtaggctgcaggattcagcatgggtggaaagaggggaatggccctgttacccagtggaaaggaaccgttctggaccaggtgcctgtaaatccttctttgtatcttataaaatacgatggatttgactgtgtttatggactagaacttaataaagatgaaagagtttctgcgcttgaagtcctccctgatagagttgcgacatctcgaatcagcgatgcacacttggcagacacaatgattggcaaagcagtggaacatatgtttgagacagaggatggttctaaagatgagtggaggggaatggtcttagcacgtgcacctgtcatgaacacatggttttacattacctatgagaaagaccctgtcttgtacatgtaccaactcttagatgattacaaagaaggcgaccttcgcattatgcctgattccaatgattcacctccagcagaaagggaaccaggagaagttgtggacagcctggtaggcaaacaagtggaatatgccaaagaagatggctcgaaaaggactggcatggtcattcatcaagtagaagccaagccctccgtctatttcatcaagtttgatgatgatttccatatttatgtctacgatttggtgaaaacatcctagatgtcatcacaaactctgccaaatttgtggaactatgaaatgtattatttgtagacataaagacttgattgctttccagtttaatgaaagcttaaatgtccctgcgaacccacaatctctgccagcagaactggttttgttctgaatagtacagattgatgtgaacacaaagcattttgtgtaaggagaacccctttcttttaaaagaagtctgtctatttcgaggggagttacaggcaagtttggtaaaagttaagctagtatcatagtcatttaaaattgtaatagatcttaaccattttccccctcaccctaactctcttattctgccgccacaatgcaagcatagtttgatgttttcgttattgccttttttgagatgtatgtatctgtatctacctatatctatatgtgtgtatacatatataatatatacacacagatacaagtgtacacacacacaccacacaccacacacaccccactggcagtctttgtggattaggatgggggtgacataattttcttgagtttaacaggagtgctttacccaagtcagtcatggatatgatatcactgctctttatttaaaagtaaactttgggcacaggaaccatatgggaacattcagcttgtttaaaaaaaaaaaatcagaagttcagagcaccttttcaatctggagcccttaaaccataagtccaaatatgaattatttgtgaacagttaatgacccatattagaattttacaatctggtgaacaatctgggtaaaaggctacctttaattctaagcttcatttttttttgggggggggttacattttaatcataaattcttttttgcaaagcccaggttcttgttccacacagtgtaatgtaggtgtattttggacagcacatatggtccattgtgtacaagtcagtaatctggatttcagtacatggatttaaaaggcaacaatccatcactggtttgtgtgtttttggttaagtttctggaagaatacaatgcttttatattggaagtataagttttgagtggcattgttgccttctaacaagctctctgggacttttaaagttttattactattattgctaatgtatgattatggtcagagactttcaacccaccccttcctgcctacccctggcttttcctcacaaagaatgtctagacaaacagcagcttagtctcctgacacctcttgtggggtgcatgttcctgctccaggtatgctgttcatgtggattcattccattcagtggccccttggggtttgcatgccagtgaagcgttaccatagaagagccagccgtttgtgttcgcttggtaggtgtaagtaatagcagcccttagccacggagtctttatgtggtttattcctgcaaggttgttttaaactgaaatagaactgctagtgtgattggttgatcagcaaaacagctgctctcattttgttttggaggaaccctggtggtttgacagccaggagaaaggccatatgtgaaaccagtctcttgtggagattggaaatcctccctgatatttgggcagagcctaaacgtgcatgcttgtcactcaaacaccagaagtttgaatcagaggtctgagtgacctcttttgtggctgttcttgatggtttccaggcctcgttatgcatggtttgcttgatgcccattttttgtgccttgtgctgttggatggtaacgaccactcaccatgtaaacacagtacctcagttttctgtccacagctgcagtcgctctgtccctcgtgcttcactgtgggcagccagggacaagcttctgaaagcagtgtgatacccaagtcataggtgcttctcgtatgtgaacaggtgtcattctacagatctgttatgtgttttcctgttgactcttaagagtccctgcatgtaaatctcaaagctgagcctggctcccagagtccagactgacattacagcgcaagagtttgcaagtgtgtccagcatgcaccaactgtgcagaacttggctcggtaactttgcgtggaaaaataaagtacattttgaagtatcttgagggttgggtcaattgagacatttctagcattacttaatgacttgcattgtggtttttctgcaagcaactttaatgactttttttataccacatggtctcccagtttctagatgaatgcaacatgatgatggtgatgatgacgatgagtttaatcattgttcatttattgcctttagggctgagggaaagggaaggtttgtttttttttctccccattttcccccattctgtctttcttttggtgacttacaccacatgtaatgacgctatgactaattctgctcccaagcccttgtatcttgggcttcattttaggctcatgtgtcagatctgcatgcattgcttgcatttttctggtatctgaatgttggttccttgttccaggaattcaacattaatttccaaaagtatcatgggacttgtgacaatacaagacatgaatctatgtataaaatttatcggcctttctcatttacctgctctagtattattgtattgtgtgtgcgtgcgtgtgtgatgtcaggctgccacgtaaaacttcagagaaaaatcttaaaagcagaccatccttttttgcatgctctattctaagtagaatgttcaatgtaactgactaaaattgcatgttaaagatatttaggtttttttgttttctttatttttatttgttttcagtttcctgtatatttgcttactgtgccgttttagtggttttaggataaaaatgcactggtgaagcaaatgtagtgccaacagaaggtgattttccagttgtaaatgtcatgcagcatttgaagggactgtgttttcttaaaaaaaaatcacagttacttctaaaccagatttcatttcttttattgttttatgtgccaaaccacgaagtgcattgggcttcaatctctgaacactgtagacccattagaagactgttccgattgttacaaattgtagtgcctgaaaacactcttaagctgattgtcttaacaaaatgaaagttctccaaagacaaaacagaacaattattataacaaaataattatggttgaaatgtctgtggttccttggaaatgctgcgctctttgtgtttttccatcattagtgcagttggaatgaatgtgtataggtcagaggtcttcgtgttcacattttaaaattaggtaaatgacctcatctttcaagcttgaattcatttttaattttaattttattttatacaatgtgtagacagttccctgttctctgcatttagaagtatacacaatataaatctgttaattctgtaagtaatttttataattatgatgtaactctatcttatccttaaaacatttaaaataaaccctttatgtgcaa

SEQ ID NO: 454187 - DNA, 4652 bp, Homo sapiens
ggcgcggccgtcgcagttcggcgggcgcagtgcgcgtgcgccctgactgttggggggcgggcggcgtccgcggcgagggagcgggggcggggaggcgccgtctggctcaggctggggccggcgggagcgcgaacgagcgacggcggaacccgtgggcctgtggactgcagcctcggcggtcagcagtttttcagtttccaagatggaatagttatagtgcatatcttcctcatggttgtgaggagtgcatgacacatagcgagtgctcagtgaacagtcatttttctgagtgcttgtgatttcacgtatttttgctgaactcgtaaaagagacacttggatggtggattaaccagaacactaacattctgtgaaaagtttcaaattggagaatattgaattttcaccctagtccagcagctccgctgctcacttaaatacagatgaatgaagaccccattcggaaagacacctggccagcggtccagagctgatgcaggccatgctggagtatctgccaacatgatgaagaagaggacatcccacaaaaaacatcggagcagtgtgggtccgagcaaacctgtttcccagccccggcggaacatcgtaggctgcaggattcagcatgggtggaaagaggggaatggccctgttacccagtggaaaggaaccgttctggaccaggtgcctgtaaatccttctttgtatcttataaaatacgatggatttgactgtgtttatggactagaacttaataaagatgaaagagtttctgcgcttgaagtcctccctgatagagttgcgacatctcgaatcagcgatgcacacttggcagacacaatgattggcaaagcagtggaacatatgtttgagacagaggatggttctaaagatgagtggaggggaatggtcttagcacgtgcacctgtcatgaacacatggttttacattacctatgagaaagaccctgtcttgtacatgtaccaactcttagatgattacaaagaaggcgaccttcgcattatgcctgattccaatgattcacctccagcagaaagggaaccaggagaagttgtggacagcctggtaggcaaacaagtggaatatgccaaagaagatggctcgaaaaggactggcatggtcattcatcaagtagaagccaagccctccgtctatttcatcaagtttgatgatgatttccatatttatgtctacgatttggtgaaaacatcctagatgtcatcacaaactctgccaaatttgtggaactatgaaatgtattatttgtagacataaagacttgattgctttccagtttaatgaaagcttaaatgtccctgcgaacccacaatctctgccagcagaactggttttgttctgaatagtacagattgatgtgaacacaaagcattttgtgtaaggagaacccctttcttttaaaagaagtctgtctatttcgaggggagttacaggcaagtttggtaaaagttaagctagtatcatagtcatttaaaattgtaatagatcttaaccattttccccctcaccctaactctcttattctgccgccacaatgcaagcatagtttgatgttttcgttattgccttttttgagatgtatgtatctgtatctacctatatctatatgtgtgtatacatatataatatatacacacagatacaagtgtacacacacacaccacacaccacacacaccccactggcagtctttgtggattaggatgggggtgacataattttcttgagtttaacaggagtgctttacccaagtcagtcatggatatgatatcactgctctttatttaaaagtaaactttgggcacaggaaccatatgggaacattcagcttgtttaaaaaaaaaaaatcagaagttcagagcaccttttcaatctggagcccttaaaccataagtccaaatatgaattatttgtgaacagttaatgacccatattagaattttacaatctggtgaacaatctgggtaaaaggctacctttaattctaagcttcatttttttttgggggggggttacattttaatcataaattcttttttgcaaagcccaggttcttgttccacacagtgtaatgtaggtgtattttggacagcacatatggtccattgtgtacaagtcagtaatctggatttcagtacatggatttaaaaggcaacaatccatcactggtttgtgtgtttttggttaagtttctggaagaatacaatgcttttatattggaagtataagttttgagtggcattgttgccttctaacaagctctctgggacttttaaagttttattactattattgctaatgtatgattatggtcagagactttcaacccaccccttcctgcctacccctggcttttcctcacaaagaatgtctagacaaacagcagcttagtctcctgacacctcttgtggggtgcatgttcctgctccaggtatgctgttcatgtggattcattccattcagtggccccttggggtttgcatgccagtgaagcgttaccatagaagagccagccgtttgtgttcgcttggtaggtgtaagtaatagcagcccttagccacggagtctttatgtggtttattcctgcaaggttgttttaaactgaaatagaactgctagtgtgattggttgatcagcaaaacagctgctctcattttgttttggaggaaccctggtggtttgacagccaggagaaaggccatatgtgaaaccagtctcttgtggagattggaaatcctccctgatatttgggcagagcctaaacgtgcatgcttgtcactcaaacaccagaagtttgaatcagaggtctgagtgacctcttttgtggctgttcttgatggtttccaggcctcgttatgcatggtttgcttgatgcccattttttgtgccttgtgctgttggatggtaacgaccactcaccatgtaaacacagtacctcagttttctgtccacagctgcagtcgctctgtccctcgtgcttcactgtgggcagccagggacaagcttctgaaagcagtgtgatacccaagtcataggtgcttctcgtatgtgaacaggtgtcattctacagatctgttatgtgttttcctgttgactcttaagagtccctgcatgtaaatctcaaagctgagcctggctcccagagtccagactgacattacagcgcaagagtttgcaagtgtgtccagcatgcaccaactgtgcagaacttggctcggtaactttgcgtggaaaaataaagtacattttgaagtatcttgagggttgggtcaattgagacatttctagcattacttaatgacttgcattgtggtttttctgcaagcaactttaatgactttttttataccacatggtctcccagtttctagatgaatgcaacatgatgatggtgatgatgacgatgagtttaatcattgttcatttattgcctttagggctgagggaaagggaaggtttgtttttttttctccccattttcccccattctgtctttcttttggtgacttacaccacatgtaatgacgctatgactaattctgctcccaagcccttgtatcttgggcttcattttaggctcatgtgtcagatctgcatgcattgcttgcatttttctggtatctgaatgttggttccttgttccaggaattcaacattaatttccaaaagtatcatgggacttgtgacaatacaagacatgaatctatgtataaaatttatcggcctttctcatttacctgctctagtattattgtattgtgtgtgcgtgcgtgtgtgatgtcaggctgccacgtaaaacttcagagaaaaatcttaaaagcagaccatccttttttgcatgctctattctaagtagaatgttcaatgtaactgactaaaattgcatgttaaagatatttaggtttttttgttttctttatttttatttgttttcagtttcctgtatatttgcttactgtgccgttttagtggttttaggataaaaatgcactggtgaagcaaatgtagtgccaacagaaggtgattttccagttgtaaatgtcatgcagcatttgaagggactgtgttttcttaaaaaaaaatcacagttacttctaaaccagatttcatttcttttattgttttatgtgccaaaccacgaagtgcattgggcttcaatctctgaacactgtagacccattagaagactgttccgattgttacaaattgtagtgcctgaaaacactcttaagctgattgtcttaacaaaatgaaagttctccaaagacaaaacagaacaattattataacaaaataattatggttgaaatgtctgtggttccttggaaatgctgcgctctttgtgtttttccatcattagtgcagttggaatgaatgtgtataggtcagaggtcttcgtgttcacattttaaaattaggtaaatgacctcatctttcaagcttgaattcatttttaattttaattttattttatacaatgtgtagacagttccctgttctctgcatttagaagtatacacaatataaatctgttaattctgtaagtaatttttataattatgatgtaactctatcttatccttaaaacatttaaaataaaccctttatgtgcaa

SEQ ID NO: 454188 - DNA, 4777 bp, Homo sapiens
ggcgcggccgtcgcagttcggcgggcgcagtgcgcgtgcgccctgactgttggggggcgggcggcgtccgcggcgagggagcgggggcggggaggcgccgtctggctcaggctggggccggcgggagcgcgaacgagcgacggcggaacccgtgggcctgtggactgcagcctcggcggtcagcagagtgcttgtgatttcacgtatttttgctgaactcgtaaaagagacacttggatggtggattaaccagaacactaacattctgtgaaaagtttcaaattggagaatattgaattttcaccctagtccagcagctccgctgctcacttaaatacagatgaatgaagaccccattcggaaagacacctggccagcggtccagagctgatgcaggccatgctggagtatctgccaacatgatgaagaagaggacatcccacaaaaaacatcggagcagtgtgggtccgagcaaacctgtttcccagccccggcggaacatcgtaggctgcaggattcagcatgggtggaaagaggggaatggccctgttacccagtggaaaggaaccgttctggaccaggtgcctgtaaatccttctttgtatcttataaaatacgatggatttgactgtgtttatggactagaacttaataaagatgaaagagtttctgcgcttgaagtcctccctgatagagttgcgacatctcgaatcagcgatgcacacttggcagacacaatgattggcaaagcagtggaacatatgtttgagacagaggatggttctaaagatgagtggaggggaatggtcttagcacgtgcacctgtcatgaacacatggttttacattacctatgagaaagaccctgtcttgtacatgtaccaactcttagatgattacaaagaaggcgaccttcgcattatgcctgattccaatgattcacctccagcagaaagggaaccaggagaagttgtggacagcctggtaggcaaacaagtggaatatgccaaagaagatggctcgaaaaggactggcatggtcattcatcaagtagaagccaagccctccgtctatttcatcaagtttgatgatgatttccatatttatgtctacgatttggtgaaaacatcctagatgtcatcacaaactctgccaaatttgtggaactatgaaatgtattatttgtagacataaagacttgattgctttccagtttaatgaaagcttaaatgtccctgcgaacccacaatctctgccagcagaactggttttgttctgaatagtacagattgatgtgaacacaaagcattttgtgtaaggagaacccctttcttttaaaagaagtctgtctatttcgaggggagttacaggcaagtttggtaaaagttaagctagtatcatagtcatttaaaattgtaatagatcttaaccattttccccctcaccctaactctcttattctgccgccacaatgcaagcatagtttgatgttttcgttattgccttttttgagatgtatgtatctgtatctacctatatctatatgtgtgtatacatatataatatatacacacagatacaagtgtacacacacacaccacacaccacacacaccccactggcagtctttgtggattaggatgggggtgacataattttcttgagtttaacaggagtgctttacccaagtcagtcatggatatgatatcactgctctttatttaaaagtaaactttgggcacaggaaccatatgggaacattcagcttgtttaaaaaaaaaaaatcagaagttcagagcaccttttcaatctggagcccttaaaccataagtccaaatatgaattatttgtgaacagttaatgacccatattagaattttacaatctggtgaacaatctgggtaaaaggctacctttaattctaagcttcatttttttttgggggggggttacattttaatcataaattcttttttgcaaagcccaggttcttgttccacacagtgtaatgtaggtgtattttggacagcacatatggtccattgtgtacaagtcagtaatctggatttcagtacatggatttaaaaggcaacaatccatcactggtttgtgtgtttttggttaagtttctggaagaatacaatgcttttatattggaagtataagttttgagtggcattgttgccttctaacaagctctctgggacttttaaagttttattactattattgctaatgtatgattatggtcagagactttcaacccaccccttcctgcctacccctggcttttcctcacaaagaatgtctagacaaacagcagcttagtctcctgacacctcttgtggggtgcatgttcctgctccaggtatgctgttcatgtggattcattccattcagtggccccttggggtttgcatgccagtgaagcgttaccatagaagagccagccgtttgtgttcgcttggtaggtgtaagtaatagcagcccttagccacggagtctttatgtggtttattcctgcaaggttgttttaaactgaaatagaactgctagtgtgattggttgatcagcaaaacagctgctctcattttgttttggaggaaccctggtggtttgacagccaggagaaaggccatatgtgaaaccagtctcttgtggagattggaaatcctccctgatatttgggcagagcctaaacgtgcatgcttgtcactcaaacaccagaagtttgaatcagaggtctgagtgacctcttttgtggctgttcttgatggtttccaggcctcgttatgcatggtttgcttgatgcccattttttgtgccttgtgctgttggatggtaacgaccactcaccatgtaaacacagtacctcagttttctgtccacagctgcagtcgctctgtccctcgtgcttcactgtgggcagccagggacaagcttctgaaagcagtgtgatacccaagtcataggtgcttctcgtatgtgaacaggtgtcattctacagatctgttatgtgttttcctgttgactcttaagagtccctgcatgtaaatctcaaagctgagcctggctcccagagtccagactgacattacagcgcaagagtttgcaagtgtgtccagcatgcaccaactgtgcagaacttggctcggtaactttgcgtggaaaaataaagtacattttgaagtatcttgagggttgggtcaattgagacatttctagcattacttaatgacttgcattgtggtttttctgcaagcaactttaatgactttttttataccacatggtctcccagtttctagatgaatgcaacatgatgatggtgatgatgacgatgagtttaatcattgttcatttattgcctttagggctgagggaaagggaaggtttgtttttttttctccccattttcccccattctgtctttcttttggtgacttacaccacatgtaatgacgctatgactaattctgctcccaagcccttgtatcttgggcttcattttaggctcatgtgtcagatctgcatgcattgcttgcatttttctggtatctgaatgttggttccttgttccaggaattcaacattaatttccaaaagtatcatgggacttgtgacaatacaagacatgaatctatgtataaaatttatcggcctttctcatttacctgctctagtattattgtattgtgtgtgcgtgcgtgtgtgatgtcaggctgccacgtaaaacttcagagaaaaatcttaaaagcagaccatccttttttgcatgctctattctaagtagaatgttcaatgtaactgactaaaattgcatgttaaagatatttaggtttttttgttttctttatttttatttgttttcagtttcctgtatatttgcttactgtgccgttttagtggttttaggataaaaatgcactggtgaagcaaatgtagtgccaacagaaggtgattttccagttgtaaatgtcatgcagcatttgaagggactgtgttttcttaaaaaaaaatcacagttacttctaaaccagatttcatttcttttattgttttatgtgccaaaccacgaagtgcattgggcttcaatctctgaacactgtagacccattagaagactgttccgattgttacaaattgtagtgcctgaaaacactcttaagctgattgtcttaacaaaatgaaagttctccaaagacaaaacagaacaattattataacaaaataattatggttgaaatgtctgtggttccttggaaatgctgcgctctttgtgtttttccatcattagtgcagttggaatgaatgtgtataggtcagaggtcttcgtgttcacattttaaaattaggtaaatgacctcatctttcaagcttgaattcatttttaattttaattttattttatacaatgtgtagacagttccctgttctctgcatttagaagtatacacaatataaatctgttaattctgtaagtaatttttataattatgatgtaactctatcttatccttaaaacatttaaaataaaccctttatgtgcaactcctgactgtaaaagtttgtgctgatgagcaacatgtgatgtgttaaacttgattctgaaaagttttttgggccaagtaaccttttcaccacatgtaaatgtcagatatgcatagaaagaaatagaatttttatttgataacattcaataatacctgaaagaagaggaggcagtcatcaatatcacacatatattaaatattgaagtttgcaatttgacattgaga

SEQ ID NO: 454189 - DNA, 4496 bp, Homo sapiens
ggcgcggccgtcgcagttcggcgggcgcagtgcgcgtgcgccctgactgttggggggcgggcggcgtccgcggcgagggagcgggggcggggaggcgccgtctggctcaggctggggccggcgggagcgcgaacgagcgacggcggaacccgtgggcctgtggactgcagcctcggcggtcagcagagtgcttgtgatttcacgtatttttgctgaactcgtaaaagagacacttggatggtggattaaccagaacactaacattctgtgaaaagtttcaaattggagaatattgaattttcaccctagtccagcagctccgctgctcacttaaatacagatgaatgaagaccccattcggaaagacacctggccagcggtccagagctgatgcaggccatgctggagtatctgccaacatgatgaagaagaggacatcccacaaaaaacatcggagcagtgtgggtccgagcaaacctgtttcccagccccggcggaacatcgtaggctgcaggattcagcatgggtggaaagaggggaatggccctgttacccagtggaaaggaaccgttctggaccaggtgcctgtaaatccttctttgtatcttataaaatacgatggatttgactgtgtttatggactagaacttaataaagatgaaagagtttctgcgcttgaagtcctccctgatagagttgcgacatctcgaatcagcgatgcacacttggcagacacaatgattggcaaagcagtggaacatatgtttgagacagaggatggttctaaagatgagtggaggggaatggtcttagcacgtgcacctgtcatgaacacatggttttacattacctatgagaaagaccctgtcttgtacatgtaccaactcttagatgattacaaagaaggcgaccttcgcattatgcctgattccaatgattcacctccagcagaaagggaaccaggagaagttgtggacagcctggtaggcaaacaagtggaatatgccaaagaagatggctcgaaaaggactggcatggtcattcatcaagtagaagccaagccctccgtctatttcatcaagtttgatgatgatttccatatttatgtctacgatttggtgaaaacatcctagatgtcatcacaaactctgccaaatttgtggaactatgaaatgtattatttgtagacataaagacttgattgctttccagtttaatgaaagcttaaatgtccctgcgaacccacaatctctgccagcagaactggttttgttctgaatagtacagattgatgtgaacacaaagcattttgtgtaaggagaacccctttcttttaaaagaagtctgtctatttcgaggggagttacaggcaagtttggtaaaagttaagctagtatcatagtcatttaaaattgtaatagatcttaaccattttccccctcaccctaactctcttattctgccgccacaatgcaagcatagtttgatgttttcgttattgccttttttgagatgtatgtatctgtatctacctatatctatatgtgtgtatacatatataatatatacacacagatacaagtgtacacacacacaccacacaccacacacaccccactggcagtctttgtggattaggatgggggtgacataattttcttgagtttaacaggagtgctttacccaagtcagtcatggatatgatatcactgctctttatttaaaagtaaactttgggcacaggaaccatatgggaacattcagcttgtttaaaaaaaaaaaatcagaagttcagagcaccttttcaatctggagcccttaaaccataagtccaaatatgaattatttgtgaacagttaatgacccatattagaattttacaatctggtgaacaatctgggtaaaaggctacctttaattctaagcttcatttttttttgggggggggttacattttaatcataaattcttttttgcaaagcccaggttcttgttccacacagtgtaatgtaggtgtattttggacagcacatatggtccattgtgtacaagtcagtaatctggatttcagtacatggatttaaaaggcaacaatccatcactggtttgtgtgtttttggttaagtttctggaagaatacaatgcttttatattggaagtataagttttgagtggcattgttgccttctaacaagctctctgggacttttaaagttttattactattattgctaatgtatgattatggtcagagactttcaacccaccccttcctgcctacccctggcttttcctcacaaagaatgtctagacaaacagcagcttagtctcctgacacctcttgtggggtgcatgttcctgctccaggtatgctgttcatgtggattcattccattcagtggccccttggggtttgcatgccagtgaagcgttaccatagaagagccagccgtttgtgttcgcttggtaggtgtaagtaatagcagcccttagccacggagtctttatgtggtttattcctgcaaggttgttttaaactgaaatagaactgctagtgtgattggttgatcagcaaaacagctgctctcattttgttttggaggaaccctggtggtttgacagccaggagaaaggccatatgtgaaaccagtctcttgtggagattggaaatcctccctgatatttgggcagagcctaaacgtgcatgcttgtcactcaaacaccagaagtttgaatcagaggtctgagtgacctcttttgtggctgttcttgatggtttccaggcctcgttatgcatggtttgcttgatgcccattttttgtgccttgtgctgttggatggtaacgaccactcaccatgtaaacacagtacctcagttttctgtccacagctgcagtcgctctgtccctcgtgcttcactgtgggcagccagggacaagcttctgaaagcagtgtgatacccaagtcataggtgcttctcgtatgtgaacaggtgtcattctacagatctgttatgtgttttcctgttgactcttaagagtccctgcatgtaaatctcaaagctgagcctggctcccagagtccagactgacattacagcgcaagagtttgcaagtgtgtccagcatgcaccaactgtgcagaacttggctcggtaactttgcgtggaaaaataaagtacattttgaagtatcttgagggttgggtcaattgagacatttctagcattacttaatgacttgcattgtggtttttctgcaagcaactttaatgactttttttataccacatggtctcccagtttctagatgaatgcaacatgatgatggtgatgatgacgatgagtttaatcattgttcatttattgcctttagggctgagggaaagggaaggtttgtttttttttctccccattttcccccattctgtctttcttttggtgacttacaccacatgtaatgacgctatgactaattctgctcccaagcccttgtatcttgggcttcattttaggctcatgtgtcagatctgcatgcattgcttgcatttttctggtatctgaatgttggttccttgttccaggaattcaacattaatttccaaaagtatcatgggacttgtgacaatacaagacatgaatctatgtataaaatttatcggcctttctcatttacctgctctagtattattgtattgtgtgtgcgtgcgtgtgtgatgtcaggctgccacgtaaaacttcagagaaaaatcttaaaagcagaccatccttttttgcatgctctattctaagtagaatgttcaatgtaactgactaaaattgcatgttaaagatatttaggtttttttgttttctttatttttatttgttttcagtttcctgtatatttgcttactgtgccgttttagtggttttaggataaaaatgcactggtgaagcaaatgtagtgccaacagaaggtgattttccagttgtaaatgtcatgcagcatttgaagggactgtgttttcttaaaaaaaaatcacagttacttctaaaccagatttcatttcttttattgttttatgtgccaaaccacgaagtgcattgggcttcaatctctgaacactgtagacccattagaagactgttccgattgttacaaattgtagtgcctgaaaacactcttaagctgattgtcttaacaaaatgaaagttctccaaagacaaaacagaacaattattataacaaaataattatggttgaaatgtctgtggttccttggaaatgctgcgctctttgtgtttttccatcattagtgcagttggaatgaatgtgtataggtcagaggtcttcgtgttcacatttttttattttatacaatgtgtagacagttccctgttctctgcatttagaagtatacacaatataaatctgttaattctgtaagtaatttttataattatgatgtaactctatcttatccttaaaacatttaaaataaaccctttatgtgcaa

SEQ ID NO: 454190 - DNA, 3993 bp, Homo sapiens
ggcgcggccgtcgcagttcggcgggcgcagtgcgcgtgcgccctgactgttggggggcgggcggcgtccgcggcgagggagcgggggcggggaggcgccgtctggctcaggctggggccggcgggagcgcgaacgagcgacggcggaacccgtgggcctgtggactgcagcctcggcggtcagcagagtgcttgtgatttcacgtatttttgctgaactcgtaaaagagacacttggatggtggattaaccagaacactaacattctgtgaaaagtttcaaattggagaatattgaattttcaccctagtccagcagctccgctgctcacttaaatacagatgaatgaagaccccattcggaaagacacctggccagcggtccagagctgatgcaggccatgctggagtatctgccaacatgatgaagaagaggacatcccacaaaaaacatcggagcagtgtgggtccgagcaaacctgtttcccagccccggcggaacatcgtaggctgcaggattcagcatgggtggaaagaggggaatggccctgttacccagtggaaaggaaccgttctggaccaggtgcctgtaaatccttctttgtatcttataaaatacgatggatttgactgtgtttatggactagaacttaataaagatgaaagagtttctgcgcttgaagtcctccctgatagagttgcgacatctcgaatcagcgatgcacacttggcagacacaatgattggcaaagcagtggaacatatgtttgagacagaggatggttctaaagatgagtggaggggaatggtcttagcacgtgcacctgtcatgaacacatggttttacattacctatgagaaagaccctgtcttgtacatgtaccaactcttagatgattacaaagaaggcgaccttcgcattatgcctgattccaatgattcacctccagcagaaagggaaccaggagaagttgtggacagcctggtaggcaaacaagtggaatatgccaaagaagatggctcgaaaaggactggcatggtcattcatcaagtagaagccaagccctccgtctatttcatcaagtttgatgatgatttccatatttatgtctacgatttggtgaaaacatcctagatgtcatcacaaactctgccaaatttgtggaactatgaaatgtattatttgtagacataaagacttgattgctttccagtttaatgaaagcttaaatgtccctgcgaacccacaatctctgccagcagaactggttttgttctgaatagtacagattgatgtgaacacaaagcattttgtgtaaggagaacccctttcttttaaaagaagtctgtctatttcgaggggagttacaggcaagtttggtaaaagttaagctagtatcatagtcatttaaaattgtaatagatcttaaccattttccccctcaccctaactctcttattctgccgccacaatgcaagcatagtttgatgttttcgttattgccttttttgagatgtatgtatctgtatctacctatatctatatgtgtgtatacatatataatatatacacacagatacaagtgtacacacacacaccacacaccacacacaccccactggcagtctttgtggattaggatgggggtgacataattttcttgagtttaacaggagtgctttacccaagtcagtcatggatatgatatcactgctctttatttaaaagtaaactttgggcacaggaaccatatgggaacattcagcttgtttaaaaaaaaaaaatcagaagttcagagcaccttttcaatctggagcccttaaaccataagtccaaatatgaattatttgtgaacagttaatgacccatattagaattttacaatctggtgaacaatctgggtaaaaggctacctttaattctaagcttcatttttttttgggggggggttacattttaatcataaattcttttttgcaaagcccaggttcttgttccacacagtgtaatgtaggtgtattttggacagcacatatggtccattgtgtacaagtcagtaatctggatttcagtacatggatttaaaaggcaacaatccatcactggtttgtgtgtttttggttaagtttctggaagaatacaatgcttttatattggaagtataagttttgagtggcattgttgccttctaacaagctctctgggacttttaaagttttattactattattgctaatgtatgattatggtcagagactttcaacccaccccttcctgcctacccctggcttttcctcacaaagaatgtctagacaaacagcagcttagtctcctgacacctcttgtggggtgcatgttcctgctccaggtatgctgttcatgtggattcattccattcagtggccccttggggtttgcatgccagtgaagcgttaccatagaagagccagccgtttgtgttcgcttggtaggtgtaagtaatagcagcccttagccacggagtctttatgtggtttattcctgcaaggttgttttaaactgaaatagaactgctagtgtgattggttgatcagcaaaacagctgctctcattttgttttggaggaaccctggtggtttgacagccaggagaaaggccatatgtgaaaccagtctcttgtggagattggaaatcctccctgatatttgggcagagcctaaacgtgcatgcttgtcactcaaacaccagaagtttgaatcagaggtctgagtgacctcttttgtggctgttcttgatggtttccaggcctcgttatgcatggtttgcttgatgcccattttttgtgccttgtgctgttggatggtaacgaccactcaccatgtaaacacagtacctcagttttctgtccacagctgcagtcgctctgtccctcgtgcttcactgtgggcagccagggacaagcttctgaaagcagtgtgatacccaagtcataggtgcttctcgtatgtgaacaggtgtcattctacagatctgttatgtgttttcctgttgactcttaagagtccctgcatgtaaatctcaaagctgagcctggctcccagagtccagactgacattacagcgcaagagtttgcaagtgtgtccagcatgcaccaactgtgcagaacttggctcggtaactttgcgtggaaaaataaagtacattttgaagtatcttgagggttgggtcaattgagacatttctagcattacttaatgacttgcattgtggtttttctgcaagcaactttaatgactttttttataccacatggtctcccagtttctagatgaatgcaacatgatgatggtgatgatgacgatgagtttaatcattgttcatttattgcctttagggctgagggaaagggaaggtttgtttttttttctccccattttcccccattctgtctttcttttggtgacttacaccacatgtaatgacgctatgactaattctgctcccaagcccttgtatcttgggcttcattttaggctcatgtgtcagatctgcatgcattgcttgcatttttctggtatctgaatgttggttccttgttccaggaattcaacattaatttccaaaagtatcatgggacttgtgacaatacaagacatgaatctatgtataaaatttatcggcctttctcatttacctgctctagtattattgtattgtgtgtgcgtgcgtgtgtgatgtcaggctgccacgtaaaacttcagagaaaaatcttaaaagcagaccatccttttttgcatgctctattctaagtagaatgttcaatgtaactgactaaaattgcatgttaaagatatttaggtttttttgttttctttatttttatttgttttcagtttcctgtatatttgcttactgtgccgttttagtggttttaggataaaaatgcactggtgaagcacagacacctatccgaatgtcactgcccattttcatcatcacgaggttaacgcgtat

SEQ ID NO: 454191 - DNA, 686 bp, Homo sapiens
ggcgcggccgtcgcagttcggcgggcgcagtgcgcgtgcgccctgactgttggggggcgggcggcgtccgcggcgagggagcgggggcggggaggcgccgtctggctcaggctggggccggcgggagcgcgaacgagcgacggcggaacccgtgggcctgtggactgcagcctcggcggtcagcagcaatgaggtcttactgtgtagcccaggctgctctggaactcctggactcaagtgatcttcctaccttggtcttccaaagtgttgggattacaggaagtttatctcgacaatgctagttgcagtctgtgtgaccctgaccaagttattttaatgtctgtgctgcagtttttcagtttccaagatggaatagttatagtgcatatcttcctcatggttgtgaggagtgcatgacacatagcgagtgctcagtgaacagtcatttttctggtaagtagttggagaattttttgatctcctttgagattgcaatagaatgagaattttgagtttcagaatttaagttcatgacacatttttaagattagtaaaattgcaagcctggatactgttagataagagttctaaatttctcttcaaagaatcaatatgtcagtatgttcaattctttgccttctacttttccaccctggctcattctgattacctgctccaccctgact

SEQ ID NO: 454192 - DNA, 783 bp, Homo sapiens
ttctcccttatggtctttggacagatgcagtactgtaaagggccgatactgttttttcccctttaatcttgactgttatagaacagtcttcactgtatatagaacctttaattttatctcttgaaaatgaggatcttggccaggcgcagtggctcacacttgtaatcccagcactttgggaggccaaggcgggcggatcacttgaggtcaggaggccagcctggccaacatggtgaaacccagtctctactaaaaatacaaagattagccaggcatggtggcacgtgcctgtagtcccagctactcgggaggctgagacaggagaatcacttgaacctgggaggtagaggttgcagtgagctgagattgtgccactgcactccaacctgggcaacagggcgagactctgtcttaaaaaaaggaaaaagaaaaagaaaaagaaaatgagggtcttatcatttccctaatgttttctcccatcacttaaacctcacactaaatggtttcattcacataatcacatgtattctatatacttgtaaaatgtatttggtttggcttagctatttaccacatttaagaaatgattgtttctcttagaatgtttatctttttctcccccaacagaacacagttctctggctttttggaaaactgatgcatccgatgtaaagccatgctaaggtggttttcagattccacataaaatgtcacacttgtttcttgttcatccaaggaacctaattgaaatttaaaaataaagctactgaatttattgccgca

SEQ ID NO: 454193 - DNA, 332 bp, Homo sapiens
cagggcgagacctgtcaaaaaactcccatcacttaaacctcacactaaatggtttcattcacataatcacatgtattctatatacttgtaaaatgtatttggtttggcttagctatttaccacatttaagaaatgattgtttctcttagaatgtttatctttttctcccccaacagaacacagttctctggctttttggaaaactgatgcatccgatgtaaagccatgctaaggtggttttcagattccacataaaatgtcacacttgtttcttgttcatccaaggaacctaattgaaatttaaaaataaagctactgaatttattgccgca

SEQ ID NO: 454194 - DNA, 666 bp, Homo sapiens
tcagcatccacctcagcctcccaaagtgccaggatgaccgaagtgagccactgtgcctggccacatgaattctgttttatttaatgtgtggtagaaccaaaattgagccaagcagtctgactctggagtttgtacccttaattacctccttaaactacctctgagaatattgtgctcctggctccagccttgctttctcgcactgcagctcataaggacgtgggtttgggcctctactgttgaggatcttaaggaggccaggaagcagcaccatttttctttgacgtatttcctgctggcttcttccatagtctgaattgaataacagtaagatttactattttaaagccaaataatggtgtactaagtgtgaatgggggggggggttcagtctttgcattttaattttatggtttgttagaaatagactttgcttttcttctttcaaacccaccatcttagactgtgtagagatgaagtttgcaataaataataccttatgattatatgtgtttcttttttaatatccagggtaccacagatataagaggagtggggacagaattaagcacaaggtaactataaattgcattccagttacaggaacacacagtgattcagtggtgtgacagagacaaggatgtaactatttcatgactattggat

SEQ ID NO: 454195 - DNA, 1211 bp, Homo sapiens
gcgctttcatatttggctctgtctttttagcagacgaaaaccactttggtagtgccagtgtgactcatccacaatgatttctccagtgctcatcttgttctcgagttttctctgccatgttgctattgcaggacggacctgtcccaagccagatgatttaccattttccacagtggtcccgttaaaaacattctatgagccaggagaagagattacgtattcctgcaagccgggctatgtgtcccgaggagggatgagaaagtttatctgccctctcacaggactgtggcccatcaacactctgaaatgtacacccagagtatgtccttttgctggaatcttagaaaatggagccgtacgctatacgacttttgaatatcccaacacgatcagtttttcttgtaacactgggttttatctgaatggcgctgattctgccaagtgcactgaggaaggaaaatggagcccggagcttcctgtctgtgctcccatcatctgccctccaccatccatacctacgtttgcaacacttcgtgtttataagccatcagctggaaacaattccctctatcgggacacagcagtttttgaatgtttgccacaacatgcgatgtttggaaatgatacaattacctgcacgacacatggaaattggactaaattaccagaatgcagggaagtaaaatgcccattcccatcaagaccagacaatggatttgtgaactatcctgcaaaaccaacactttattacaaggataaagccacatttggctgccatgatggatattctctggatggcccggaagaaatagaatgtaccaaactgggaaactggtctgccatgccaagttgtaaagcatcttgtaaagtacctgtgaaaaaagccactgtggtgtaccaaggagagagagtaaagattcaggaaaaatttaagaatggaatgctacatggtgataaagtttctttcttctgcaaaaataaggaaaagaagtgtagctatacagaggatgctcagtgtatagatggcactatcgaagtccccaaatgcttcaaggaacacagttctctggctttttggaaaactgatgcatccgatgtaaagccatgctaaggtggttttcagattccacataaaatgtcacacttgtttcttgttcatccaaggaacctaattgaaatttaaaaataaagctactgaatttattgccgca

SEQ ID NO: 454196 - DNA, 1359 bp, Homo sapiens
gggccgctgccgccatgttgttgtggttgtgagaaggcggcggcggcggcggagtagcagccggacgagacgtcccagcggctcaggcgctgcccagcgccggccctggcagggagcctggtggggtggcggagggggagactgtgccgtggagggcctcgccatgtcctgctgcccgcagacgaaaaccactttggtagtgccagtgtgactcatccacaatgatttctccagtgctcatcttgttctcgagttttctctgccatgttgctattgcaggacggacctgtcccaagccagatgatttaccattttccacagtggtcccgttaaaaacattctatgagccaggagaagagattacgtattcctgcaagccgggctatgtgtcccgaggagggatgagaaagtttatctgccctctcacaggactgtggcccatcaacactctgaaatgtacacccagagtatgtccttttgctggaatcttagaaaatggagccgtacgctatacgacttttgaatatcccaacacgatcagtttttcttgtaacactgggttttatctgaatggcgctgattctgccaagtgcactgaggaaggaaaatggagcccggagcttcctgtctgtgctcccatcatctgccctccaccatccatacctacgtttgcaacacttcgtgtttataagccatcagctggaaacaattccctctatcgggacacagcagtttttgaatgtttgccacaacatgcgatgtttggaaatgatacaattacctgcacgacacatggaaattggactaaattaccagaatgcagggaagtaaaatgcccattcccatcaagaccagacaatggatttgtgaactatcctgcaaaaccaacactttattacaaggataaagccacatttggctgccatgatggatattctctggatggcccggaagaaatagaatgtaccaaactgggaaactggtctgccatgccaagttgtaaagcatcttgtaaagtacctgtgaaaaaagccactgtggtgtaccaaggagagagagtaaagattcaggaaaaatttaagaatggaatgctacatggtgataaagtttctttcttctgcaaaaataaggaaaagaagtgtagctatacagaggatgctcagtgtatagatggcactatcgaagtccccaaatgcttcaaggaacacagttctctggctttttggaaaactgatgcatccgatgtaaagccatgctaaggtggttttcagattccacataaaatgtcacacttgtttcttgttcatccaaggaacctaattgaaatttaaaaataaagctactgaatttattgccgca

SEQ ID NO: 454197 - DNA, 1639 bp, Homo sapiens
  misc_feature (1239)..(1239): n is a, c, g, or t
  misc_feature (1250)..(1250): n is a, c, g, or t
  misc_feature (1257)..(1257): n is a, c, g, or t
  misc_feature (1266)..(1266): n is a, c, g, or t
  misc_feature (1269)..(1269): n is a, c, g, or t
  misc_feature (1274)..(1274): n is a, c, g, or t
  misc_feature (1289)..(1289): n is a, c, g, or t
  misc_feature (1292)..(1292): n is a, c, g, or t
  misc_feature (1303)..(1303): n is a, c, g, or t
  misc_feature (1306)..(1307): n is a, c, g, or t
  misc_feature (1319)..(1319): n is a, c, g, or t
  misc_feature (1323)..(1323): n is a, c, g, or t
  misc_feature (1326)..(1327): n is a, c, g, or t
  misc_feature (1329)..(1331): n is a, c, g, or t
  misc_feature (1337)..(1337): n is a, c, g, or t
  misc_feature (1348)..(1348): n is a, c, g, or t
  misc_feature (1351)..(1351): n is a, c, g, or t
  misc_feature (1353)..(1354): n is a, c, g, or t
  misc_feature (1372)..(1373): n is a, c, g, or t
  misc_feature (1381)..(1381): n is a, c, g, or t
  misc_feature (1386)..(1386): n is a, c, g, or t
  misc_feature (1397)..(1397): n is a, c, g, or t
  misc_feature (1399)..(1399): n is a, c, g, or t
  misc_feature (1402)..(1402): n is a, c, g, or t
  misc_feature (1406)..(1407): n is a, c, g, or t
  misc_feature (1410)..(1410): n is a, c, g, or t
  misc_feature (1416)..(1416): n is a, c, g, or t
  misc_feature (1418)..(1418): n is a, c, g, or t
  misc_feature (1424)..(1424): n is a, c, g, or t
  misc_feature (1426)..(1426): n is a, c, g, or t
  misc_feature (1429)..(1429): n is a, c, g, or t
  misc_feature (1433)..(1433): n is a, c, g, or t
  misc_feature (1444)..(1444): n is a, c, g, or t
  misc_feature (1446)..(1447): n is a, c, g, or t
  misc_feature (1451)..(1452): n is a, c, g, or t
  misc_feature (1460)..(1460): n is a, c, g, or t
  misc_feature (1473)..(1473): n is a, c, g, or t
  misc_feature (1475)..(1475): n is a, c, g, or t
  misc_feature (1490)..(1490): n is a, c, g, or t
  misc_feature (1494)..(1494): n is a, c, g, or t
  misc_feature (1500)..(1500): n is a, c, g, or t
  misc_feature (1510)..(1510): n is a, c, g, or t
  misc_feature (1513)..(1513): n is a, c, g, or t
  misc_feature (1517)..(1517): n is a, c, g, or t
  misc_feature (1523)..(1523): n is a, c, g, or t
  misc_feature (1537)..(1537): n is a, c, g, or t
  misc_feature (1562)..(1562): n is a, c, g, or t
  misc_feature (1564)..(1564): n is a, c, g, or t
  misc_feature (1566)..(1566): n is a, c, g, or t
  misc_feature (1575)..(1575): n is a, c, g, or t
  misc_feature (1579)..(1580): n is a, c, g, or t
  misc_feature (1592)..(1592): n is a, c, g, or t
gcgctttcatatttggctctgtctttttagcagacgaaaaccactttggtagtgccagtgtgactcatccacaatgatttctccagtgctcatcttgttctcgagttttctctgccatgttgctattgcaggacggacctgtcccaagccagatgatttaccattttccacagtggtcccgttaaaaacattctatgagccaggagaagagattacgtattcctgcaagccgggctatgtgtcccgaggagggatgagaaagtttatctgccctctcacaggactgtggcccatcaacactctgaaatgtacacccagagtatgtccttttgctggaatcttagaaaatggagccgtacgctatacgacttttgaatatcccaacacgatcagtttttcttgtaacactgggttttatctgaatggcgctgattctgccaagtgcactgaggaaggaaaatggagcccggagcttcctgtctgtgctcccatcatctgccctccaccatccatacctacgtttgcaacacttcgtgtttataagccatcagctggaaacaattccctctatcgggacacagcagtttttgaatgtttgccacaacatgcgatgtttggaaatgatacaattacctgcacgacacatggaaattggactaaattaccagaatgcagggaagtaaaatgcccattcccatcaagaccagacaatggatttgtgaactatcctgcaaaaccaacactttattacaaggataaagccacatttggctgccatgatggatattctctggatggcccggaagaaatagaatgtaccaaactgggaaactggtctgccatgccaagttgtaaagcatcttgtaaagtacctgtgaaaaaagccactgtggtgtaccaaggagagagagtaaagattcaggaaaaatttaagaatggaatgctacatggtgataaagtttctttcttctgcaaaaataaggaaaagaagtgtagctatacagaggatgctcagtgtatagatggcactatcgaagtccccaaatgcttcaaggaacacagttctctggctttttggaaaactgatgcatccgatgtaaagccatgctaaggtggttttcagattccacataaaatgtcacacttgtttcttgttcatccaaggaacctaattgaaatttaaaaataaagctactgaatttattgccgcaaaaaaaaaaaaaaaaaaaaaaaaaaaanaaaaaaaaaanaattttntccagacanccncgggnctgtttccaaagggnggngcaaacccccnttnnttaaaattttantttngannannntaaacnaaaaagggttnaanannattatttcaaggctgagnnccaatttngatgntggccttttgnanagngggnnccnttcttngnccgcantncantttnaaaaatttaangnngccnnttcatttntgattaaagttcntnaaaaaaatccagggntttngggatntcccaaaccntanctgnaggccntttttttaatttantgccccctaattcccaattttaatncntnaaaaagggnaaanncccccaacttgncaaaaattaaccccccattttgtaaaagtcccaaccaccctccacct

SEQ ID NO: 454198 - DNA, 1198 bp, Homo sapiens
aagcagtggtatcaacgcacagtgcccattacggccgggtgccagtgtgactcatccacaatgatttctccagtgctcatcttgttctcgagttttctctgccatgttgctattgcaggacggacctgtcccaagccagatgatttaccattttccacagtggtcccgttaaaaacattctatgagccaggagaagagattacgtattcctgcaagccgggctatgtgtcccgaggagggatgagaaagtttatctgccctctcacaggactgtggcccatcaacactctgaaatgtacacccagagtatgtccttttgctggaatcttagaaaatggagccgtacgctatacgacttttgaatatcccaacacgatcagtttttcttgtaacactgggttttatctgaatggcgctgattctgccaagtgcactgaggaaggaaaatggagcccggagcttcctgtctgtgctcccatcatctgccctccaccatccatacctacgtttgcaacacttcgtgtttataagccatcagctggaaacaattccctctatcgggacacagcagtttttgaatgtttgccacaacatgcgatgtttggaaatgatacaattacctgcacgacacatggaaattggactaaattaccagaatgcagggaagtaaaatgcccattcccatcaagaccagacaatggatttgtgaactatcctgcaaaaccaacactttattacaaggataaagccacatttggctgccatgatggatattctctggatggcccggaagaaatagaatgtaccaaactgggaaactggtctgccatgccaagttgtaaagcatcttgtaaagtacctgtgaaaaaagccactgtggtgtaccaaggagagagagtaaagattcaggaaaaatttaagaatggaatgctacatggtgataaagtttctttcttctgcaaaaataaggaaaagaagtgtagctatacagaggatgctcagtgtatagatggcactatcgaagtccccaaatgcttcaaggaacacagttctctggctttttggaaaactgatgcatccgatgtaaagccatgctaaggtggttttcagattccacataaaatgtcacacttgtttcttgttcatccaaggaacctaattgaaatttaaaaataaagctactgaatttattgccgca

SEQ ID NO: 454199 - DNA, 1549 bp, Homo sapiens
  misc_feature (1246)..(1246): n is a, c, g, or t
  misc_feature (1251)..(1251): n is a, c, g, or t
  misc_feature (1254)..(1254): n is a, c, g, or t
  misc_feature (1259)..(1261): n is a, c, g, or t
gcgctttcatatttggctctgtctttttagcagacgaaaaccactttggtagtgccagtgtgactcatccacaatgatttctccagtgctcatcttgttctcgagttttctctgccatgttgctattgcaggacggacctgtcccaagccagatgatttaccattttccacagtggtcccgttaaaaacattctatgagccaggagaagagattacgtattcctgcaagccgggctatgtgtcccgaggagggatgagaaagtttatctgccctctcacaggactgtggcccatcaacactctgaaatgtacacccagagtatgtccttttgctggaatcttagaaaatggagccgtacgctatacgacttttgaatatcccaacacgatcagtttttcttgtaacactgggttttatctgaatggcgctgattctgccaagtgcactgaggaaggaaaatggagcccggagcttcctgtctgtgctcccatcatctgccctccaccatccatacctacgtttgcaacacttcgtgtttataagccatcagctggaaacaattccctctatcgggacacagcagtttttgaatgtttgccacaacatgcgatgtttggaaatgatacaattacctgcacgacacatggaaattggactaaattaccagaatgcagggaagtaaaatgcccattcccatcaagaccagacaatggatttgtgaactatcctgcaaaaccaacactttattacaaggataaagccacatttggctgccatgatggatattctctggatggcccggaagaaatagaatgtaccaaactgggaaactggtctgccatgccaagttgtaaagcatcttgtaaagtacctgtgaaaaaagccactgtggtgtaccaaggagagagagtaaagattcaggaaaaatttaagaatggaatgctacatggtgataaagtttctttcttctgcaaaaataaggaaaagaagtgtagctatacagaggatgctcagtgtatagatggcactatcgaagtccccaaatgcttcaaggaacacagttctctggctttttggaaaactgatgcatccgatgtaaagccatgctaaggtggttttcagattccacataaaatgtcacacttgtttcttgttcatccaaggaacctaattgaaatttaaaaataaagctactgaatttattgccgcaaaaaaaaaaaaaaaaaaaaaaaaaaaaaaaaaaanaaaanaanaaaannnaaaaaaaaaaaaaaaaaaaaaaaaggggggggggaggggcggagacggggacacacgcagggggggggggcgggggaaaagaagaacatgaagaacaggggccgacgaggggcaaaggagagaagggaagaagagaagaagaggcgagaagcggaagaaaaaaaaaaacgcgcgggggagcgagcaaggagaggaagaaaaagagcacgaggggagagaaagaggagaggggcgagaaaaaagaaaggcgcgaggggggacggcagagaggggagcgacaggggggct

SEQ ID NO: 454200 - DNA, 1658 bp, Homo sapiens
  misc_feature (1217)..(1217): n is a, c, g, or t
  misc_feature (1227)..(1227): n is a, c, g, or t
  misc_feature (1302)..(1302): n is a, c, g, or t
gcgctttcatatttggctctgtctttttagcagacgaaaaccactttggtagtgccagtgtgactcatccacaatgatttctccagtgctcatcttgttctcgagttttctctgccatgttgctattgcaggacggacctgtcccaagccagatgatttaccattttccacagtggtcccgttaaaaacattctatgagccaggagaagagattacgtattcctgcaagccgggctatgtgtcccgaggagggatgagaaagtttatctgccctctcacaggactgtggcccatcaacactctgaaatgtacacccagagtatgtccttttgctggaatcttagaaaatggagccgtacgctatacgacttttgaatatcccaacacgatcagtttttcttgtaacactgggttttatctgaatggcgctgattctgccaagtgcactgaggaaggaaaatggagcccggagcttcctgtctgtgctcccatcatctgccctccaccatccatacctacgtttgcaacacttcgtgtttataagccatcagctggaaacaattccctctatcgggacacagcagtttttgaatgtttgccacaacatgcgatgtttggaaatgatacaattacctgcacgacacatggaaattggactaaattaccagaatgcagggaagtaaaatgcccattcccatcaagaccagacaatggatttgtgaactatcctgcaaaaccaacactttattacaaggataaagccacatttggctgccatgatggatattctctggatggcccggaagaaatagaatgtaccaaactgggaaactggtctgccatgccaagttgtaaagcatcttgtaaagtacctgtgaaaaaagccactgtggtgtaccaaggagagagagtaaagattcaggaaaaatttaagaatggaatgctacatggtgataaagtttctttcttctgcaaaaataaggaaaagaagtgtagctatacagaggatgctcagtgtatagatggcactatcgaagtccccaaatgcttcaaggaacacagttctctggctttttggaaaactgatgcatccgatgtaaagccatgctaaggtggttttcagattccacataaaatgtcacacttgtttcttgttcatccaaggaacctaattgaaatttaaaaataaagctactgaatttattgccgcaaaaaantttttttttntgtggaatgtaactcttttattaaaacagttgtctttccacagtagtaaagctttggcacatacagtataaaaantaatcacccaccataattatccaaattcctcttatcaactgcatactaagtgttttcaatacaattttttccgtataaaaatactgggaaaaattgataaataacaggtaagagaaagatatttctaggcaattactaggatcatttggaaaaagtgagtactgtggatatttaaaatatcacagtaacaagatcatgcttgttcctacagtattgcgggccagacacttaagtgaaagcagaagtgtttgggtgactttcctacttaaaattttggtcatatcatttcaaaacatttgcatcttggttggctgcatatgctttcctattgatcccaaaccaaatcttagaatcac

SEQ ID NO: 454201 - DNA, 1238 bp, Homo sapiens
gcgctttcatatttggctctgtctttttagcagacgaaaaccactttggtagtgccagtgtgactcatccacaatgatttctccagtgctcatcttgttctcgagttttctctgccatgttgctattgcaggacggacctgtcccaagccagatgatttaccattttccacagtggtcccgttaaaaacattctatgagccaggagaagagattacgtattcctgcaagccgggctatgtgtcccgaggagggatgagaaagtttatctgccctctcacaggactgtggcccatcaacactctgaaatgtacacccagagtatgtccttttgctggaatcttagaaaatggagccgtacgctatacgacttttgaatatcccaacacgatcagtttttcttgtaacactgggttttatctgaatggcgctgattctgccaagtgcactgaggaaggaaaatggagcccggagcttcctgtctgtgctcccatcatctgccctccaccatccatacctacgtttgcaacacttcgtgtttataagccatcagctggaaacaattccctctatcgggacacagcagtttttgaatgtttgccacaacatgcgatgtttggaaatgatacaattacctgcacgacacatggaaattggactaaattaccagaatgcagggaagtaaaatgcccattcccatcaagaccagacaatggatttgtgaactatcctgcaaaaccaacactttattacaaggataaagccacatttggctgccatgatggatattctctggatggcccggaagaaatagaatgtaccaaactgggaaactggtctgccatgccaagttgtaaagcatcttgtaaagtacctgtgaaaaaagccactgtggtgtaccaaggagagagagtaaagattcaggaaaaatttaagaatggaatgctacatggtgataaagtttctttcttctgcaaaaataaggaaaagaagtgtagctatacagaggatgctcagtgtatagatggcactatcgaagtccccaaatgcttcaaggaacacagttctctggctttttggaaaactgatgcatccgatgtaaagccatgctaaggtggttttcagattccacataaaatgtcacacttgtttcttgttcatccaaggggcttaatgaagagaaaataaagcggtgaaaagaggcctgttcggtggaagacggggaagggagggggggaaa

SEQ ID NO: 454202 - DNA, 1013 bp, Homo sapiens
gcgctttcatatttggctctgtctttttagcagacgaaaaccactttggtagtgccagtgtgactcatccacaatgatttctccagtgctcatcttgttctcgagttttctctgccatgttgctattgcaggacggacctgtcccaagccagatgatttaccattttccacagtggtcccgttaaaaacattctatgagccaggagaagagattacgtattcctgcaagccgggctatgtgtcccgaggagggatgagaaagtttatctgccctctcacaggactgtggcccatcaacactctgaaatgtacacccagagtatgtccttttgctggaatcttagaaaatggagccgtacgctatacgacttttgaatatcccaacacgatcagtttttcttgtaacactgggttttatctgaatggcgctgattctgccaagtgcactgaggaaggaaaatggagcccggagcttcctgtctgtgctcccatcatctgccctccaccatccatacctacgtttgcaacacttcgtgtttataagccatcagctggaaacaattccctctatcgggacacagcagtttttgaatgtttgccacaacatgcgatgtttggaaatgatacaattacctgcacgacacatggaaattggactaaattaccagaatgcagggaagtaaaatgcccattcccatcaagaccagacaatggatttgtgaactatcctgcaaaaccaacactttattacaaggataaagccacatttggctgccatgatggatattctctggatggcccggaagaaatagaatgtaccaaactgggaaactggtctgccatgccaagttgtaaagaacacagttctctggctttttggaaaactgatgcatccgatgtaaagccatgctaaggtggttttcagattccacataaaatgtcacacttgtttcttgttcatccaaggaacctaattgaaatttaaaaataaagctactgaatttattgccgca

SEQ ID NO: 454203 - DNA, 1427 bp, Homo sapiens
gggccgctgccgccatgttgttgtggttgtgagaaggcggcggcggcggcggagtagcagccggacgagacgtcccagcggctcaggcgctgcccagcgccggccctggcagggagcctggtggggtggcggagggggagactgtgccgtggagggcctcgccatgtcctgctgcccgatggagtctcgctttgtcactcaggctggagtgaagtggcatgatcttggttcactgcaaccactgcctcccaggttcaagcaatcctcctgcctcagcctccggagtagctgggattacagcagacgaaaaccactttggtagtgccagtgtgactcatccacaatgatttctccagtgctcatcttgttctcgagttttctctgccatgttgctattgcaggacggacctgtcccaagccagatgatttaccattttccacagtggtcccgttaaaaacattctatgagccaggagaagagattacgtattcctgcaagccgggctatgtgtcccgaggagggatgagaaagtttatctgccctctcacaggactgtggcccatcaacactctgaaatgtacacccagagtatgtccttttgctggaatcttagaaaatggagccgtacgctatacgacttttgaatatcccaacacgatcagtttttcttgtaacactgggttttatctgaatggcgctgattctgccaagtgcactgaggaaggcatacctacgtttgcaacacttcgtgtttataagccatcagctggaaacaattccctctatcgggacacagcagtttttgaatgtttgccacaacatgcgatgtttggaaatgatacaattacctgcacgacacatggaaattggactaaattaccagaatgcagggaagtaaaatgcccattcccatcaagaccagacaatggatttgtgaactatcctgcaaaaccaacactttattacaaggataaagccacatttggctgccatgatggatattctctggatggcccggaagaaatagaatgtaccaaactgggaaactggtctgccatgccaagttgtaaagcatcttgtaaagtacctgtgaaaaaagccactgtggtgtaccaaggagagagagtaaagattcaggaaaaatttaagaatggaatgctacatggtgataaagtttctttcttctgcaaaaataaggaaaagaagtgtagctatacagaggatgctcagtgtatagatggcactatcgaagtccccaaatgcttcaaggaacacagttctctggctttttggaaaactgatgcatccgatgtaaagccatgctaaggtggttttcagattccacataaaatgtcacacttgtttcttgttcatccaaggaacctaattgaaatttaaaaataaagctactgaatttattgccgca

SEQ ID NO: 454204 - DNA, 1155 bp, Homo sapiens
gcgctttcatatttggctctgtctttttagcagacgaaaaccactttggtagtgccagtgtgactcatccacaatgatttctccagtgctcatcttgttctcgagttttctctgccatgttgctattgcaggacggacctgtcccaagccagatgatttaccattttccacagtggtcccgttaaaaacattctatgagccaggagaagagattacgtattcctgcaagccgggctatgtgtcccgaggagggatgagaaagtttatctgccctctcacaggactgtggcccatcaacactctgaaatgtacacccagagtatgtccttttgctggaatcttagaaaatggagccgtacgctatacgacttttgaatatcccaacacgatcagtttttcttgtaacactgggttttatctgaatggcgctgattctgccaagtgcactgaggaaggaaaatggagcccggagcttcctgtctgtgctcccatcatctgccctccaccatccatacctacgtttgcaacacttcgtgtttataagccatcagctggaaacaattccctctatcgggacacagcagtttttgaatgtttgccacaacatgcgatgtttggaaatgatacaattacctgcacgacacatggaaattggactaaattaccagaatgcagggaaaccaacactttattacaaggataaagccacatttggctgccatgatggatattctctggatggcccggaagaaatagaatgtaccaaactgggaaactggtctgccatgccaagttgtaaagcatcttgtaaagtacctgtgaaaaaagccactgtggtgtaccaaggagagagagtaaagattcaggaaaaatttaagaatggaatgctacatggtgataaagtttctttcttctgcaaaaataaggaaaagaagtgtagctatacagaggatgctcagtgtatagatggcactatcgaagtccccaaatgcttcaaggaacacagttctctggctttttggaaaactgatgcatccgatgtaaagccatgctaaggtggttttcagattccacataaaatgtcacacttgtttcttgttcatccaaggaacctaattgaaatttaaaaataaagctactgaatttattgccgca

SEQ ID NO: 454205 - DNA, 963 bp, Homo sapiens
gggccgctgccgccatgttgttgtggttgtgagaaggcggcggcggcggcggagtagcagccggacgagacgtcccagcggctcaggcgctgcccagcgccggccctggcagggagcctggtggggtggcggagggggagactgtgccgtggagggcctcgccatgtcctgctgcccgatggagtctcgctttgtcactcaggctggagtgaagtggcatgatcttggttcactgcaaccactgcctcccaggttcaagcaatcctcctgcctcagcctccggagtagctgggattacagcagacgaaaaccactttggtagtgccagtgtgactcatccacaatgatttctccagtgctcatcttgttctcgagttttctctgccatgttgctattgcaggacggacctgtcccaagccagatgatttaccattttccacagtggtcccgttaaaaacattctatgagccaggagaagagattacgtattcctgcaagccgggctatgtgtcccgaggagggatgagaaagtttatctgccctctcacaggactgtggcccatcaacactctgaaatgtacacccagagtatgtccttttgctggaatcttagaaaatggagccgtacgctatacgacttttgaatatcccaacacgatcagtttttcttgtaacactgggttttatctgaatggcgctgattctgccaagtgcactgaggaaggcatacctacgtttgcaacacttcgtgtttataagccatcagctggaaacaattccctctatcgggacacagcagtttttgaatgtttgccacaacatgcgatgtttggaaatgatacaattacctgcacgacacatggaaattggactaaattaccagaatgcagggtatccccatagtgcgggagtttagccgcctattcatatgaccacccgactggtgtttggactcttctctt

SEQ ID NO: 454206 - DNA, 879 bp, Homo sapiens
ttctcccttatggtctttggacagatgcagtactgtaaagggccgatactgttttttcccctttaatcttgactgttatagaacagtcttcactgtatatagaacctttaattttatctcttgaaaatgaggatcttggccaggcgcagtggctcacacttgtaatcccagcactttgggaggccaaggcgggcggatcacttgaggtcaggaggccagcctggccaacatggtgaaacccagtctctactaaaaatacaaagattagccaggcatggtggcacgtgcctgtagtcccagctactcgggaggctgagacaggagaatcacttgaacctgggaggtagaggttgcagtgagctgagattgtgccactgcactccaacctgggcaacagggcgagactctgtcttaaaaaaaggaaaaagaaaaagaaaaagaaaatgagggtcttatcatttccctaatgttttctcccatcacttaaacctcacactaaatggtttcattcacataatcacatgtattctatatacttgtaaaatgtatttggtttggcttagctatttaccacatttaagaaatgattgtttctcttagaatgtttatctttttctcccccaacagaacacagttctctggctttttggaaaactgatgcatccgatgtaaagccatgctaaggtggttttcagattccacataaaatgtcacacttgtttcttgttcatccaaggaacctaattgaaatttaaaaataaagctactgaatttattgccgcaaaaaaaccccctgggcccaatttgaatttaaggtttatggaacccgccaccctgagggggggcccgcgccccaaaatccccctaaagggaggcggt

SEQ ID NO: 454207 - DNA, 612 bp, Homo sapiens
tcagcatccacctcagcctcccaaagtgccaggatgaccgaagtgagccactgtgcctggccacatgaattctgttttatttaatgtgtggtagaaccaaatacctctgagaatattgtgctcctggctccagccttgctttctcgcactgcagctcataaggacgtgggtttgggcctctactgttgaggatcttaaggaggccaggaagcagcaccatttttctttgacgtatttcctgctggcttcttccatagtctgaattgaataacagtaagatttactattttaaagccaaataatggtgtactaagtgtgaatgggggggggggttcagtctttgcattttaattttatggtttgttagaaatagactttgcttttcttctttcaaacccaccatcttagactgtgtagagatgaagtttgcaataaataataccttatgattatatgtgtttcttttttaatatccagggtaccacagatataagaggagtggggacagaattaagcacaaggtaactataaattgcattccagttacaggaacacacagtgattcagtggtgtgacagagacaaggatgtaactatttcatgactattggat

SEQ ID NO: 454208 - DNA, 420 bp, Homo sapiens
attttaattttatggtttgttagaaatagactttgcttttcttctttcaaacccaccatcttagactgtgtagagatgaagtttgcaataaataataccttatgattatatgtgaaaacccagagaacttagtgaagtctcattaatttactttcaaagtgtggttgtttcttttttaatatccagggtaccacagatataagaggagtggggacagaattaagcacaaggtaactataaattgcattccagttacaggaacacacagtgattcagtggtgtgacagagacaaggatgtaactatttcatgactattggatagcactatttattactaatatgtcttattgaataaatgttttagaagtaaaatgcccattcccatcaagaccagacaatggatttgtgaactatcctgc

SEQ ID NO: 454209 - DNA, 1481 bp, Homo sapiens
gggccgctgccgccatgttgttgtggttgtgagaaggcggcggcggcggcggagtagcagccggacgagacgtcccagcggctcaggcgctgcccagcgccggccctggcagggagcctggtggggtggcggagggggagactgtgccgtggagggcctcgccatgtcctgctgcccgatggagtctcgctttgtcactcaggctggagtgaagtggcatgatcttggttcactgcaaccactgcctcccaggttcaagcaatcctcctgcctcagcctccggagtagctgggattacagcagacgaaaaccactttggtagtgccagtgtgactcatccacaatgatttctccagtgctcatcttgttctcgagttttctctgccatgttgctattgcaggacggacctgtcccaagccagatgatttaccattttccacagtggtcccgttaaaaacattctatgagccaggagaagagattacgtattcctgcaagccgggctatgtgtcccgaggagggatgagaaagtttatctgccctctcacaggactgtggcccatcaacactctgaaatgtacacccagagtatgtccttttgctggaatcttagaaaatggagccgtacgctatacgacttttgaatatcccaacacgatcagtttttcttgtaacactgggttttatctgaatggcgctgattctgccaagtgcactgaggaaggaaaatggagcccggagcttcctgtctgtgctcccatcatctgccctccaccatccatacctacgtttgcaacacttcgtgtttataagccatcagctggaaacaattccctctatcgggacacagcagtttttgaatgtttgccacaacatgcgatgtttggaaatgatacaattacctgcacgacacatggaaattggactaaattaccagaatgcagggaagtaaaatgcccattcccatcaagaccagacaatggatttgtgaactatcctgcaaaaccaacactttattacaaggataaagccacatttggctgccatgatggatattctctggatggcccggaagaaatagaatgtaccaaactgggaaactggtctgccatgccaagttgtaaagcatcttgtaaagtacctgtgaaaaaagccactgtggtgtaccaaggagagagagtaaagattcaggaaaaatttaagaatggaatgctacatggtgataaagtttctttcttctgcaaaaataaggaaaagaagtgtagctatacagaggatgctcagtgtatagatggcactatcgaagtccccaaatgcttcaaggaacacagttctctggctttttggaaaactgatgcatccgatgtaaagccatgctaaggtggttttcagattccacataaaatgtcacacttgtttcttgttcatccaaggaacctaattgaaatttaaaaataaagctactgaatttattgccgca

SEQ ID NO: 454210 - DNA, 1470 bp, Homo sapiens
  misc_feature (1239)..(1239): n is a, c, g, or t
  misc_feature (1284)..(1284): n is a, c, g, or t
  misc_feature (1289)..(1289): n is a, c, g, or t
  misc_feature (1292)..(1292): n is a, c, g, or t
  misc_feature (1297)..(1299): n is a, c, g, or t
gcgctttcatatttggctctgtctttttagcagacgaaaaccactttggtagtgccagtgtgactcatccacaatgatttctccagtgctcatcttgttctcgagttttctctgccatgttgctattgcaggacggacctgtcccaagccagatgatttaccattttccacagtggtcccgttaaaaacattctatgagccaggagaagagattacgtattcctgcaagccgggctatgtgtcccgaggagggatgagaaagtttatctgccctctcacaggactgtggcccatcaacactctgaaatgtacacccagagtatgtccttttgctggaatcttagaaaatggagccgtacgctatacgacttttgaatatcccaacacgatcagtttttcttgtaacactgggttttatctgaatggcgctgattctgccaagtgcactgaggaaggaaaatggagcccggagcttcctgtctgtgctcccatcatctgccctccaccatccatacctacgtttgcaacacttcgtgtttataagccatcagctggaaacaattccctctatcgggacacagcagtttttgaatgtttgccacaacatgcgatgtttggaaatgatacaattacctgcacgacacatggaaattggactaaattaccagaatgcagggaagtaaaatgcccattcccatcaagaccagacaatggatttgtgaactatcctgcaaaaccaacactttattacaaggataaagccacatttggctgccatgatggatattctctggatggcccggaagaaatagaatgtaccaaactgggaaactggtctgccatgccaagttgtaaagcatcttgtaaagtacctgtgaaaaaagccactgtggtgtaccaaggagagagagtaaagattcaggaaaaatttaagaatggaatgctacatggtgataaagtttctttcttctgcaaaaataaggaaaagaagtgtagctatacagaggatgctcagtgtatagatggcactatcgaagtccccaaatgcttcaaggaacacagttctctggctttttggaaaactgatgcatccgatgtaaagccatgctaaggtggttttcagattccacataaaatgtcacacttgtttcttgttcatccaaggaacctaattgaaatttaaaaataaagctactgaatttattgccgcaaaaaaaaaaaaaaaaaaaaaaaaaaaanaaaaaaaaaaaaaaaaaaaaaaaaaaaaaaaaaaaaaaaaaaaanaaaanaanaaaannnaaaaaaaaaaaaaaaaaaaaaaaaaaaaactttgggcccccttgggcccaatgatttttaaacctggacaatttttttcttggggcccaattttgggcccctttggccatttcccccttaaggggggcggttaaaaattcaagggccgggttttaaaaacgggggactggg

SEQ ID NO: 454211 - DNA, 1644 bp, Homo sapiens
  misc_feature (1255)..(1255): n is a, c, g, or t
  misc_feature (1262)..(1262): n is a, c, g, or t
  misc_feature (1271)..(1271): n is a, c, g, or t
  misc_feature (1274)..(1274): n is a, c, g, or t
  misc_feature (1279)..(1279): n is a, c, g, or t
  misc_feature (1294)..(1294): n is a, c, g, or t
  misc_feature (1297)..(1297): n is a, c, g, or t
  misc_feature (1308)..(1308): n is a, c, g, or t
  misc_feature (1311)..(1312): n is a, c, g, or t
  misc_feature (1324)..(1324): n is a, c, g, or t
  misc_feature (1328)..(1328): n is a, c, g, or t
  misc_feature (1331)..(1332): n is a, c, g, or t
  misc_feature (1334)..(1336): n is a, c, g, or t
  misc_feature (1342)..(1342): n is a, c, g, or t
  misc_feature (1353)..(1353): n is a, c, g, or t
  misc_feature (1356)..(1356): n is a, c, g, or t
  misc_feature (1358)..(1359): n is a, c, g, or t
  misc_feature (1377)..(1378): n is a, c, g, or t
  misc_feature (1386)..(1386): n is a, c, g, or t
  misc_feature (1391)..(1391): n is a, c, g, or t
  misc_feature (1402)..(1402): n is a, c, g, or t
  misc_feature (1404)..(1404): n is a, c, g, or t
  misc_feature (1407)..(1407): n is a, c, g, or t
  misc_feature (1411)..(1412): n is a, c, g, or t
  misc_feature (1415)..(1415): n is a, c, g, or t
  misc_feature (1421)..(1421): n is a, c, g, or t
  misc_feature (1423)..(1423): n is a, c, g, or t
  misc_feature (1429)..(1429): n is a, c, g, or t
  misc_feature (1431)..(1431): n is a, c, g, or t
  misc_feature (1434)..(1434): n is a, c, g, or t
  misc_feature (1438)..(1438): n is a, c, g, or t
  misc_feature (1449)..(1449): n is a, c, g, or t
  misc_feature (1451)..(1452): n is a, c, g, or t
  misc_feature (1456)..(1457): n is a, c, g, or t
  misc_feature (1465)..(1465): n is a, c, g, or t
  misc_feature (1478)..(1478): n is a, c, g, or t
  misc_feature (1480)..(1480): n is a, c, g, or t
  misc_feature (1495)..(1495): n is a, c, g, or t
  misc_feature (1499)..(1499): n is a, c, g, or t
  misc_feature (1505)..(1505): n is a, c, g, or t
  misc_feature (1515)..(1515): n is a, c, g, or t
  misc_feature (1518)..(1518): n is a, c, g, or t
  misc_feature (1522)..(1522): n is a, c, g, or t
  misc_feature (1528)..(1528): n is a, c, g, or t
  misc_feature (1542)..(1542): n is a, c, g, or t
  misc_feature (1567)..(1567): n is a, c, g, or t
  misc_feature (1569)..(1569): n is a, c, g, or t
  misc_feature (1571)..(1571): n is a, c, g, or t
  misc_feature (1580)..(1580): n is a, c, g, or t
  misc_feature (1584)..(1585): n is a, c, g, or t
  misc_feature (1597)..(1597): n is a, c, g, or t
gcgctttcatatttggctctgtctttttagcagacgaaaaccactttggtagtgccagtgtgactcatccacaatgatttctccagtgctcatcttgttctcgagttttctctgccatgttgctattgcaggacggacctgtcccaagccagatgatttaccattttccacagtggtcccgttaaaaacattctatgagccaggagaagagattacgtattcctgcaagccgggctatgtgtcccgaggagggatgagaaagtttatctgccctctcacaggactgtggcccatcaacactctgaaatgtacacccagagtatgtccttttgctggaatcttagaaaatggagccgtacgctatacgacttttgaatatcccaacacgatcagtttttcttgtaacactgggttttatctgaatggcgctgattctgccaagtgcactgaggaaggaaaatggagcccggagcttcctgtctgtgctcccatcatctgccctccaccatccatacctacgtttgcaacacttcgtgtttataagccatcagctggaaacaattccctctatcgggacacagcagtttttgaatgtttgccacaacatgcgatgtttggaaatgatacaattacctgcacgacacatggaaattggactaaattaccagaatgcagggaagtaaaatgcccattcccatcaagaccagacaatggatttgtgaactatcctgcaaaaccaacactttattacaaggataaagccacatttggctgccatgatggatattctctggatggcccggaagaaatagaatgtaccaaactgggaaactggtctgccatgccaagttgtaaagcatcttgtaaagtacctgtgaaaaaagccactgtggtgtaccaaggagagagagtaaagattcaggaaaaatttaagaatggaatgctacatggtgataaagtttctttcttctgcaaaaataaggaaaagaagtgtagctatacagaggatgctcagtgtatagatggcactatcgaagtccccaaatgcttcaaggaacacagttctctggctttttggaaaactgatgcatccgatgtaaagccatgctaaggtggttttcagattccacataaaatgtcacacttgtttcttgttcatccaaggaacctaattgaaatttaaaaataaagctactgaatttattgccgcaccggttttttttttttttttttttttttcatgggaaaatagttnaattttntccagacanccncgggnctgtttccaaagggnggngcaaacccccnttnnttaaaattttantttngannannntaaacnaaaaagggttnaanannattatttcaaggctgagnnccaatttngatgntggccttttgnanagngggnnccnttcttngnccgcantncantttnaaaaatttaangnngccnnttcatttntgattaaagttcntnaaaaaaatccagggntttngggatntcccaaaccntanctgnaggccntttttttaatttantgccccctaattcccaattttaatncntnaaaaagggnaaanncccccaacttgncaaaaattaaccccccattttgtaaaagtcccaaccaccctccacct

SEQ ID NO: 454212 - DNA, 1230 bp, Homo sapiens
gagagagagagagagagagagagagagagagagagagagagagagagagagagagagagagagagagagagtgccagtgtgactcatccacaatgatttctccagtgctcatcttgttctcgagttttctctgccatgttgctattgcaggacggacctgtcccaagccagatgatttaccattttccacagtggtcccgttaaaaacattctatgagccaggagaagagattacgtattcctgcaagccgggctatgtgtcccgaggagggatgagaaagtttatctgccctctcacaggactgtggcccatcaacactctgaaatgtacacccagagtatgtccttttgctggaatcttagaaaatggagccgtacgctatacgacttttgaatatcccaacacgatcagtttttcttgtaacactgggttttatctgaatggcgctgattctgccaagtgcactgaggaaggaaaatggagcccggagcttcctgtctgtgctcccatcatctgccctccaccatccatacctacgtttgcaacacttcgtgtttataagccatcagctggaaacaattccctctatcgggacacagcagtttttgaatgtttgccacaacatgcgatgtttggaaatgatacaattacctgcacgacacatggaaattggactaaattaccagaatgcagggaagtaaaatgcccattcccatcaagaccagacaatggatttgtgaactatcctgcaaaaccaacactttattacaaggataaagccacatttggctgccatgatggatattctctggatggcccggaagaaatagaatgtaccaaactgggaaactggtctgccatgccaagttgtaaagcatcttgtaaagtacctgtgaaaaaagccactgtggtgtaccaaggagagagagtaaagattcaggaaaaatttaagaatggaatgctacatggtgataaagtttctttcttctgcaaaaataaggaaaagaagtgtagctatacagaggatgctcagtgtatagatggcactatcgaagtccccaaatgcttcaaggaacacagttctctggctttttggaaaactgatgcatccgatgtaaagccatgctaaggtggttttcagattccacataaaatgtcacacttgtttcttgttcatccaaggaacctaattgaaatttaaaaataaagctactgaatttattgccgca

SEQ ID NO: 454213 - DNA, 1157 bp, Homo sapiens
gcgctttcatatttggctctgtctttttagcagacgaaaaccactttggtagtgccagtgtgactcatccacaatgatttctccagtgctcatcttgttctcgagttttctctgccatgttgctattgcaggacggacctgtcccaagccagatgatttaccattttccacagtggtcccgttaaaaacattctatgagccaggagaagagattacgtattcctgcaagccgggctatgtgtcccgaggagggatgagaaagtttatctgccctctcacaggactgtggcccatcaacactctgaaatgtacacccagagtatgtccttttgctggaatcttagaaaatggagccgtacgctatacgacttttgaatatcccaacacgatcagtttttcttgtaacactgggttttatctgaatggcgctgattctgccaagtgcactgaggaaggaaaatggagcccggagcttcctgtctgtgctcccatcatctgccctccaccatccatacctacgtttgcaacacttcgtgtttataagccatcagctggaaacaattccctctatcgggacacagcagtttttgaatgtttgccacaacatgcgatgtttggaaatgatacaattacctgcacgacacatggaaattggactaaattaccagaatgcagggaagtaaaatgcccattcccatcaagaccagacaatggatttgtgaactatcctgcaaaaccaacactttattacaaggataaagccacatttggctgccatgatggatattctctggatggcccggaagaaatagaatgtaccaaactgggaaactggtctgccatgccaagttgtaaagcatcttgtaaagtacctgtgaaaaaagccactgtggtgtaccaaggagagagagtaaagattcaggaaaaatttaagaatggaatgctacatggtgataaagtttctttcttctgcaaaaataaggaaaagaagtgtagctatacagaggatgctcagtgtatatggaaaactgatgcatccgatgtaaagccatgctaaggtggttttcagattccacataaaatgtcacacttgtttcttgttcatccaaggaacctaattgaaatttaaaaataaagctactgaatttattgccgca

SEQ ID NO: 454214 - DNA, 1306 bp, Homo sapiens
gggccgctgccgccatgttgttgtggttgtgagaaggcggcggcggcggcggagtagcagccggacgagacgtcccagcggctcaggcgctgcccagcgccggccctggcagggagcctggtggggtggcggagggggagactgtgccgtggagggcctcgccatgtcctgctgcccgcagacgaaaaccactttggtagtgccagtgtgactcatccacaatgatttctccagtgctcatcttgttctcgagttttctctgccatgttgctattgcaggacggacctgtcccaagccagatgatttaccattttccacagtggtcccgttaaaaacattctatgagccaggagaagagattacgtattcctgcaagccgggctatgtgtcccgaggagggatgagaaagtttatctgccctctcacaggactgtggcccatcaacactctgaaatgtacacccagagtatgtccttttgctggaatcttagaaaatggagccgtacgctatacgacttttgaatatcccaacacgatcagtttttcttgtaacactgggttttatctgaatggcgctgattctgccaagtgcactgaggaaggaaaatggagcccggagcttcctgtctgtgctcccatcatctgccctccaccatccatacctacgtttgcaacacttcgtgtttataagccatcagctggaaacaattccctctatcgggacacagcagtttttgaatgtttgccacaacatgcgatgtttggaaatgatacaattacctgcacgacacatggaaattggactaaattaccagaatgcagggaagtaaaatgcccattcccatcaagaccagacaatggatttgtgaactatcctgcattctctggatggcccggaagaaatagaatgtaccaaactgggaaactggtctgccatgccaagttgtaaagcatcttgtaaagtacctgtgaaaaaagccactgtggtgtaccaaggagagagagtaaagattcaggaaaaatttaagaatggaatgctacatggtgataaagtttctttcttctgcaaaaataaggaaaagaagtgtagctatacagaggatgctcagtgtatagatggcactatcgaagtccccaaatgcttcaaggaacacagttctctggctttttggaaaactgatgcatccgatgtaaagccatgctaaggtggttttcagattccacataaaatgtcacacttgtttcttgttcatccaaggaacctaattgaaatttaaaaataaagctactgaatttattgccgca

SEQ ID NO: 454215 - DNA, 1106 bp, Homo sapiens
tagtagagacggggtttcaccgtgttagccagcctgtcccaagccagatgatttaccattttccacagtggtcccgttaaaaacattctatgagccaggagaagagattacgtattcctgcaagccgggctatgtgtcccgaggagggatgagaaagtttatctgccctctcacaggactgtggcccatcaacactctgaaatgtacacccagagtatgtccttttgctggaatcttagaaaatggagccgtacgctatacgacttttgaatatcccaacacgatcagtttttcttgtaacactgggttttatctgaatggcgctgattctgccaagtgcactgaggaaggaaaatggagcccggagcttcctgtctgtgctcccatcatctgccctccaccatccatacctacgtttgcaacacttcgtgtttataagccatcagctggaaacaattccctctatcgggacacagcagtttttgaatgtttgccacaacatgcgatgtttggaaatgatacaattacctgcacgacacatggaaattggactaaattaccagaatgcagggaagtaaaatgcccattcccatcaagaccagacaatggatttgtgaactatcctgcaaaaccaacactttattacaaggataaagccacatttggctgccatgatggatattctctggatggcccggaagaaatagaatgtaccaaactgggaaactggtctgccatgccaagttgtaaagcatcttgtaaagtacctgtgaaaaaagccactgtggtgtaccaaggagagagagtaaagattcaggaaaaatttaagaatggaatgctacatggtgataaagtttctttcttctgcaaaaataaggaaaagaagtgtagctatacagaggatgctcagtgtatagatggcactatcgaagtccccaaatgcttcaaggaacacagttctctggctttttggaaaactgatgcatccgatgtaaagccatgctaaggtggttttcagattccacataaaatgtcacacttgtttcttgttcatccaaggaacctaattgaaatttaaaaataaagctactgaatttattgccgca

SEQ ID NO: 454216 - DNA, 1351 bp, Homo sapiens
gggccgctgccgccatgttgttgtggttgtgagaaggcggcggcggcggcggagtagcagccggacgagacgtcccagcggctcaggcgctgcccagcgccggccctggcagggagcctggtggggtggcggagggggagactgtgccgtggagggcctcgccatgtcctgctgcccgatggagtctcgctttgtcactcaggctggagtgaagtggcatgatcttggttcactgcaaccactgcctcccaggttcaagcaatcctcctgcctcagcctccggagtagctgggattacagcagacgaaaaccactttggtagtgccagtgtgactcatccacaatgatttctccagtgctcatcttgttctcgagttttctctgccatgttgctattgcaggacggacctgtcccaagccagatgatttaccattttccacagtggtcccgttaaaaacattctatgagccaggagaagagattacgtattcctgcaagccgggctatgtgtcccgaggagggatgagaaagtttatctgccctctcacaggactgtggcccatcaacactctgaaatgtacacccagagtatgtccttttgctggaatcttagaaaatggagccgtacgctatacgacttttgaatatcccaacacgatcagtttttcttgtaacactgggttttatctgaatggcgctgattctgccaagtgcactgaggaaggaaaatggagcccggagcttcctgtctgtgctcccatcatctgccctccaccatccatacctacgtttgcaacacttcgtgtttataagccatcagctggaaacaattcccatcaagaccagacaatggatttgtgaactatcctgcaaaaccaacactttattacaaggataaagccacatttggctgccatgatggatattctctggatggcccggaagaaatagaatgtaccaaactgggaaactggtctgccatgccaagttgtaaagcatcttgtaaagtacctgtgaaaaaagccactgtggtgtaccaaggagagagagtaaagattcaggaaaaatttaagaatggaatgctacatggtgataaagtttctttcttctgcaaaaataaggaaaagaagtgtagctatacagaggatgctcagtgtatagatggcactatcgaagtccccaaatgcttcaaggaacacagttctctggctttttggaaaactgatgcatccgatgtaaagccatgctaaggtggttttcagattccacataaaatgtcacacttgtttcttgttcatccaaggaacctaattgaaatttaaaaataaagctactgaatttattgccgca

SEQ ID NO: 454217 - DNA, 654 bp, Homo sapiens
  misc_feature (614)..(614): n is a, c, g, or t
  misc_feature (627)..(627): n is a, c, g, or t
gggccgctgccgccatgttgttgtggttgtgagaaggcggcggcggcggcggagtagcagccggacgagacgtcccagcggctcaggcgctgcccagcgccggccctggcagggagcctggtggggtggcggagggggagactgtgccgtggagggcctcgccatgtcctgctgcccgatggagtctcgctttgtcactcaggctggagtgaagtggcatgatcttggttcactgcaaccactgcctcccaggttcaagcaatcctcctgcctcagcctccggagtagctgggattacagcagacgaaaaccactttggtagtgccagtgtgactcatccacaatgatttctccagtgctcatcttgttctcgagttttctctgccatgttgctattgcaggacggacctgtcccaagccagatgatttaccattttccacagtggtcccgttaaaaacattctatgagccaggagaagagattacgtattcctgcaagccgggctatgtgtcccgaggagggatgagaaagtttatctgccctctcacaggactgtggcccatcaacactctgaaatgtacacccagagtatgtccttttgctggaatcttancttgtaacactgngttttattgtggcgctggccctttttc

SEQ ID NO: 454218 - DNA, 1604 bp, Homo sapiens
ggcacgaggaaccatggagccagtgtctgggggcgtggtggcgggactggacctctggggcctgtgttgggccttagctcggtaactggtgacccctttgccctctgagcctgcttttcatcctgttgtgaatatcagatgagatcatacacatggaaatgcttgtcaactaaaacagcacaaacacagtgtaatgaattattattatcccagtaaagtcatggttcgggaaaatgagggaatgtgggctctgttgcgcgtgcctgggaagctaaacccctgcggtgttgttcctgtgggcaagtgtctagcgcatgcaggtgccgtctgacaagtcgacttcgctctgtgaaggtcgtgctcggccctgatgggatatacagccagggtggggcggcgcagtgaagatggctcttctctttctcccccgtgtccatccatcagaccacagcctttgcctgggcaggggtccccgtgtaggggtgaatgcctctcatgtggctgcctgcagcagggtggccctttgtgtacttgtctgagccagtgccacctacactcaagttgggacagtggagatactcggagaattgcccattcggtgacgatcccccaacagtaggtctccccctgatcactttacctgaccgcacacttcctttcttggacttaggtgactccccggacagctcaacaccaaagctttcgcgggcacagcggccgcagtcgtgcacgtcagttggcagggtcactgtccacagcaccccggttagacgctcatctgggccagcaccacaaagcctgctgagcgcacggcgtgtgtcagccttgcccacacccgccagccggcgctgctctggccttccaccgatgacccccaaaacgatgcccagggccgtgggctctcccctgtgtgtgccagctcggagacgttcctctgagccccgcaagaactctgcaatgaggtaagacacgaaggtggtaataaattggtctcaaattcctaggcttgctgtcccagacagtgacatacctttttcttgccttgctccaggttttagtgaagtaaatagtatttggaaagtttgtttgttttttttttcattgcaaagagaaaatgcaatagacatgagcatagaggaaaattaaaggtattacaaggaaatactgcgtgtaattctctgataatcaatttgaaaacctaatggttttctaaaatttgcaagttattggccaggtgtggtggctcacgcctgtaatcccagcactttgggaggccgaggcaggcagactgcctgagctcaggagtttgagatcaacctgggtaacatggcaaaaccccatctctacaaaaaatacaaaaataagctaggtgtggtggcgtgcactgtagtcccagctatttagggggctgaggtgggaggatcacttgagctcaggaggttgaggctgcagtgagctgagattgccccgttgcactccagcctgggggacagagtgagaccccgtctgtaaaaattaaaataaataaaataaataaaataaaatttatctaaattgacccagaacacatgaagtaagccatagctggagctcagaaatgatta

SEQ ID NO: 454219 - DNA, 636 bp, Homo sapiens
tcacttgaggccaggagttcgagaccagcctggtcaacatagcgagacttcgtcactagaaaaaatttaaaaaattttttaaaaaggaaaaaatataacttagagccccctatgaaaaactaaattagcatcatgacaggatacactttggggagtgaaatttcacagtacctttatttaattccaagccatagagcctggtaatatttttctctttatcagctgtggcactaaaataacagtggattttttccctctagacattcttcttttggccgatgaaaaatttgacttcgatctttcattgtcttcttcgagtgcaaatgaagatgatgaagtcttcttcggaccctttggacataaagaaagatgtattgctgccagcttggaattaaataatccggttcccgaacagcctccgttgcccacatctgagagtccctttgcctggagccctctggccggggagaagttcgtggaggtgtacaaagaagctcacttactggctttacacattgagagcagcagccggaaccaggcagcccaagctgccaagcctgaagaccctcggagccagggcgtggaaagattcatacaggagtcaaaattaaaaataaacctctttgagaaagaaaa

SEQ ID NO: 454220 - DNA, 891 bp, Homo sapiens
ctcagtgggcagtggcaggaactgagcttgtcgggcccctgctgagagcaaagctgaggggcccgacaagctcagtgggcagtggcaggaactgagtgccactggaaagcccattccctttatttagaaaacgagctccaggaagccgctactttgtgtccatttctcttgaggaaacttaccaccttggttgagcggcttcatggcagacagcagcgagccagcggccggactctgtatttcggaccccactccagtgctccctgggtcataccaggatctgcctctgtccacaaagatgagggaaaatgatgactgtgctgtgctctctacttcctgcggttactgcgtgattctaaagctgccactcggaacagcgagtcctctgccgtcgagagcagggaggggtagggtggacaggcgatgccgtggaaagacgtctcggtggaaactgccatggtggaaaggtggcgcgcttctcacggctgagttgctgcgcctgcagacggaagctccccacaggcagagctgcttggatgtgtgagtcatgaagccagagaagccccgctccacgagcagtgactccccaggccgggcactgtggctcacgcgtgtaatcccagcactttgggaggccgaggcgggcggatcacaaggtcaggagatcaagaccatcctggccaacatggtgaaatgccgtctctactaaaaatacaaaaattagctgggtgtggtggcatgtgcctgtaatcccagctactccggaggctgaggcaggagaatcgcttaaacccgggaggcggaggttgcagtgagctaagatcacgccactgcactccagcctagtgaccaagtgagactgtctcaaaaaaataaataaataaaataaaa

SEQ ID NO: 454221 - DNA, 423 bp, Homo sapiens
cacggcccaccccatacagagcctccttccaccaaggccccgcctgattccttggctttccaaaccgccagcccacctggaacatgagcaaagctcacattctcccaagatggttgccagaaagatgctggactctgctcttaaccttggttttgtacccaggctcttcttgtagatatcaaactggaaccactcgcggtcactccagatgctgcaagccagcccctcattgaccttcctctcatcgacttctgcgataccccagaagcacacgtggctgtaggatctgaaagcaggcctctgatcgacctcatgacaaacactccagacatgaataaaaatgtggccaaaccttcaccggtggtgggacaggtgagaagtggcaggtggttcatgttgactcagccctgggtgtcctcagtt

SEQ ID NO: 454222 - DNA, 4563 bp, Homo sapiens
cccttttcaaaccgaccaatcggcaacccgcgtctcccggcgccgcgtttaaatccgtgccggaggcgcgtcctgcatcgtctgccgctttggtgacttctgacagctctctccatggaaggaggcggcggccgcgatgagccttcagcctgccgggcaggggacgtgaacatggatgaccctaagaaggaagacattcttcttttggccgatgaaaaatttgacttcgatctttcattgtcttcttcgagtgcaaatgaagatgatgaagtcttcttcggaccctttggacataaagaaagatgtattgctgccagcttggaattaaataatccggttcccgaacagcctccgttgcccacatctgagagtccctttgcctggagccctctggccggggagaagttcgtggaggtgtacaaagaagctcacttactggctttacacattgagagcagcagccggaaccaggcagcccaagctgccaagcctgaagaccctcggagccagggcgtggaaagattcatacaggagtcaaaattaaaaataaacctctttgagaaagaaaaggaaatgaagaaaagccccacgtctcttaaaagggagacatactacctgtcagacagccccttgctggggccccctgtgggtgagcctcggctcttggcctcctccccggccctgcccagctctggtgcccaggcccgcctcacccgggcgccggggcctccgcactctgctcatgctttgcccagggaatcatgcactgctcatgctgcaagtcaggcagcgactcagaggaagcccgggaccaaattgctgctgcctcgagcggcctctgttagaggaagaagcatccctggggctgcggagaagcccaagaaagagattccagctagtccttccaggacaaaaatcccagctgagaaggaatcccaccgggatgttctccctgacaaacctgccccgggtgctgtcaatgtgccggccgccggaagccacttgggccagggcaagcgggcgatccctgttccaaacaagttggggctgaagaagaccctgttaaaagcacccggctctaccagcaatctcgcaaggaagtcctcctcggggcctgtttggagcggggcatccagtgcgtgcacatccccagcagtgggcaaagctaaatcaagtgaatttgcaagtattcctgcaaatagctcccggcctctgtcaaacatcagcaagtcaggcagaatgggacccgccatgctgcggccagctctgcctgcaggccctgtgggggcatcctcctggcaggccaagcgggtcgatgtttctgagctggcagcggagcagctcacggcacccccctcagcatcccccacccaaccccagactccggaaggtggcggccagtggctgaactccagttgcgcttggtcagaatcttctcaattgaataagactagaagtatcagacggcgagattcctgtctaaattccaagacaaaggttatgcctactcctacaaatcaatttaaaattcctaagttttctattggtgactccccggacagctcaacaccaaagctttcgcgggcacagcggccgcagtcgtgcacgtcagttggcagggtcactgtccacagcaccccggttagacgctcatctgggccagcaccacaaagcctgctgagcgcacggcgtgtgtcagccttgcccacacccgccagccggcgctgctctggccttccaccgatgacccccaaaacgatgcccagggccgtgggctctcccctgtgtgtgccagctcggagacgttcctctgagccccgcaagaactctgcaatgagaactgaaccaacaagggagagcaacagaaagacagattccaggctggtggatgtgtcccctgacaggggttctcctccttcccgtgtgcctcaggcacttaacttttctccagaggaaagcgattctactttctccaaaagtactgccacagaagtagctcgggaggaagccaagccgggtggagatgcagcccctagtgaggctcttcttgtagatatcaaactggaaccactcgcggtcactccagatgctgcaagccagcccctcattgaccttcctctcatcgacttctgcgataccccagaagcacacgtggctgtaggatctgaaagcaggcctctgatcgacctcatgacaaacactccagacatgaataaaaatgtggccaaaccttcaccggtggtgggacagctcatagacctgagctcccctctgatccagctgagccctgaggctgacaaggagaacgtggattccccactcctcaagttctaagccgaaccaaatcctttgccttgaaagaacagccctaaagtggttttcaaccctcagaaacaagctttaggctggtcgcagtggcttacacttgtaaccctagaacttgggaggctgaggtgggcggattacttgagcccaggagttcgggaccagcctgggaaatatagtgaaactcctgtccctacaaaaaatacaaaaattagccgggtgtggtagtgcatgcctgtagtcccagctacttgggaggctgaagtgggaggatggcctgagctcaaggagatgcaggctgcagtgggctgtgattgtgccactgcactccagcctgggcaccaatgtgagaacctgtcttggaaaaaaaaaaaaagaaacatgttttagtagaagttttatttgaaaaagaaaaataagcataaatatattcccagtgctggagagggtgggctgagggactggggccagcacggaccacccaaggcctctgcttcccgccgccaccctcctcgctgccattctctgggctggaatgtgaagcctcagtcactctaaatgaagaattttcttttgaatgttttgtatgtaaaatagcaagtggctatttttaaagttaagtttgtataaatagttagatattctagatttacattaaattgtaaaataaatggacttattgaagcatatcttgatttttaagcttatcttgattttcaaacatgcatagctatttttatcactctaatcagtaaggctactatctagactcgaatgctttcatacaagtgattttcaaaaattagtcaataaaaattgatgtcagtgcaggcccaggcccgcccccagatacactagtttctaggtctggggccagcctagtaattgttactaggcacacaggtgatgctgactcgatggcctgagacacaccccttgagaagaagctgctctggggagacgagggtatgagtggaaagaggatgggcgaggaggccgggcttacctggacactaaggtgatggacggcgtctgctgggcaggcctcggggaggacccctcagctttgctctcagcaggggcccgacaagctcagtgggcagtggcaggaactgagtgccactggaaagcccattccctttatttagaaaacgagctccaggaagccgctactttgtgtccatttctcttgaggaaacttaccaccttggttgagcggcttcatggcagacagcagcgagccagcggccggactctgtatttcggaccccactccagtgctccctgggtcataccaggatctgcctctgtccacaaagatgagggaaaatgatgactgtgctgtgctctctacttcctgcggttactgcgtgattctaaagctgccactcggaacagcgagtcctctgccgtcgagagcagggaggggtagggtggacaggcgatgccgtggaaagacgtctcggtggaaactgccatggtggaaaggtggcgcgcttctcacggctgagttgctgcgcctgcagacggaagctccccacaggcagagctgcttggatgtgtgagtcatgaagccagagaagccccgctccacgagcagtgactccccaggccctgtgacctccctcctgtcttgcagctcctcctggcaccagtccccagggctctcctgttggtagttcctgcttttcttcttggaaattcctcgtggacctcgagatctttaccctaaaatagttctgttgaatttcaccctggcaatgtaaattgatagcttatcttcacagatgccagacaatggacaactcaccatcagtcctctgctcacctgagacaaatgcatgtctgattgcttcctctgccctattgtttatgtgaaaatgcagattcactgagccagactaaggcatcagtgactgttcctctacctgcctctcacatggagattgtgtattcagtgaaaggctgatcaaagacccaaaggaatgcaacagtttatctcttatctacctatgacctgcgagctgcccaccacccccagttgttgcgcctttccagacagaaccagtgtacatcttacacgtattaattgatgtcctgtgtctccctaatatgtatcaaagcaagctgtgcctcgaccaccttgggcacatatcctcaggacatcatcctgaggctgtgtcactggcatgtccttaaccttggcaaaataaactttctaaattgaaacctgtctca

SEQ ID NO: 454223 - DNA, 4388 bp, Homo sapiens
cccttttcaaaccgaccaatcggcaacccgcgtctcccggcgccgcgtttaaatccgtgccggaggcgcgtcctgcatcgtctgccgctttggtgacttctgacagctctctccatggaaggaggcggcggccgcgatgagccttcagcctgccgggcaggggacgtgaacatggatgaccctaagaaggaagacattcttcttttggccgatgaaaaatttgacttcgatctttcattgtcttcttcgagtgcaaatgaagatgatgaagtcttcttcggaccctttggacataaagaaagatgtattgctgccagcttggaattaaataatccggttcccgaacagcctccgttgcccacatctgagagtccctttgcctggagccctctggccggggagaagttcgtggaggtgtacaaagaagctcacttactggctttacacattgagagcagcagccggaaccaggcagcccaagctgccaagcctgaagaccctcggagccagggcgtggaaagattcatacaggagtcaaaattaaaaataaacctctttgagaaagaaaaggaaatgaagaaaagccccacgtctcttaaaagggagacatactacctgtcagacagccccttgctggggccccctgtgggtgagcctcggctcttggcctcctccccggccctgcccagctctggtgcccaggcccgcctcacccgggcgccggggcctccgcactctgctcatgctttgcccagggaatcatgcactgctcatgctgcaagtcaggcagcgactcagaggaagcccgggaccaaattgctgctgcctcgagcggcctctgttagaggaagaagcatccctggggctgcggagaagcccaagaaagagattccagctagtccttccaggacaaaaatcccagctgagaaggaatcccaccgggatgttctccctgacaaacctgccccgggtgctgtcaatgtgccggccgccggaagccacttgggccagggcaagcgggcgatccctgttccaaacaagttggggctgaagaagaccctgttaaaagcacccggctctaccagcaatctcgcaaggaagtcctcctcggggcctgtttggagcggggcatccagtgcgtgcacatccccagcagtgggcaaagctaaatcaagtgaatttgcaagtattcctgcaaatagctcccggcctctgtcaaacatcagcaagtcaggcagaatgggacccgccatgctgcggccagctctgcctgcaggccctgtgggggcatcctcctggcaggccaagcgggtcgatgtttctgagctggcagcggagcagctcacggcacccccctcagcatcccccacccaaccccagactccggaaggtggcggccagtggctgaactccagttgcgcttggtcagaatcttctcaattgaataagactagaagtatcagacggcgagattcctgtctaaattccaagacaaaggttatgcctactcctacaaatcaatttaaaattcctaagttttctattggtgactccccggacagctcaacaccaaagctttcgcgggcacagcggccgcagtcgtgcacgtcagttggcagggtcactgtccacagcaccccggttagacgctcatctgggccagcaccacaaagcctgctgagcgcacggcgtgtgtcagccttgcccacacccgccagccggcgctgctctggccttccaccgatgacccccaaaacgatgcccagggccgtgggctctcccctgtgtgtgccagctcggagacgttcctctgagccccgcaagaactctgcaatgagaactgaaccaacaagggagagcaacagaaagacagattccaggctggtggatgtgtcccctgacaggggttctcctccttcccgtgtgcctcaggcacttaacttttctccagaggaaagcgattctactttctccaaaagtactgccacagaagtagctcgggaggaagccaagccgggtggagatgcagcccctagtgaggctcttcttgtagatatcaaactggaaccactcgcggtcactccagatgctgcaagccagcccctcattgaccttcctctcatcgacttctgcgataccccagaagcacacgtggctgtaggatctgaaagcaggcctctgatcgacctcatgacaaacactccagacatgaataaaaatgtggccaaaccttcaccggtggtgggacagctcatagacctgagctcccctctgatccagctgagccctgaggctgacaaggagaacgtggattccccactcctcaagttctaagccgaaccaaatcctttgccttgaaagaacagccctaaagtggttttcaaccctcagaaacaagctttaggctggtcgcagtggcttacacttgtaaccctagaacttgggaggctgaggtgggcggattacttgagcccaggagttcgggaccagcctgggaaatatagtgaaactcctgtccctacaaaaaatacaaaaattagccgggtgtggtagtgcatgcctgtagtcccagctacttgggaggctgaagtgggaggatggcctgagctcaaggagatgcaggctgcagtgggctgtgattgtgccactgcactccagcctgggcaccaatgtgagaacctgtcttggaaaaaaaaaaaaagaaacatgttttagtagaagttttatttgaaaaagaaaaataagcataaatatattcccagtgctggagagggtgggctgagggactggggccagcacggaccacccaaggcctctgcttcccgccgccaccctcctcgctgccattctctgggctggaatgtgaagcctcagtcactctaaatgaagaattttcttttgaatgttttgtatgtaaaatagcaagtggctatttttaaagttaagtttgtataaatagttagatattctagatttacattaaattgtaaaataaatggacttattgaagcatatcttgatttttaagcttatcttgattttcaaacatgcatagctatttttatcactctaatcagtaaggctactatctagactcgaatgctttcatacaagtgattttcaaaaattagtcaataaaaattgatgtcagtgcaggcccaggcccgcccccagatacactagtttctaggtctggggccagcctagtaattgttactaggcacacaggtgatgctgactcgatggcctgagacacaccccttgagaagaagctgctctggggagacgagggtatgagtggaaagaggatgggcgaggaggccgggcttacctggacactaaggtgatggacggcgtctgctgggcaggcctcggggaggacccctcagctttgctctcagcaggggcccgacaagctcagtgggcagtggcaggaactgagtgccactggaaagcccattccctttatttagaaaacgagctccaggaagccgctactttgtgtccatttctcttgaggaaacttaccaccttggttgagcggcttcatggcagacagcagcgagccagcggccggactctgtatttcggaccccactccagtgctccctgggtcataccaggatctgcctctgtccacaaagatgagggaaaatgatgactgtgctgtgctctctacttcctgcggttactgcgtgattctaaagctgccactcggaacagcgagtcctctgccgtcgagagcagggaggggtagggtggacaggcgatgccgtggaaagacgtctcggtggaaactgccatggtggaaaggtggcgcgcttctcacggctgagttgctgcgcctgcagacggaagctccccacaggcagagctgcttggatgtgtgagtcatgaagccagagaagccccgctccacgagcagtgactccccaggccctgtgacctccctcctgtcttgcagctcctcctggcaccagtccccagggctctcctgttggtagttcctgcttttcttcttggaaattcctcgtggacctcgagatctttaccctaaaatagttctgttgaatttcaccctggcaatgccgggcactgtggctcacgcgtgtaatcccagcactttgggaggccgaggcgggcggatcacaaggtcaggagatcaagaccatcctggccaacatggtgaaatgccgtctctactaaaaatacaaaaattagctgggtgtggtggcatgtgcctgtaatcccagctactccggaggctgaggcaggagaatcgcttaaacccgggaggcggaggttgcagtgagctaagatcacgccactgcactccagcctagtgaccaagtgagactgtctcaaaaaaataaataaataaaataaaa

SEQ ID NO: 454224 - DNA, 4505 bp, Homo sapiens
cccttttcaaaccgaccaatcggcaacccgcgtctcccggcgccgcgtttaaatccgtgccggaggcgcgtcctgcatcgtctgccgctttggtgacttctgacagctctctccatggaaggaggcggcggccgcgatgagccttcagcctgccgggcaggggacgtgaacatggatgaccctaagaaggaagtgcaaatgaagatgatgaagtcttcttcggaccctttggacataaagaaagatgtattgctgccagcttggaattaaataatccggttcccgaacagcctccgttgcccacatctgagagtccctttgcctggagccctctggccggggagaagttcgtggaggtgtacaaagaagctcacttactggctttacacattgagagcagcagccggaaccaggcagcccaagctgccaagcctgaagaccctcggagccagggcgtggaaagattcatacaggagtcaaaattaaaaataaacctctttgagaaagaaaaggaaatgaagaaaagccccacgtctcttaaaagggagacatactacctgtcagacagccccttgctggggccccctgtgggtgagcctcggctcttggcctcctccccggccctgcccagctctggtgcccaggcccgcctcacccgggcgccggggcctccgcactctgctcatgctttgcccagggaatcatgcactgctcatgctgcaagtcaggcagcgactcagaggaagcccgggaccaaattgctgctgcctcgagcggcctctgttagaggaagaagcatccctggggctgcggagaagcccaagaaagagattccagctagtccttccaggacaaaaatcccagctgagaaggaatcccaccgggatgttctccctgacaaacctgccccgggtgctgtcaatgtgccggccgccggaagccacttgggccagggcaagcgggcgatccctgttccaaacaagttggggctgaagaagaccctgttaaaagcacccggctctaccagcaatctcgcaaggaagtcctcctcggggcctgtttggagcggggcatccagtgcgtgcacatccccagcagtgggcaaagctaaatcaagtgaatttgcaagtattcctgcaaatagctcccggcctctgtcaaacatcagcaagtcaggcagaatgggacccgccatgctgcggccagctctgcctgcaggccctgtgggggcatcctcctggcaggccaagcgggtcgatgtttctgagctggcagcggagcagctcacggcacccccctcagcatcccccacccaaccccagactccggaaggtggcggccagtggctgaactccagttgcgcttggtcagaatcttctcaattgaataagactagaagtatcagacggcgagattcctgtctaaattccaagacaaaggttatgcctactcctacaaatcaatttaaaattcctaagttttctattggtgactccccggacagctcaacaccaaagctttcgcgggcacagcggccgcagtcgtgcacgtcagttggcagggtcactgtccacagcaccccggttagacgctcatctgggccagcaccacaaagcctgctgagcgcacggcgtgtgtcagccttgcccacacccgccagccggcgctgctctggccttccaccgatgacccccaaaacgatgcccagggccgtgggctctcccctgtgtgtgccagctcggagacgttcctctgagccccgcaagaactctgcaatgagaactgaaccaacaagggagagcaacagaaagacagattccaggctggtggatgtgtcccctgacaggggttctcctccttcccgtgtgcctcaggcacttaacttttctccagaggaaagcgattctactttctccaaaagtactgccacagaagtagctcgggaggaagccaagccgggtggagatgcagcccctagtgaggctcttcttgtagatatcaaactggaaccactcgcggtcactccagatgctgcaagccagcccctcattgaccttcctctcatcgacttctgcgataccccagaagcacacgtggctgtaggatctgaaagcaggcctctgatcgacctcatgacaaacactccagacatgaataaaaatgtggccaaaccttcaccggtggtgggacagctcatagacctgagctcccctctgatccagctgagccctgaggctgacaaggagaacgtggattccccactcctcaagttctaagccgaaccaaatcctttgccttgaaagaacagccctaaagtggttttcaaccctcagaaacaagctttaggctggtcgcagtggcttacacttgtaaccctagaacttgggaggctgaggtgggcggattacttgagcccaggagttcgggaccagcctgggaaatatagtgaaactcctgtccctacaaaaaatacaaaaattagccgggtgtggtagtgcatgcctgtagtcccagctacttgggaggctgaagtgggaggatggcctgagctcaaggagatgcaggctgcagtgggctgtgattgtgccactgcactccagcctgggcaccaatgtgagaacctgtcttggaaaaaaaaaaaaagaaacatgttttagtagaagttttatttgaaaaagaaaaataagcataaatatattcccagtgctggagagggtgggctgagggactggggccagcacggaccacccaaggcctctgcttcccgccgccaccctcctcgctgccattctctgggctggaatgtgaagcctcagtcactctaaatgaagaattttcttttgaatgttttgtatgtaaaatagcaagtggctatttttaaagttaagtttgtataaatagttagatattctagatttacattaaattgtaaaataaatggacttattgaagcatatcttgatttttaagcttatcttgattttcaaacatgcatagctatttttatcactctaatcagtaaggctactatctagactcgaatgctttcatacaagtgattttcaaaaattagtcaataaaaattgatgtcagtgcaggcccaggcccgcccccagatacactagtttctaggtctggggccagcctagtaattgttactaggcacacaggtgatgctgactcgatggcctgagacacaccccttgagaagaagctgctctggggagacgagggtatgagtggaaagaggatgggcgaggaggccgggcttacctggacactaaggtgatggacggcgtctgctgggcaggcctcggggaggacccctcagctttgctctcagcaggggcccgacaagctcagtgggcagtggcaggaactgagtgccactggaaagcccattccctttatttagaaaacgagctccaggaagccgctactttgtgtccatttctcttgaggaaacttaccaccttggttgagcggcttcatggcagacagcagcgagccagcggccggactctgtatttcggaccccactccagtgctccctgggtcataccaggatctgcctctgtccacaaagatgagggaaaatgatgactgtgctgtgctctctacttcctgcggttactgcgtgattctaaagctgccactcggaacagcgagtcctctgccgtcgagagcagggaggggtagggtggacaggcgatgccgtggaaagacgtctcggtggaaactgccatggtggaaaggtggcgcgcttctcacggctgagttgctgcgcctgcagacggaagctccccacaggcagagctgcttggatgtgtgagtcatgaagccagagaagccccgctccacgagcagtgactccccaggccctgtgacctccctcctgtcttgcagctcctcctggcaccagtccccagggctctcctgttggtagttcctgcttttcttcttggaaattcctcgtggacctcgagatctttaccctaaaatagttctgttgaatttcaccctggcaatgtaaattgatagcttatcttcacagatgccagacaatggacaactcaccatcagtcctctgctcacctgagacaaatgcatgtctgattgcttcctctgccctattgtttatgtgaaaatgcagattcactgagccagactaaggcatcagtgactgttcctctacctgcctctcacatggagattgtgtattcagtgaaaggctgatcaaagacccaaaggaatgcaacagtttatctcttatctacctatgacctgcgagctgcccaccacccccagttgttgcgcctttccagacagaaccagtgtacatcttacacgtattaattgatgtcctgtgtctccctaatatgtatcaaagcaagctgtgcctcgaccaccttgggcacatatcctcaggacatcatcctgaggctgtgtcactggcatgtccttaaccttggcaaaataaactttctaaattgaaacctgtctca

SEQ ID NO: 454225 - DNA, 4630 bp, Homo sapiens
tcacttgaggccaggagttcgagaccagcctggtcaacatagcgagacttcgtcactagaaaaaatttaaaaaattttttaaaaaggaaaaaatataacttagagccccctatgaaaaactaaattagcatcatgacaggatacactttggggagtgaaatttcacagtacctttatttaattccaagccatagagcctggtaatatttttctctttatcagctgtggcactaaaataacagtggattttttccctctagacattcttcttttggccgatgaaaaatttgacttcgatctttcattgtcttcttcgagtgcaaatgaagatgatgaagtcttcttcggaccctttggacataaagaaagatgtattgctgccagcttggaattaaataatccggttcccgaacagcctccgttgcccacatctgagagtccctttgcctggagccctctggccggggagaagttcgtggaggtgtacaaagaagctcacttactggctttacacattgagagcagcagccggaaccaggcagcccaagctgccaagcctgaagaccctcggagccagggcgtggaaagattcatacaggagtcaaaattaaaaataaacctctttgagaaagaaaaggaaatgaagaaaagccccacgtctcttaaaagggagacatactacctgtcagacagccccttgctggggccccctgtgggtgagcctcggctcttggcctcctccccggccctgcccagctctggtgcccaggcccgcctcacccgggcgccggggcctccgcactctgctcatgctttgcccagggaatcatgcactgctcatgctgcaagtcaggcagcgactcagaggaagcccgggaccaaattgctgctgcctcgagcggcctctgttagaggaagaagcatccctggggctgcggagaagcccaagaaagagattccagctagtccttccaggacaaaaatcccagctgagaaggaatcccaccgggatgttctccctgacaaacctgccccgggtgctgtcaatgtgccggccgccggaagccacttgggccagggcaagcgggcgatccctgttccaaacaagttggggctgaagaagaccctgttaaaagcacccggctctaccagcaatctcgcaaggaagtcctcctcggggcctgtttggagcggggcatccagtgcgtgcacatccccagcagtgggcaaagctaaatcaagtgaatttgcaagtattcctgcaaatagctcccggcctctgtcaaacatcagcaagtcaggcagaatgggacccgccatgctgcggccagctctgcctgcaggccctgtgggggcatcctcctggcaggccaagcgggtcgatgtttctgagctggcagcggagcagctcacggcacccccctcagcatcccccacccaaccccagactccggaaggtggcggccagtggctgaactccagttgcgcttggtcagaatcttctcaattgaataagactagaagtatcagacggcgagattcctgtctaaattccaagacaaaggttatgcctactcctacaaatcaatttaaaattcctaagttttctattggtgactccccggacagctcaacaccaaagctttcgcgggcacagcggccgcagtcgtgcacgtcagttggcagggtcactgtccacagcaccccggttagacgctcatctgggccagcaccacaaagcctgctgagcgcacggcgtgtgtcagccttgcccacacccgccagccggcgctgctctggccttccaccgatgacccccaaaacgatgcccagggccgtgggctctcccctgtgtgtgccagctcggagacgttcctctgagccccgcaagaactctgcaatgagaactgaaccaacaagggagagcaacagaaagacagattccaggctggtggatgtgtcccctgacaggggttctcctccttcccgtgtgcctcaggcacttaacttttctccagaggaaagcgattctactttctccaaaagtactgccacagaagtagctcgggaggaagccaagccgggtggagatgcagcccctagtgaggctcttcttgtagatatcaaactggaaccactcgcggtcactccagatgctgcaagccagcccctcattgaccttcctctcatcgacttctgcgataccccagaagcacacgtggctgtaggatctgaaagcaggcctctgatcgacctcatgacaaacactccagacatgaataaaaatgtggccaaaccttcaccggtggtgggacagctcatagacctgagctcccctctgatccagctgagccctgaggctgacaaggagaacgtggattccccactcctcaagttctaagccgaaccaaatcctttgccttgaaagaacagccctaaagtggttttcaaccctcagaaacaagctttaggctggtcgcagtggcttacacttgtaaccctagaacttgggaggctgaggtgggcggattacttgagcccaggagttcgggaccagcctgggaaatatagtgaaactcctgtccctacaaaaaatacaaaaattagccgggtgtggtagtgcatgcctgtagtcccagctacttgggaggctgaagtgggaggatggcctgagctcaaggagatgcaggctgcagtgggctgtgattgtgccactgcactccagcctgggcaccaatgtgagaacctgtcttggaaaaaaaaaaaaagaaacatgttttagtagaagttttatttgaaaaagaaaaataagcataaatatattcccagtgctggagagggtgggctgagggactggggccagcacggaccacccaaggcctctgcttcccgccgccaccctcctcgctgccattctctgggctggaatgtgaagcctcagtcactctaaatgaagaattttcttttgaatgttttgtatgtaaaatagcaagtggctatttttaaagttaagtttgtataaatagttagatattctagatttacattaaattgtaaaataaatggacttattgaagcatatcttgatttttaagcttatcttgattttcaaacatgcatagctatttttatcactctaatcagtaaggctactatctagactcgaatgctttcatacaagtgattttcaaaaattagtcaataaaaattgatgtcagtgcaggcccaggcccgcccccagatacactagtttctaggtctggggccagcctagtaattgttactaggcacacaggtgatgctgactcgatggcctgagacacaccccttgagaagaagctgctctggggagacgagggtatgagtggaaagaggatgggcgaggaggccgggcttacctggacactaaggtgatggacggcgtctgctgggcaggcctcggggaggacccctcagctttgctctcagcaggggcccgacaagctcagtgggcagtggcaggaactgagtgccactggaaagcccattccctttatttagaaaacgagctccaggaagccgctactttgtgtccatttctcttgaggaaacttaccaccttggttgagcggcttcatggcagacagcagcgagccagcggccggactctgtatttcggaccccactccagtgctccctgggtcataccaggatctgcctctgtccacaaagatgagggaaaatgatgactgtgctgtgctctctacttcctgcggttactgcgtgattctaaagctgccactcggaacagcgagtcctctgccgtcgagagcagggaggggtagggtggacaggcgatgccgtggaaagacgtctcggtggaaactgccatggtggaaaggtggcgcgcttctcacggctgagttgctgcgcctgcagacggaagctccccacaggcagagctgcttggatgtgtgagtcatgaagccagagaagccccgctccacgagcagtgactccccaggccctgtgacctccctcctgtcttgcagctcctcctggcaccagtccccagggctctcctgttggtagttcctgcttttcttcttggaaattcctcgtggacctcgagatctttaccctaaaatagttctgttgaatttcaccctggcaatgtaaattgatagcttatcttcacagatgccagacaatggacaactcaccatcagtcctctgctcacctgagacaaatgcatgtctgattgcttcctctgccctattgtttatgtgaaaatgcagattcactgagccagactaaggcatcagtgactgttcctctacctgcctctcacatggagattgtgtattcagtgaaaggctgatcaaagacccaaaggaatgcaacagtttatctcttatctacctatgacctgcgagctgcccaccacccccagttgttgcgcctttccagacagaaccagtgtacatcttacacgtattaattgatgtcctgtgtctccctaatatgtatcaaagcaagctgtgcctcgaccaccttgggcacatatcctcaggacatcatcctgaggctgtgtcactggcatgtccttaaccttggcaaaataaactttctaaattgaaacctgtctca

SEQ ID NO: 454226 - DNA, 4432 bp, Homo sapiens
cccttttcaaaccgaccaatcggcaacccgcgtctcccggcgccgcgtttaaatccgtgccggaggcgcgtcctgcatcgtctgccgctttggtgacttctgacagctctctccatggaaggaggcggcggccgcgatgagccttcagcctgccgggcaggggacgtgaacatggatgaccctaagaaggaagacattcttcttttggccgatgaaaaatttgacttcgatctttcattgtcttcttcgagtgcaaatgaagatgatgaagtcttcttcggaccctttggacataaagaaagatgtattgctgccagcttggaattaaataatccggttcccgaacagcctccgttgcccacatctgagagtccctttgcctggagccctctggccggggagaagttcgtggaggtgtacaaagaagctcacttactggctttacacattgagagcagcagccggaaccaggcagcccaagctgccaagcctgaagaccctcggagccagggcgtggaaagattcatacaggagtcaaaattaaaaataaacctctttgagaaagaaaaggaaatgaagaaaagccccacgtctcttaaaagggagacatactacctgtcagacagccccttgctggggccccctgtgggtgagcctcggctcttggcctcctccccggccctgcccagctctggtgcccaggcccgcctcacccgggcgccggggcctccgcactctgctcatgctttgcccagggaatcatgcactgctcatgctgcaagtcaggcagcgactcagaggaagcccgggaccaaattgctgctgcctcgagcggcctctgttagaggaagaagcatccctggggctgcggagaagcccaagaaagagattccagctagtccttccaggacaaaaatcccagctgagaaggaatcccaccgggatgttctccctgacaaacctgccccgggtgctgtcaatgtgccggccgccggaagccacttgggccagggcaagcgggcgatccctgttccaaacaagttggggctgaagaagaccctgttaaaagcacccggctctaccagcaatctcgcaaggaagtcctcctcggggcctgtttggagcggggcatccagtgcgtgcacatccccagcagtgggcaaagctaaatcaagtgaatttgcaagtattcctgcaaatagctcccggcctctgtcaaacatcagcaagtcaggcagaatgggacccgccatgctgcggccagctctgcctgcaggccctgtgggggcatcctcctggcaggccaagcgggtcgatgtttctgagctggcagcggagcagctcacggcacccccctcagcatcccccacccaaccccagactccggaaggtggcggccagtggctgaactccagttgcgcttggtcagaatcttctcaattgaataagactagaagtatcagacggcgagattcctgtctaaattccaagacaaaggttatgcctactcctacaaatcaatttaaaattcctaagttttctattggtgactccccggacagctcaacaccaaagctttcgcgggcacagcggccgcagtcgtgcacgtcagttggcagggtcactgtccacagcaccccggttagacgctcatctgggccagcaccacaaagcctgctgagcgcacggcgtgtgtcagccttgcccacacccgccagccggcgctgctctggccttccaccgatgacccccaaaacgatgcccagggccgtgggctctcccctgtgtgtgccagctcggagacgttcctctgagccccgcaagaactctgcaatgagaactgaaccaacaagggagagcaacagaaagacagattccaggctggtggatgtgtcccctgacaggggttctcctccttcccgtgtgcctcaggcacttaacttttctccagaggaaagcgattctactttctccaaaagtacttcctctcatcgacttctgcgataccccagaagcacacgtggctgtaggatctgaaagcaggcctctgatcgacctcatgacaaacactccagacatgaataaaaatgtggccaaaccttcaccggtggtgggacagctcatagacctgagctcccctctgatccagctgagccctgaggctgacaaggagaacgtggattccccactcctcaagttctaagccgaaccaaatcctttgccttgaaagaacagccctaaagtggttttcaaccctcagaaacaagctttaggctggtcgcagtggcttacacttgtaaccctagaacttgggaggctgaggtgggcggattacttgagcccaggagttcgggaccagcctgggaaatatagtgaaactcctgtccctacaaaaaatacaaaaattagccgggtgtggtagtgcatgcctgtagtcccagctacttgggaggctgaagtgggaggatggcctgagctcaaggagatgcaggctgcagtgggctgtgattgtgccactgcactccagcctgggcaccaatgtgagaacctgtcttggaaaaaaaaaaaaagaaacatgttttagtagaagttttatttgaaaaagaaaaataagcataaatatattcccagtgctggagagggtgggctgagggactggggccagcacggaccacccaaggcctctgcttcccgccgccaccctcctcgctgccattctctgggctggaatgtgaagcctcagtcactctaaatgaagaattttcttttgaatgttttgtatgtaaaatagcaagtggctatttttaaagttaagtttgtataaatagttagatattctagatttacattaaattgtaaaataaatggacttattgaagcatatcttgatttttaagcttatcttgattttcaaacatgcatagctatttttatcactctaatcagtaaggctactatctagactcgaatgctttcatacaagtgattttcaaaaattagtcaataaaaattgatgtcagtgcaggcccaggcccgcccccagatacactagtttctaggtctggggccagcctagtaattgttactaggcacacaggtgatgctgactcgatggcctgagacacaccccttgagaagaagctgctctggggagacgagggtatgagtggaaagaggatgggcgaggaggccgggcttacctggacactaaggtgatggacggcgtctgctgggcaggcctcggggaggacccctcagctttgctctcagcaggggcccgacaagctcagtgggcagtggcaggaactgagtgccactggaaagcccattccctttatttagaaaacgagctccaggaagccgctactttgtgtccatttctcttgaggaaacttaccaccttggttgagcggcttcatggcagacagcagcgagccagcggccggactctgtatttcggaccccactccagtgctccctgggtcataccaggatctgcctctgtccacaaagatgagggaaaatgatgactgtgctgtgctctctacttcctgcggttactgcgtgattctaaagctgccactcggaacagcgagtcctctgccgtcgagagcagggaggggtagggtggacaggcgatgccgtggaaagacgtctcggtggaaactgccatggtggaaaggtggcgcgcttctcacggctgagttgctgcgcctgcagacggaagctccccacaggcagagctgcttggatgtgtgagtcatgaagccagagaagccccgctccacgagcagtgactccccaggccctgtgacctccctcctgtcttgcagctcctcctggcaccagtccccagggctctcctgttggtagttcctgcttttcttcttggaaattcctcgtggacctcgagatctttaccctaaaatagttctgttgaatttcaccctggcaatgtaaattgatagcttatcttcacagatgccagacaatggacaactcaccatcagtcctctgctcacctgagacaaatgcatgtctgattgcttcctctgccctattgtttatgtgaaaatgcagattcactgagccagactaaggcatcagtgactgttcctctacctgcctctcacatggagattgtgtattcagtgaaaggctgatcaaagacccaaaggaatgcaacagtttatctcttatctacctatgacctgcgagctgcccaccacccccagttgttgcgcctttccagacagaaccagtgtacatcttacacgtattaattgatgtcctgtgtctccctaatatgtatcaaagcaagctgtgcctcgaccaccttgggcacatatcctcaggacatcatcctgaggctgtgtcactggcatgtccttaaccttggcaaaataaactttctaaattgaaacctgtctca

SEQ ID NO: 454227 - DNA, 4203 bp, Homo sapiens
aacgcatataggctaggtacgaggcctggtgttgaatcggccgagggagagagaggcgtcaaagaagctcacttactggctttacacattgagagcagcagccggaaccaggcagcccaagctgccaagcctgaagaccctcggagccagggcgtggaaagattcatacaggagtcaaaattaaaaataaacctctttgagaaagaaaaggaaatgaagaaaagccccacgtctcttaaaagggagacatactacctgtcagacagccccttgctggggccccctgtgggtgagcctcggctcttggcctcctccccggccctgcccagctctggtgcccaggcccgcctcacccgggcgccggggcctccgcactctgctcatgctttgcccagggaatcatgcactgctcatgctgcaagtcaggcagcgactcagaggaagcccgggaccaaattgctgctgcctcgagcggcctctgttagaggaagaagcatccctggggctgcggagaagcccaagaaagagattccagctagtccttccaggacaaaaatcccagctgagaaggaatcccaccgggatgttctccctgacaaacctgccccgggtgctgtcaatgtgccggccgccggaagccacttgggccagggcaagcgggcgatccctgttccaaacaagttggggctgaagaagaccctgttaaaagcacccggctctaccagcaatctcgcaaggaagtcctcctcggggcctgtttggagcggggcatccagtgcgtgcacatccccagcagtgggcaaagctaaatcaagtgaatttgcaagtattcctgcaaatagctcccggcctctgtcaaacatcagcaagtcaggcagaatgggacccgccatgctgcggccagctctgcctgcaggccctgtgggggcatcctcctggcaggccaagcgggtcgatgtttctgagctggcagcggagcagctcacggcacccccctcagcatcccccacccaaccccagactccggaaggtggcggccagtggctgaactccagttgcgcttggtcagaatcttctcaattgaataagactagaagtatcagacggcgagattcctgtctaaattccaagacaaaggttatgcctactcctacaaatcaatttaaaattcctaagttttctattggtgactccccggacagctcaacaccaaagctttcgcgggcacagcggccgcagtcgtgcacgtcagttggcagggtcactgtccacagcaccccggttagacgctcatctgggccagcaccacaaagcctgctgagcgcacggcgtgtgtcagccttgcccacacccgccagccggcgctgctctggccttccaccgatgacccccaaaacgatgcccagggccgtgggctctcccctgtgtgtgccagctcggagacgttcctctgagccccgcaagaactctgcaatgagaactgaaccaacaagggagagcaacagaaagacagattccaggctggtggatgtgtcccctgacaggggttctcctccttcccgtgtgcctcaggcacttaacttttctccagaggaaagcgattctactttctccaaaagtactgccacagaagtagctcgggaggaagccaagccgggtggagatgcagcccctagtgaggctcttcttgtagatatcaaactggaaccactcgcggtcactccagatgctgcaagccagcccctcattgaccttcctctcatcgacttctgcgataccccagaagcacacgtggctgtaggatctgaaagcaggcctctgatcgacctcatgacaaacactccagacatgaataaaaatgtggccaaaccttcaccggtggtgggacagctcatagacctgagctcccctctgatccagctgagccctgaggctgacaaggagaacgtggattccccactcctcaagttctaagccgaaccaaatcctttgccttgaaagaacagccctaaagtggttttcaaccctcagaaacaagctttaggctggtcgcagtggcttacacttgtaaccctagaacttgggaggctgaggtgggcggattacttgagcccaggagttcgggaccagcctgggaaatatagtgaaactcctgtccctacaaaaaatacaaaaattagccgggtgtggtagtgcatgcctgtagtcccagctacttgggaggctgaagtgggaggatggcctgagctcaaggagatgcaggctgcagtgggctgtgattgtgccactgcactccagcctgggcaccaatgtgagaacctgtcttggaaaaaaaaaaaaagaaacatgttttagtagaagttttatttgaaaaagaaaaataagcataaatatattcccagtgctggagagggtgggctgagggactggggccagcacggaccacccaaggcctctgcttcccgccgccaccctcctcgctgccattctctgggctggaatgtgaagcctcagtcactctaaatgaagaattttcttttgaatgttttgtatgtaaaatagcaagtggctatttttaaagttaagtttgtataaatagttagatattctagatttacattaaattgtaaaataaatggacttattgaagcatatcttgatttttaagcttatcttgattttcaaacatgcatagctatttttatcactctaatcagtaaggctactatctagactcgaatgctttcatacaagtgattttcaaaaattagtcaataaaaattgatgtcagtgcaggcccaggcccgcccccagatacactagtttctaggtctggggccagcctagtaattgttactaggcacacaggtgatgctgactcgatggcctgagacacaccccttgagaagaagctgctctggggagacgagggtatgagtggaaagaggatgggcgaggaggccgggcttacctggacactaaggtgatggacggcgtctgctgggcaggcctcggggaggacccctcagctttgctctcagcaggggcccgacaagctcagtgggcagtggcaggaactgagtgccactggaaagcccattccctttatttagaaaacgagctccaggaagccgctactttgtgtccatttctcttgaggaaacttaccaccttggttgagcggcttcatggcagacagcagcgagccagcggccggactctgtatttcggaccccactccagtgctccctgggtcataccaggatctgcctctgtccacaaagatgagggaaaatgatgactgtgctgtgctctctacttcctgcggttactgcgtgattctaaagctgccactcggaacagcgagtcctctgccgtcgagagcagggaggggtagggtggacaggcgatgccgtggaaagacgtctcggtggaaactgccatggtggaaaggtggcgcgcttctcacggctgagttgctgcgcctgcagacggaagctccccacaggcagagctgcttggatgtgtgagtcatgaagccagagaagccccgctccacgagcagtgactccccaggccctgtgacctccctcctgtcttgcagctcctcctggcaccagtccccagggctctcctgttggtagttcctgcttttcttcttggaaattcctcgtggacctcgagatctttaccctaaaatagttctgttgaatttcaccctggcaatgtaaattgatagcttatcttcacagatgccagacaatggacaactcaccatcagtcctctgctcacctgagacaaatgcatgtctgattgcttcctctgccctattgtttatgtgaaaatgcagattcactgagccagactaaggcatcagtgactgttcctctacctgcctctcacatggagattgtgtattcagtgaaaggctgatcaaagacccaaaggaatgcaacagtttatctcttatctacctatgacctgcgagctgcccaccacccccagttgttgcgcctttccagacagaaccagtgtacatcttacacgtattaattgatgtcctgtgtctccctaatatgtatcaaagcaagctgtgcctcgaccaccttgggcacatatcctcaggacatcatcctgaggctgtgtcactggcatgtccttaaccttggcaaaataaactttctaaattgaaacctgtctca

SEQ ID NO: 454228 - DNA, 3422 bp, Homo sapiens
acgattcttctcataccatcttccccatcattttggggtctgtttcgactgactaattttgtttccgggttttggcctcattttcctgcctctacatttttcacaagtttttcttggttgttggatattgtcaggtgtacacttttgaatgtctggattttgttgtctttctctgaggagttgggttgggcttggcaggcagttaaggtgcagatcatccttccgaggctttttatgctttgaagtggtgggtctagcatagcctttccgcctcccgccaccggcgtccttcccaaggcctctgctgcacacccgtgtgtcccgcaaggcccgcgagacccctgcactcctgctgctgcaagatgacaccttctcggccctgtgagctccgctcgttgctccctggtgactccccggacagctcaacaccaaagctttcgcgggcacagcggccgcagtcgtgcacgtcagttggcagggtcactgtccacagcaccccggttagacgctcatctgggccagcaccacaaagcctgctgagcgcacggcgtgtgtcagccttgcccacacccgccagccggcgctgctctggccttccaccgatgacccccaaaacgatgcccagggccgtgggctctcccctgtgtgtgccagctcggagacgttcctctgagccccgcaagaactctgcaatgagaactgaaccaacaagggagagcaacagaaagacagattccaggctggtggatgtgtcccctgacaggggttctcctccttcccgtgtgcctcaggcacttaacttttctccagaggaaagcgattctactttctccaaaagtactgccacagaagtagctcgggaggaagccaagccgggtggagatgcagcccctagtgaggctcttcttgtagatatcaaactggaaccactcgcggtcactccagatgctgcaagccagcccctcattgaccttcctctcatcgacttctgcgataccccagaagcacacgtggctgtaggatctgaaagcaggcctctgatcgacctcatgacaaacactccagacatgaataaaaatgtggccaaaccttcaccggtggtgggacagctcatagacctgagctcccctctgatccagctgagccctgaggctgacaaggagaacgtggattccccactcctcaagttctaagccgaaccaaatcctttgccttgaaagaacagccctaaagtggttttcaaccctcagaaacaagctttaggctggtcgcagtggcttacacttgtaaccctagaacttgggaggctgaggtgggcggattacttgagcccaggagttcgggaccagcctgggaaatatagtgaaactcctgtccctacaaaaaatacaaaaattagccgggtgtggtagtgcatgcctgtagtcccagctacttgggaggctgaagtgggaggatggcctgagctcaaggagatgcaggctgcagtgggctgtgattgtgccactgcactccagcctgggcaccaatgtgagaacctgtcttggaaaaaaaaaaaaagaaacatgttttagtagaagttttatttgaaaaagaaaaataagcataaatatattcccagtgctggagagggtgggctgagggactggggccagcacggaccacccaaggcctctgcttcccgccgccaccctcctcgctgccattctctgggctggaatgtgaagcctcagtcactctaaatgaagaattttcttttgaatgttttgtatgtaaaatagcaagtggctatttttaaagttaagtttgtataaatagttagatattctagatttacattaaattgtaaaataaatggacttattgaagcatatcttgatttttaagcttatcttgattttcaaacatgcatagctatttttatcactctaatcagtaaggctactatctagactcgaatgctttcatacaagtgattttcaaaaattagtcaataaaaattgatgtcagtgcaggcccaggcccgcccccagatacactagtttctaggtctggggccagcctagtaattgttactaggcacacaggtgatgctgactcgatggcctgagacacaccccttgagaagaagctgctctggggagacgagggtatgagtggaaagaggatgggcgaggaggccgggcttacctggacactaaggtgatggacggcgtctgctgggcaggcctcggggaggacccctcagctttgctctcagcaggggcccgacaagctcagtgggcagtggcaggaactgagtgccactggaaagcccattccctttatttagaaaacgagctccaggaagccgctactttgtgtccatttctcttgaggaaacttaccaccttggttgagcggcttcatggcagacagcagcgagccagcggccggactctgtatttcggaccccactccagtgctccctgggtcataccaggatctgcctctgtccacaaagatgagggaaaatgatgactgtgctgtgctctctacttcctgcggttactgcgtgattctaaagctgccactcggaacagcgagtcctctgccgtcgagagcagggaggggtagggtggacaggcgatgccgtggaaagacgtctcggtggaaactgccatggtggaaaggtggcgcgcttctcacggctgagttgctgcgcctgcagacggaagctccccacaggcagagctgcttggatgtgtgagtcatgaagccagagaagccccgctccacgagcagtgactccccaggccctgtgacctccctcctgtcttgcagctcctcctggcaccagtccccagggctctcctgttggtagttcctgcttttcttcttggaaattcctcgtggacctcgagatctttaccctaaaatagttctgttgaatttcaccctggcaatgtaaattgatagcttatcttcacagatgccagacaatggacaactcaccatcagtcctctgctcacctgagacaaatgcatgtctgattgcttcctctgccctattgtttatgtgaaaatgcagattcactgagccagactaaggcatcagtgactgttcctctacctgcctctcacatggagattgtgtattcagtgaaaggctgatcaaagacccaaaggaatgcaacagtttatctcttatctacctatgacctgcgagctgcccaccacccccagttgttgcgcctttccagacagaaccagtgtacatcttacacgtattaattgatgtcctgtgtctccctaatatgtatcaaagcaagctgtgcctcgaccaccttgggcacatatcctcaggacatcatcctgaggctgtgtcactggcatgtccttaaccttggcaaaataaactttctaaattgaaacctgtctca

SEQ ID NO: 454229 - DNA, 3167 bp, Homo sapiens
cccttttcaaaccgaccaatcggcaacccgcgtctcccggcgccgcgtttaaatccgtgccggaggcgcgtcctgcatcgtctgccgctttggtgacttctgacagctctctccatggaaggaggcggcggccgcgatgagccttcagcctgccgggcaggggacgtgaacatggatgaccctaagaaggaagacattcttcttttggccgatgaaaaatttgacttcgatctttcattgtcttcttcgagtgcaaatgaagatgatgaagtcttcttcggaccctttggacataaagaaagatgtattgctgccagcttggaattaaataatccggttcccgaacagcctccgttgcccacatctgagagtccctttgcctggagccctctggccggggagaagttcgtggaggtgtacaaagaagctcacttactggctttacacattgagagcagcagccggaaccaggcagcccaagctgccaagcctgaagaccctcggagccagggcgtggaaagattcatacaggagtcaaaattaaaaataaacctctttgagaaagaaaaggaaatgaagaaaagccccacgtctcttaaaagggagacatactacctgtcagacagccccttgctggggccccctgtgggtgagcctcggctcttggcctcctccccggccctgcccagctctggtgcccaggcccgcctcacccgggcgccggggcctccgcactctgctcatgctttgcccagggaatcatgcactgctcatgctgcaagtcaggcagcgactcagaggaagcccgggaccaaattgctgctgcctcgagcggcctctgttagaggaagaagcatccctggggctgcggagaagcccaagaaagagattccagctagtccttccaggacaaaaatcccagctgagaaggaatcccaccgggatgttctccctgacaaacctgccccgggtgctgtcaatgtgccggccgccggaagccacttgggccagggcaagcgggcgatccctgttccaaacaagttggggctgaagaagaccctgttaaaagcacccggctctaccagcaatctcgcaaggaagtcctcctcggggcctgtttggagcggggcatccagtgcgtgcacatccccagcagtgggcaaagctaaatcaagtgaatttgcaagtattcctgcaaatagctcccggcctctgtcaaacatcagcaagtcaggcagaatgggacccgccatgctgcggccagctctgcctgcaggccctgtgggggcatcctcctggcaggccaagcgggtcgatgtttctgagctggcagcggagcagctcacggcacccccctcagcatcccccacccaaccccagactccggaaggtggcggccacacggaccacccaaggcctctgcttcccgccgccaccctcctcgctgccattctctgggctggaatgtgaagcctcagtcactctaaatgaagaattttcttttgaatgttttgtatgtaaaatagcaagtggctatttttaaagttaagtttgtataaatagttagatattctagatttacattaaattgtaaaataaatggacttattgaagcatatcttgatttttaagcttatcttgattttcaaacatgcatagctatttttatcactctaatcagtaaggctactatctagactcgaatgctttcatacaagtgattttcaaaaattagtcaataaaaattgatgtcagtgcaggcccaggcccgcccccagatacactagtttctaggtctggggccagcctagtaattgttactaggcacacaggtgatgctgactcgatggcctgagacacaccccttgagaagaagctgctctggggagacgagggtatgagtggaaagaggatgggcgaggaggccgggcttacctggacactaaggtgatggacggcgtctgctgggcaggcctcggggaggacccctcagctttgctctcagcaggggcccgacaagctcagtgggcagtggcaggaactgagtgccactggaaagcccattccctttatttagaaaacgagctccaggaagccgctactttgtgtccatttctcttgaggaaacttaccaccttggttgagcggcttcatggcagacagcagcgagccagcggccggactctgtatttcggaccccactccagtgctccctgggtcataccaggatctgcctctgtccacaaagatgagggaaaatgatgactgtgctgtgctctctacttcctgcggttactgcgtgattctaaagctgccactcggaacagcgagtcctctgccgtcgagagcagggaggggtagggtggacaggcgatgccgtggaaagacgtctcggtggaaactgccatggtggaaaggtggcgcgcttctcacggctgagttgctgcgcctgcagacggaagctccccacaggcagagctgcttggatgtgtgagtcatgaagccagagaagccccgctccacgagcagtgactccccaggccctgtgacctccctcctgtcttgcagctcctcctggcaccagtccccagggctctcctgttggtagttcctgcttttcttcttggaaattcctcgtggacctcgagatctttaccctaaaatagttctgttgaatttcaccctggcaatgtaaattgatagcttatcttcacagatgccagacaatggacaactcaccatcagtcctctgctcacctgagacaaatgcatgtctgattgcttcctctgccctattgtttatgtgaaaatgcagattcactgagccagactaaggcatcagtgactgttcctctacctgcctctcacatggagattgtgtattcagtgaaaggctgatcaaagacccaaaggaatgcaacagtttatctcttatctacctatgacctgcgagctgcccaccacccccagttgttgcgcctttccagacagaaccagtgtacatcttacacgtattaattgatgtcctgtgtctccctaatatgtatcaaagcaagctgtgcctcgaccaccttgggcacatatcctcaggacatcatcctgaggctgtgtcactggcatgtccttaaccttggcaaaataaactttctaaattgaaacctgtctca

SEQ ID NO: 454230 - DNA, 2480 bp, Homo sapiens
cccttttcaaaccgaccaatcggcaacccgcgtctcccggcgccgcgtttaaatccgtgccggaggcgcgtcctgcatcgtctgccgctttggtgacttctgacagctctctccatggaaggaggcggcggccgcgatgagccttcagcctgccgggcaggggacgtgaacatggatgaccctaagaaggaagacattcttcttttggccgatgaaaaatttgacttcgatctttcattgtcttcttcgagtgcaaatgaagatgatgaagtcttcttcggaccctttggacataaagaaagatgtattgctgccagcttggaattaaataatccggttcccgaacagcctccgttgcccacatctgagagtccctttgcctggagccctctggccggggagaagttcgtggaggtgtacaaagaagctcacttactggctttacacattgagagcagcagccggaaccaggcagcccaagctgccaagcctgaagaccctcggagccagggcgtggaaagattcatacaggagtcaaaattaaaaataaacctctttgagaaagaaaaggaaatgaagaaaagccccacgtctcttaaaagggagacatactacctgtcagacagccccttgctggggccccctgtgggtgagcctcggctcttggcctcctccccggccctgcccagctctggtgcccaggcccgcctcacccgggcgccggggcctccgcactctgctcatgctttgcccagggaatcatgcactgctcatgctgcaagtcaggcagcgactcagaggaagcccgggaccaaattgctgctgcctcgagcggcctctgttagaggaagaagcatccctggggctgcggagaagcccaagaaagagattccagctagtccttccaggacaaaaatcccagctgagaaggaatcccaccgggatgttctccctgacaaacctgccccgggtgctgtcaatgtgccggccgccggaagccacttgggccagggcaagcgggcgatccctgttccaaacaagttggggctgaagaagaccctgttaaaagcacccggctctaccagcaatctcgcaaggaagtcctcctcggggcctgtttggagcggggcatccagtgcgtgcacatccccagcagtgggcaaagctaaatcaagtgaatttgcaagtattcctgcaaatagctcccggcctctgtcaaacatcagcaagtcaggcagaatgggacccgccatgctgcggccagctctgcctgcaggccctgtgggggcatcctcctggcaggccaagcgggtcgatgtttctgagctggcagcggagcagctcacggcacccccctcagcatcccccacccaaccccagactccggaaggtggcggccagtggctgaactccagttgcgcttggtcagaatcttctcaattgaataagactagaagtatcagacggcgagattcctgtctaaattccaagacaaaggttatgcctactcctacaaatcaatttaaaattcctaagttttctattggtgactccccggacagctcaacaccaaagctttcgcgggcacagcggccgcagtcgtgcacgtcagttggcagggtcactgtccacagcaccccggttagacgctcatctgggccagcaccacaaagcctgctgagcgcacggcgtgtgtcagccttgcccacacccgccagccggcgctgctctggccttccaccgatgacccccaaaacgatgcccagggccgtgggctctcccctgtgtgtgccagctcggagacgttcctctgagccccgcaagaactctgcaatgaggtaagacacgaaggtggtaataaattggtctcaaattcctaggcttgctgtcccagacagtgacatacctttttcttgccttgctccaggttttagtgaagtaaatagtatttggaaagtttgtttgttttttttttcattgcaaagagaaaatgcaatagacatgagcatagaggaaaattaaaggtattacaaggaaatactgcgtgtaattctctgataatcaatttgaaaacctaatggttttctaaaatttgcaagttattggccaggtgtggtggctcacgcctgtaatcccagcactttgggaggccgaggcaggcagactgcctgagctcaggagtttgagatcaacctgggtaacatggcaaaaccccatctctacaaaaaatacaaaaataagctaggtgtggtggcgtgcactgtagtcccagctatttagggggctgaggtgggaggatcacttgagctcaggaggttgaggctgcagtgagctgagattgccccgttgcactccagcctgggggacagagtgagaccccgtctgtaaaaattaaaataaataaaataaataaaataaaatttatctaaattgacccagaacacatgaagtaagccatagctggagctcagaaatgatta

SEQ ID NO: 454231 - DNA, 2919 bp, Homo sapiens
gagctgagaggaactggagagatcactgagccccttccatacacaggaaactgggggtctggagggtgaaggccctagagccgggacgcactccacccaggacactgttcctccagagtgacttgcttcccacatcagccaagtgaacgagcattttagagacatttcctcataagtttttttccttcccacagaactgaaccaacaagggagagcaacagaaagacagattccaggctggtggatgtgtcccctgacaggggttctcctccttcccgtgtgcctcaggcacttaacttttctccagaggaaagcgattctactttctccaaaagtactgccacagaagtagctcgggaggaagccaagccgggtggagatgcagcccctagtgaggctcttcttgtagatatcaaactggaaccactcgcggtcactccagatgctgcaagccagcccctcattgaccttcctctcatcgacttctgcgataccccagaagcacacgtggctgtaggatctgaaagcaggcctctgatcgacctcatgacaaacactccagacatgaataaaaatgtggccaaaccttcaccggtggtgggacagctcatagacctgagctcccctctgatccagctgagccctgaggctgacaaggagaacgtggattccccactcctcaagttctaagccgaaccaaatcctttgccttgaaagaacagccctaaagtggttttcaaccctcagaaacaagctttaggctggtcgcagtggcttacacttgtaaccctagaacttgggaggctgaggtgggcggattacttgagcccaggagttcgggaccagcctgggaaatatagtgaaactcctgtccctacaaaaaatacaaaaattagccgggtgtggtagtgcatgcctgtagtcccagctacttgggaggctgaagtgggaggatggcctgagctcaaggagatgcaggctgcagtgggctgtgattgtgccactgcactccagcctgggcaccaatgtgagaacctgtcttggaaaaaaaaaaaaagaaacatgttttagtagaagttttatttgaaaaagaaaaataagcataaatatattcccagtgctggagagggtgggctgagggactggggccagcacggaccacccaaggcctctgcttcccgccgccaccctcctcgctgccattctctgggctggaatgtgaagcctcagtcactctaaatgaagaattttcttttgaatgttttgtatgtaaaatagcaagtggctatttttaaagttaagtttgtataaatagttagatattctagatttacattaaattgtaaaataaatggacttattgaagcatatcttgatttttaagcttatcttgattttcaaacatgcatagctatttttatcactctaatcagtaaggctactatctagactcgaatgctttcatacaagtgattttcaaaaattagtcaataaaaattgatgtcagtgcaggcccaggcccgcccccagatacactagtttctaggtctggggccagcctagtaattgttactaggcacacaggtgatgctgactcgatggcctgagacacaccccttgagaagaagctgctctggggagacgagggtatgagtggaaagaggatgggcgaggaggccgggcttacctggacactaaggtgatggacggcgtctgctgggcaggcctcggggaggacccctcagctttgctctcagcaggggcccgacaagctcagtgggcagtggcaggaactgagtgccactggaaagcccattccctttatttagaaaacgagctccaggaagccgctactttgtgtccatttctcttgaggaaacttaccaccttggttgagcggcttcatggcagacagcagcgagccagcggccggactctgtatttcggaccccactccagtgctccctgggtcataccaggatctgcctctgtccacaaagatgagggaaaatgatgactgtgctgtgctctctacttcctgcggttactgcgtgattctaaagctgccactcggaacagcgagtcctctgccgtcgagagcagggaggggtagggtggacaggcgatgccgtggaaagacgtctcggtggaaactgccatggtggaaaggtggcgcgcttctcacggctgagttgctgcgcctgcagacggaagctccccacaggcagagctgcttggatgtgtgagtcatgaagccagagaagccccgctccacgagcagtgactccccaggccctgtgacctccctcctgtcttgcagctcctcctggcaccagtccccagggctctcctgttggtagttcctgcttttcttcttggaaattcctcgtggacctcgagatctttaccctaaaatagttctgttgaatttcaccctggcaatgtaaattgatagcttatcttcacagatgccagacaatggacaactcaccatcagtcctctgctcacctgagacaaatgcatgtctgattgcttcctctgccctattgtttatgtgaaaatgcagattcactgagccagactaaggcatcagtgactgttcctctacctgcctctcacatggagattgtgtattcagtgaaaggctgatcaaagacccaaaggaatgcaacagtttatctcttatctacctatgacctgcgagctgcccaccacccccagttgttgcgcctttccagacagaaccagtgtacatcttacacgtattaattgatgtcctgtgtctccctaatatgtatcaaagcaagctgtgcctcgaccaccttgggcacatatcctcaggacatcatcctgaggctgtgtcactggcatgtccttaaccttggcaaaataaactttctaaattgaaacctgtctca

SEQ ID NO: 454232 - DNA, 2335 bp, Homo sapiens
cctccactctgctctcttccagctcatagacctgagctcccctctgatccagctgagccctgaggctgacaaggagaacgtggattccccactcctcaagttctaagccgaaccaaatcctttgccttgaaagaacagccctaaagtggttttcaaccctcagaaacaagctttaggctggtcgcagtggcttacacttgtaaccctagaacttgggaggctgaggtgggcggattacttgagcccaggagttcgggaccagcctgggaaatatagtgaaactcctgtccctacaaaaaatacaaaaattagccgggtgtggtagtgcatgcctgtagtcccagctacttgggaggctgaagtgggaggatggcctgagctcaaggagatgcaggctgcagtgggctgtgattgtgccactgcactccagcctgggcaccaatgtgagaacctgtcttggaaaaaaaaaaaaagaaacatgttttagtagaagttttatttgaaaaagaaaaataagcataaatatattcccagtgctggagagggtgggctgagggactggggccagcacggaccacccaaggcctctgcttcccgccgccaccctcctcgctgccattctctgggctggaatgtgaagcctcagtcactctaaatgaagaattttcttttgaatgttttgtatgtaaaatagcaagtggctatttttaaagttaagtttgtataaatagttagatattctagatttacattaaattgtaaaataaatggacttattgaagcatatcttgatttttaagcttatcttgattttcaaacatgcatagctatttttatcactctaatcagtaaggctactatctagactcgaatgctttcatacaagtgattttcaaaaattagtcaataaaaattgatgtcagtgcaggcccaggcccgcccccagatacactagtttctaggtctggggccagcctagtaattgttactaggcacacaggtgatgctgactcgatggcctgagacacaccccttgagaagaagctgctctggggagacgagggtatgagtggaaagaggatgggcgaggaggccgggcttacctggacactaaggtgatggacggcgtctgctgggcaggcctcggggaggacccctcagctttgctctcagcaggggcccgacaagctcagtgggcagtggcaggaactgagtgccactggaaagcccattccctttatttagaaaacgagctccaggaagccgctactttgtgtccatttctcttgaggaaacttaccaccttggttgagcggcttcatggcagacagcagcgagccagcggccggactctgtatttcggaccccactccagtgctccctgggtcataccaggatctgcctctgtccacaaagatgagggaaaatgatgactgtgctgtgctctctacttcctgcggttactgcgtgattctaaagctgccactcggaacagcgagtcctctgccgtcgagagcagggaggggtagggtggacaggcgatgccgtggaaagacgtctcggtggaaactgccatggtggaaaggtggcgcgcttctcacggctgagttgctgcgcctgcagacggaagctccccacaggcagagctgcttggatgtgtgagtcatgaagccagagaagccccgctccacgagcagtgactccccaggccctgtgacctccctcctgtcttgcagctcctcctggcaccagtccccagggctctcctgttggtagttcctgcttttcttcttggaaattcctcgtggacctcgagatctttaccctaaaatagttctgttgaatttcaccctggcaatgtaaattgatagcttatcttcacagatgccagacaatggacaactcaccatcagtcctctgctcacctgagacaaatgcatgtctgattgcttcctctgccctattgtttatgtgaaaatgcagattcactgagccagactaaggcatcagtgactgttcctctacctgcctctcacatggagattgtgtattcagtgaaaggctgatcaaagacccaaaggaatgcaacagtttatctcttatctacctatgacctgcgagctgcccaccacccccagttgttgcgcctttccagacagaaccagtgtacatcttacacgtattaattgatgtcctgtgtctccctaatatgtatcaaagcaagctgtgcctcgaccaccttgggcacatatcctcaggacatcatcctgaggctgtgtcactggcatgtccttaaccttggcaaaataaactttctaaattgaaacctgtctca

SEQ ID NO: 454233 - DNA, 1470 bp, Homo sapiens
cccttttcaaaccgaccaatcggcaacccgcgtctcccggcgccgcgtttaaatccgtgccggaggcgcgtcctgcatcgtctgccgctttggtgacttctgacagctctctccatggaaggaggcggcggccgcgatgagccttcagcctgccgggcaggggacgtgaacatggatgaccctaagaaggaagacattcttcttttggccgatgaaaaatttgacttcgatctttcattgtcttcttcgagtgcaaatgaagatgatgaagtcttcttcggaccctttggacataaagaaagatgtattgctgccagcttggaattaaataatccggttcccgaacagcctccgttgcccacatctgagagtccctttgcctggagccctctggccggggagaagttcgtggaggtgtacaaagaagctcacttactggctttacacattgagagcagcagccggaaccaggcagcccaagctgccaagcctgaagaccctcggagccagggcgtggaaagattcatacaggagtcaaaattaaaaataaacctctttgagaaagaaaaggaaatgaagaaaagccccacgtctcttaaaagggagacatactacctgtcagacagccccttgctggggccccctgtgggtgagcctcggctcttggcctcctccccggccctgcccagctctggtgcccaggcccgcctcacccgggcgccggggcctccgcactctgctcatgctttgcccagggaatcatgcactgctcatgctgcaagtcaggcagcgactcagaggaagcccgggaccaaattgctgctgcctcgagcggcctctgttagaggaagaagcatccctggggctgcggagaagcccaagaaagagattccagctagtccttccaggacaaaaatcccagctgagaaggaatcccaccgggatgttctccctgacaaacctgccccgggtgctgtcaatgtgccggccgccggaagccacttgggccagggcaagcgggcgatccctgttccaaacaagttggggctgaagaagaccctgttaaaagcacccggctctaccagcaatctcgcaaggaagtcctcctcggggcctgtttggagcggggcatccagtgcgtgcacatccccagcagtgggcaaagctaaatcaagtgaatttgcaagtattcctgcaaatagctcccggcctctgtcaaacatcagcaagtcaggcagaatgggacccgccatgctgcggccagctctgcctgcaggccctgtgggggcatcctcctggcaggccaagcgggtcagaatcttctcaattgaataagactagaagtatcagacggcgagattcctgtctaaattccaagacaaaggttatgcctactcctacaaatcaatttaaaattcctaagttttctattgctccccgaaagctttggtgttgagctgtccggggagt

SEQ ID NO: 454234 - DNA, 569 bp, Homo sapiens
cccttttcaaaccgaccaatcggcaacccgcgtctcccggcgccgcgtttaaatccgtgccggaggcgcgtcctgcatcgtctgccgctttggtgacttctgacagctctctccatggaaggaggcggcggccgcgatgagccttcagcctgccgggcaggggacgtgaacatggatgaccctaagaaggaagacattcttcttttggccgatgaaaaatttgacttcgatctttcattgtcttcttcgagtgcaaatgaagatgatgaagtcttcttcggaccctttggacataaagaaagatgtattgctgccagcttggaattaaataatccggttcccgaacagcctccgttgcccacatctgagagtccctttgcctggagccctctggccggggagaagttcgtggaggtgtacaaagaagctcacttactggctttacacattgagagcagcagccggaaccaggcagcccaagctgccaagcctgaagaccctcggagccagggcgtggaaagattcatacaggagtcaaaattaaaaataaacctctttgagaaagaaaa

SEQ ID NO: 454235 - DNA, 3013 bp, Homo sapiens
cccttttcaaaccgaccaatcggcaacccgcgtctcccggcgccgcgtttaaatccgtgccggaggcgcgtcctgcatcgtctgccgctttggtgacttctgacagctctctccatggaaggaggcggcggccgcgatgagccttcagcctgccgggcaggggacgtgaacatggatgaccctaagaaggaagacattcttcttttggccgatgaaaaatttgacttcgatctttcattgtcttcttcgagtgcaaatgaagatgatgaagtcttcttcggaccctttggacataaagaaagatgtattgctgccagcttggaattaaataatccggttcccgaacagcctccgttgcccacatctgagagtccctttgcctggagccctctggccggggagaagttcgtggaggtgtacaaagaagctcacttactggctttacacattgagagcagcagccggaaccaggcagcccaagctgccaagcctgaagaccctcggagccagggcgtggaaagattcatacaggagtcaaaattaaaaataaacctctttgagaaagaaaaggaaatgaagaaaagccccacgtctcttaaaagggagacatactacctgtcagacagccccttgctggggccccctgtgggtgagcctcggctcttggcctcctccccggccctgcccagctctggtgcccaggcccgcctcacccgggcgccggggcctccgcactctgctcatgctttgcccagggaatcatgcactgctcatgctgcaagtcaggcagcgactcagaggaagcccgggaccaaattgctgctgcctcgagcggcctctgttagaggaagaagcatccctggggctgcggagaagcccaagaaagagattccagctagtccttccaggacaaaaatcccagctgagaaggaatcccaccgggatgttctccctgacaaacctgccccgggtgctgtcaatgtgccggccgccggaagccacttgggccagggcaagcgggcgatccctgttccaaacaagttggggctgaagaagaccctgttaaaagcacccggctctaccagcaatctcgcaaggaagtcctcctcggggcctgtttggagcggggcatccagtgcgtgcacatccccagcagtgggcaaagctaaatcaagtgaatttgcaagtattcctgcaaatagctcccggcctctgtcaaacatcagcaagtcaggcagaatgggacccgccatgctgcggccagctctgcctgcaggccctgtgggggcatcctcctggcaggccaagcgggtcgatgtttctgagctggcagcggagcagctcacggcacccccctcagcatcccccacccaaccccagactccggaaggtggcggccagtggctgaactccagttgcgcttggtcagaatcttctcaattgaataagactagaagtatcagacggcgagattcctgtctaaattccaagacaaaggttatgcctactcctacaaatcaatttaaaattcctaagttttctattggtgactccccggacagctcaacaccaaagctttcgcgggcacagcggccgcagtcgtgcacgtcagttggcagggtcactgtccacagcaccccggttagacgctcatctgggccagcaccacaaagcctgctgagcgcacggcgtgtgtcagccttgcccacacccgccagccggcgctgctctggccttccaccgatgacccccaaaacgatgcccagggccgtgggctctcccctgtgtgtgccagctcggagacgttcctctgagccccgcaagaactctgcaatgagaactgaaccaacaagggagagcaacagaaagacagattccaggctggtggatgtgtcccctgacaggggttctcctccttcccgtgtgcctcaggcacttaacttttctccagaggaaagcgattctactttctccaaaagtactgccacagaagtagctcgggaggaagccaagccgggtggagatgcagcccctagtgaggctcttcttgtagatatcaaactggaaccactcgcggtcactccagatgctgcaagccagcccctcattgaccttcctctcatcgacttctgcgataccccagaagcacacgtggctgtaggatctgaaagcaggcctctgatcgacctcatgacaaacactccagacatgaataaaaatgtggccaaaccttcaccggtggtgggacagctcatagacctgagctcccctctgatccagctgagccctgaggctgacaaggagaacgtggattccccactcctcaagttctaagccgaaccaaatcctttgccttgaaagaacagccctaaagtggttttcaaccctcagaaacaagctttaggctggtcgcagtggcttacacttgtaaccctagaacttgggaggctgaggtgggcggattacttgagcccaggagttcgggaccagcctgggaaatatagtgaaactcctgtccctacaaaaaatacaaaaattagccgggtgtggtagtgcatgcctgtagtcccagctacttgggaggctgaagtgggaggatggcctgagctcaaggagatgcaggctgcagtgggctgtgattgtgccactgcactccagcctgggcaccaatgtgagaacctgtcttggaaaaaaaaaaaaagaaacatgttttagtagaagttttatttgaaaaagaaaaataagcataaatatattcccagtgctggagagggtgggctgagggactggggccagcacggaccacccaaggcctctgcttcccgccgccaccctcctcgctgccattctctgggctggaatgtgaagcctcagtcactctaaatgaagaattttcttttgaatgttttgtatgtaaaatagcaagtggctatttttaaagttaagtttgtataaatagttagatattctagatttacattaaattgtaaaataaatggacttattgaagcat

SEQ ID NO: 454236 - DNA, 4436 bp, Homo sapiens
  misc_feature (4135)..(4135): n is a, c, g, or t
  misc_feature (4152)..(4152): n is a, c, g, or t
  misc_feature (4218)..(4218): n is a, c, g, or t
cccttttcaaaccgaccaatcggcaacccgcgtctcccggcgccgcgtttaaatccgtgccggaggcgcgtcctgcatcgtctgccgctttggtgacttctgacagctctctccatggaaggaggcggcggccgcgatgagccttcagcctgccgggcaggggacgtgaacatggatgaccctaagaaggaagacattcttcttttggccgatgaaaaatttgacttcgatctttcattgtcttcttcgagtgcaaatgaagatgatgaagtcttcttcggaccctttggacataaagaaagatgtattgctgccagcttggaattaaataatccggttcccgaacagcctccgttgcccacatctgagagtccctttgcctggagccctctggccggggagaagttcgtggaggtgtacaaagaagctcacttactggctttacacattgagagcagcagccggaaccaggcagcccaagctgccaagcctgaagaccctcggagccagggcgtggaaagattcatacaggagtcaaaattaaaaataaacctctttgagaaagaaaaggaaatgaagaaaagccccacgtctcttaaaagggagacatactacctgtcagacagccccttgctggggccccctgtgggtgagcctcggctcttggcctcctccccggccctgcccagctctggtgcccaggcccgcctcacccgggcgccggggcctccgcactctgctcatgctttgcccagggaatcatgcactgctcatgctgcaagtcaggcagcgactcagaggaagcccgggaccaaattgctgctgcctcgagcggcctctgttagaggaagaagcatccctggggctgcggagaagcccaagaaagagattccagctagtccttccaggacaaaaatcccagctgagaaggaatcccaccgggatgttctccctgacaaacctgccccgggtgctgtcaatgtgccggccgccggaagccacttgggccagggcaagcgggcgatccctgttccaaacaagttggggctgaagaagaccctgttaaaagcacccggctctaccagcaatctcgcaaggaagtcctcctcggggcctgtttggagcggggcatccagtgcgtgcacatccccagcagtgggcaaagctaaatcaagtgaatttgcaagtattcctgcaaatagctcccggcctctgtcaaacatcagcaagtcaggcagaatgggacccgccatgctgcggccagctctgcctgcaggccctgtgggggcatcctcctggcaggccaagcgggtcgatgtttctgagctggcagcggagcagctcacggcacccccctcagcatcccccacccaaccccagactccggaaggtggcggccagtggctgaactccagttgcgcttggtcagaatcttctcaattgaataagactagaagtatcagacggcgagattcctgtctaaattccaagacaaaggttatgcctactcctacaaatcaatttaaaattcctaagttttctattggtgactccccggacagctcaacaccaaagctttcgcgggcacagcggccgcagtcgtgcacgtcagttggcagggtcactgtccacagcaccccggttagacgctcatctgggccagcaccacaaagcctgctgagcgcacggcgtgtgtcagccttgcccacacccgccagccggcgctgctctggccttccaccgatgacccccaaaacgatgcccagggccgtgggctctcccctgtgtgtgccagctcggagacgttcctctgagccccgcaagaactctgcaatgagaactgaaccaacaagggagagcaacagaaagacagattccaggctggtggatgtgtcccctgacaggggttctcctccttcccgtgtgcctcaggcacttaacttttctccagaggaaagcgattctactttctccaaaagtactgccacagaagtagctcgggaggaagccaagccgggtggagatgcagcccctagtgaggctcttcttgtagatatcaaactggaaccactcgcggtcactccagatgctgcaagccagcccctcattgaccttcctctcatcgacttctgcgataccccagaagcacacgtggctgtaggatctgaaagcaggcctctgatcgacctcatgacaaacactccagacatgaataaaaatgtggccaaaccttcaccggtggtgggacagctcatagacctgagctcccctctgatccagctgagccctgaggctgacaaggagaacgtggattccccactcctcaagttctaagccgaaccaaatcctttgccttgaaagaacagccctaaagtggttttcaaccctcagaaacaagctttaggctggtcgcagtggcttacacttgtaaccctagaacttgggaggctgaggtgggcggattacttgagcccaggagttcgggaccagcctgggaaatatagtgaaactcctgtccctacaaaaaatacaaaaattagccgggtgtggtagtgcatgcctgtagtcccagctacttgggaggctgaagtgggaggatggcctgagctcaaggagatgcaggctgcagtgggctgtgattgtgccactgcactccagcctgggcaccaatgtgagaacctgtcttggaaaaaaaaaaaaagaaacatgttttagtagaagttttatttgaaaaagaaaaataagcataaatatattcccagtgctggagagggtgggctgagggactggggccagcacggaccacccaaggcctctgcttcccgccgccaccctcctcgctgccattctctgggctggaatgtgaagcctcagtcactctaaatgaagaattttcttttgaatgttttgtatgtaaaatagcaagtggctatttttaaagttaagtttgtataaatagttagatattctagatttacattaaattgtaaaataaatggacttattgaagcatatcttgatttttaagcttatcttgattttcaaacatgcatagctatttttatcactctaatcagtaaggctactatctagactcgaatgctttcatacaagtgattttcaaaaattagtcaataaaaattgatgtcagtgcaggcccaggcccgcccccagatacactagtttctaggtctggggccagcctagtaattgttactaggcacacaggtgatgctgactcgatggcctgagacacaccccttgagaagaagctgctctggggagacgagggtatgagtggaaagaggatgggcgaggaggccgggcttacctggacactaaggtgatggacggcgtctgctgggcaggcctcggggaggacccctcagctttgctctcagcaggggcccgacaagctcagtgggcagtggcaggaactgagtgccactggaaagcccattccctttatttagaaaacgagctccaggaagccgctactttgtgtccatttctcttgaggaaacttaccaccttggttgagcggcttcatggcagacagcagcgagccagcggccggactctgtatttcggaccccactccagtgctccctgggtcataccaggatctgcctctgtccacaaagatgagggaaaatgatgactgtgctgtgctctctacttcctgcggttactgcgtgattctaaagctgccactcggaacagcgagtcctctgccgtcgagagcagggaggggtagggtggacaggcgatgccgtggaaagacgtctcggtggaaactgccatggtggaaaggtggcgcgcttctcacggctgagttgctgcgcctgcagacggaagctccccacaggcagagctgcttggatgtgtgagtcatgaagccagagaagccccgctccacgagcagtgactccccaggccctgtgacctccctcctgtcttgcagctcctcctggcaccagtccccagggctctcctgttggtagttcctgcttttcttcttggaaattcctcgtggacctcgagatctttaccctaaaatagttctgttgaatttcaccctggcaatgtaaattgatagcttatcttcacagatgccagacaatggacaactcanagacctgagctcccctntgatccagctgagccctgaggctgacaaggagaacgtggattccccactcctcaagttttaagccnaaccaaatcctttgccttgaaagaacagccctttccagacagaaccagtgtacatcttacacgtattaattgatgtcctgtgtctccctaatatgtatcaaagcaagctgtgcctcgaccaccttgggcacatatcctcaggacatcatcctgaggctgtgtcactggcatgtccttaaccttggcaaaataaactttctaaattgaaacctgtctca

SEQ ID NO: 454237 - DNA, 4237 bp, Homo sapiens
cccttttcaaaccgaccaatcggcaacccgcgtctcccggcgccgcgtttaaatccgtgccggaggcgcgtcctgcatcgtctgccgctttggtgacttctgacagctctctccatggaaggaggcggcggccgcgatgagccttcagcctgccgggcaggggacgtgaacatggatgaccctaagaaggaagacattcttcttttggccgatgaaaaatttgacttcgatctttcattgtcttcttcgagtgcaaatgaagatgatgaagtcttcttcggaccctttggacataaagaaagatgtattgctgccagcttggaattaaataatccggttcccgaacagcctccgttgcccacatctgagagtccctttgcctggagccctctggccggggagaagttcgtggaggtgtacaaagaagctcacttactggctttacacattgagagcagcagccggaaccaggcagcccaagctgccaagcctgaagaccctcggagccagggcgtggaaagattcatacaggagtcaaaattaaaaataaacctctttgagaaagaaaaggaaatgaagaaaagccccacgtctcttaaaagggagacatactacctgtcagacagccccttgctggggccccctgtgggtgagcctcggctcttggcctcctccccggccctgcccagctctggtgcccaggcccgcctcacccgggcgccggggcctccgcactctgctcatgctttgcccagggaatcatgcactgctcatgctgcaagtcaggcagcgactcagaggaagcccgggaccaaattgctgctgcctcgagcggcctctgttagaggaagaagcatccctggggctgcggagaagcccaagaaagagattccagctagtccttccaggacaaaaatcccagctgagaaggaatcccaccgggatgttctccctgacaaacctgccccgggtgctgtcaatgtgccggccgccggaagccacttgggccagggcaagcgggcgatccctgttccaaacaagttggggctgaagaagaccctgttaaaagcacccggctctaccagcaatctcgcaaggaagtcctcctcggggcctgtttggagcggggcatccagtgcgtgcacatccccagcagtgggcaaagctaaatcaagtgaatttgcaagtattcctgcaaatagctcccggcctctgtcaaacatcagcaagtcaggcagaatgggacccgccatgctgcggccagctctgcctgcaggccctgtgggggcatcctcctggcaggccaagcgggtcgatgtttctgagctggcagcggagcagctcacggcacccccctcagcatcccccacccaaccccagactccggaaggtggcggccagtggctgaactccagttgcgcttggtcagaatcttctcaattgaataagactagaagtatcagacggcgagattcctgtctaaattccaagacaaaggttatgcctactcctacaaatcaatttaaaattcctaagttttctattggtgactccccggacagctcaacaccaaagctttcgcgggcacagcggccgcagtcgtgcacgtcagttggcagggtcactgtccacagcaccccggttagacgctcatctgggccagcaccacaaagcctgctgagcgcacggcgtgtgtcagccttgcccacacccgccagccggcgctgctctggccttccaccgatgacccccaaaacgatgcccagggccgtgggctctcccctgtgtgtgccagctcggagacgttcctctgagccccgcaagaactctgcaatgagaactgaaccaacaagggagagcaacagaaagacagattccaggctggtggatgtgtcccctgacaggggttctcctccttcccgtgtgcctcaggcacttaacttttctccagaggaaagcgattctactttctccaaaagtactgccacagaagtagctcgggaggaagccaagccgggtggagatgcagcccctagtgaggctcttcttgtagatatcaaactggaaccactcgcggtcactccagatgctgcaagccagcccctcattgaccttcctctcatcgacttctgcgataccccagaagcacacgtggctgtaggatctgaaagcaggcctctgatcgacctcatgacaaacactccagacatgaataaaaatgtggccaaaccttcaccggtggtgggacagctcatagacctgagctcccctctgatccagctgagccctgaggctgacaaggagaacgtggattccccactcctcaagttctaagccgaaccaaatcctttgccttgaaagaacagccctaaagtggttttcaaccctcagaaacaagctttaggctggtcgcagtggcttacacttgtaaccctagaacttgggaggctgaggtgggcggattacttgagcccaggagttcgggaccagcctgggaaatatagtgaaactcctgtccctacaaaaaatacaaaaattagccgggtgtggtagtgcatgcctgtagtcccagctacttgggaggctgaagtgggaggatggcctgagctcaaggagatgcaggctgcagtgggctgtgattgtgccactgcactccagcctgggcaccaatgtgagaacctgtcttggaaaaaaaaaaaaagaaacatgttttagtagaagttttatttgaaaaagaaaaataagcataaatatattcccagtgctggagagggtgggctgagggactggggccagcacggaccacccaaggcctctgcttcccgccgccaccctcctcgctgccattctctgggctggaatgtgaagcctcagtcactctaaatgaagaattttcttttgaatgttttgtatgtaaaatagcaagtggctatttttaaagttaagtttgtataaatagttagatattctagatttacattaaattgtaaaataaatggacttattgaagcatatcttgatttttaagcttatcttgattttcaaacatgcatagctatttttatcactctaatcagtaaggctactatctagactcgaatgctttcatacaagtgattttcaaaaattagtcaataaaaattgatgtcagtgcaggcccaggcccgcccccagatacactagtttctaggtctggggccagcctagtaattgttactaggcacacaggtgatgctgactcgatggcctgagacacaccccttgagaagaagctgctctggggagacgagggtatgagtggaaagaggatgggcgaggaggccgggcttacctggacactaaggtgatggacggcgtctgctgggcaggcctcggggaggacccctcagctttgctctcagcaggggcccgacaagctcagtgggcagtggcaggaactgagtgccactggaaagcccattccctttatttagaaaacgagctccaggaagccgctactttgtgtccatttctcttgaggaaacttaccaccttggttgagcggcttcatggcagacagcagcgagccagcggccggactctgtatttcggaccccactccagtgctccctgggtcataccaggatctgcctctgtccacaaagatgagggaaaatgatgactgtgctgtgctctctacttcctgcggttactgcgtgattctaaagctgccactcggaacagcgagtcctctgccgtcgagagcagggaggggtagggtggacaggcgatgccgtggaaagacgtctcggtggaaactgccatggtggaaaggtggcgcgcttctcacggctgagttgctgcgcctgcagacggaagctccccacaggcagagctgcttggatgtgtgagtcatgaagccagagaagccccgctccacgagcagtgactccccaggccgggcactgtggctcacgcgtgtaatcccagcactttgggaggccgaggcgggcggatcacaaggtcaggagatcaagaccatcctggccaacatggtgaaatgccgtctctactaaaaatacaaaaattagctgggtgtggtggcatgtgcctgtaatcccagctactccggaggctgaggcaggagaatcgcttaaacccgggaggcggaggttgcagtgagctaagatcacgccactgcactccagcctagtgaccaagtgagactgtctcaaaaaaataaataaataaaataaaa

SEQ ID NO: 454238 - DNA, 4150 bp, Homo sapiens
cccttttcaaaccgaccaatcggcaacccgcgtctcccggcgccgcgtttaaatccgtgccggaggcgcgtcctgcatcgtctgccgctttggtgacttctgacagctctctccatggaaggaggcggcggccgcgatgagccttcagcctgccgggcaggggacgtgaacatggatgaccctaagaaggaagacattcttcttttggccgatgaaaaatttgacttcgatctttcattgtcttcttcgagtgcaaatgaagatgatgaagtcttcttcggaccctttggacataaagaaagatgtattgctgccagcttggaattaaataatccggttcccgaacagcctccgttgcccacatctgagagtccctttgcctggagccctctggccggggagaagttcgtggaggtgtacaaagaagctcacttactggctttacacattgagagcagcagccggaaccaggcagcccaagctgccaagcctgaagaccctcggagccagggcgtggaaagattcatacaggagtcaaaattaaaaataaacctctttgagaaagaaaaggaaatgaagaaaagccccacgtctcttaaaagggagacatactacctgtcagacagccccttgctggggccccctgtgggtgagcctcggctcttggcctcctccccggccctgcccagctctggtgcccaggcccgcctcacccgggcgccggggcctccgcactctgctcatgctttgcccagggaatcatgcactgctcatgctgcaagtcaggcagcgactcagaggaagcccgggaccaaattgctgctgcctcgagcggcctctgttagaggaagaagcatccctggggctgcggagaagcccaagaaagagattccagctagtccttccaggacaaaaatcccagctgagaaggaatcccaccgggatgttctccctgacaaacctgccccgggtgctgtcaatgtgccggccgccggaagccacttgggccagggcaagcgggcgatccctgttccaaacaagttggggctgaagaagaccctgttaaaagcacccggctctaccagcaatctcgcaaggaagtcctcctcggggcctgtttggagcggggcatccagtgcgtgcacatccccagcagtgggcaaagctaaatcaagtgaatttgcaagtattcctgcaaatagctcccggcctctgtcaaacatcagcaagtcaggcagaatgggacccgccatgctgcggccagctctgcctgcaggccctgtgggggcatcctcctggcaggccaagcgggtcgatgtttctgagctggcagcggagcagctcacggcacccccctcagcatcccccacccaaccccagactccggaaggtggcggccagtggctgaactccagttgcgcttggtcagaatcttctcaattgaataagactagaagtatcagacggcgagattcctgtctaaattccaagacaaaggttatgcctactcctacaaatcaatttaaaattcctaagttttctattggtgactccccggacagctcaacaccaaagctttcgcgggcacagcggccgcagtcgtgcacgtcagttggcagggtcactgtccacagcaccccggttagacgctcatctgggccagcaccacaaagcctgctgagcgcacggcgtgtgtcagccttgcccacacccgccagccggcgctgctctggccttccaccgatgacccccaaaacgatgcccagggccgtgggctctcccctgtgtgtgccagctcggagacgttcctctgagccccgcaagaactctgcaatgagaactgaaccaacaagggagagcaacagaaagacagattccaggctggtggatgtgtcccctgacaggggttctcctccttcccgtgtgcctcaggcacttaacttttctccagaggaaagcgattctactttctccaaaagtactgccacagaagtagctcgggaggaagccaagccgggtggagatgcagcccctagtgaggtgggcggattacttgagcccaggagttcgggaccagcctgggaaatatagtgaaactcctgtccctacaaaaaatacaaaaattagccgggtgtggtagtgcatgcctgtagtcccagctacttgggaggctgaagtgggaggatggcctgagctcaaggagatgcaggctgcagtgggctgtgattgtgccactgcactccagcctgggcaccaatgtgagaacctgtcttggaaaaaaaaaaaaagaaacatgttttagtagaagttttatttgaaaaagaaaaataagcataaatatattcccagtgctggagagggtgggctgagggactggggccagcacggaccacccaaggcctctgcttcccgccgccaccctcctcgctgccattctctgggctggaatgtgaagcctcagtcactctaaatgaagaattttcttttgaatgttttgtatgtaaaatagcaagtggctatttttaaagttaagtttgtataaatagttagatattctagatttacattaaattgtaaaataaatggacttattgaagcatatcttgatttttaagcttatcttgattttcaaacatgcatagctatttttatcactctaatcagtaaggctactatctagactcgaatgctttcatacaagtgattttcaaaaattagtcaataaaaattgatgtcagtgcaggcccaggcccgcccccagatacactagtttctaggtctggggccagcctagtaattgttactaggcacacaggtgatgctgactcgatggcctgagacacaccccttgagaagaagctgctctggggagacgagggtatgagtggaaagaggatgggcgaggaggccgggcttacctggacactaaggtgatggacggcgtctgctgggcaggcctcggggaggacccctcagctttgctctcagcaggggcccgacaagctcagtgggcagtggcaggaactgagtgccactggaaagcccattccctttatttagaaaacgagctccaggaagccgctactttgtgtccatttctcttgaggaaacttaccaccttggttgagcggcttcatggcagacagcagcgagccagcggccggactctgtatttcggaccccactccagtgctccctgggtcataccaggatctgcctctgtccacaaagatgagggaaaatgatgactgtgctgtgctctctacttcctgcggttactgcgtgattctaaagctgccactcggaacagcgagtcctctgccgtcgagagcagggaggggtagggtggacaggcgatgccgtggaaagacgtctcggtggaaactgccatggtggaaaggtggcgcgcttctcacggctgagttgctgcgcctgcagacggaagctccccacaggcagagctgcttggatgtgtgagtcatgaagccagagaagccccgctccacgagcagtgactccccaggccctgtgacctccctcctgtcttgcagctcctcctggcaccagtccccagggctctcctgttggtagttcctgcttttcttcttggaaattcctcgtggacctcgagatctttaccctaaaatagttctgttgaatttcaccctggcaatgtaaattgatagcttatcttcacagatgccagacaatggacaactcaccatcagtcctctgctcacctgagacaaatgcatgtctgattgcttcctctgccctattgtttatgtgaaaatgcagattcactgagccagactaaggcatcagtgactgttcctctacctgcctctcacatggagattgtgtattcagtgaaaggctgatcaaagacccaaaggaatgcaacagtttatctcttatctacctatgacctgcgagctgcccaccacccccagttgttgcgcctttccagacagaaccagtgtacatcttacacgtattaattgatgtcctgtgtctccctaatatgtatcaaagcaagctgtgcctcgaccaccttgggcacatatcctcaggacatcatcctgaggctgtgtcactggcatgtccttaaccttggcaaaataaactttctaaattgaaacctgtctca

SEQ ID NO: 454239 - DNA, 4361 bp, Homo sapiens
cccttttcaaaccgaccaatcggcaacccgcgtctcccggcgccgcgtttaaatccgtgccggaggcgcgtcctgcatcgtctgccgctttggtgacttctgacagctctctccatggaaggaggcggcggccgcgatgagccttcagcctgccgggcaggggacgtgaacatggatgaccctaagaaggaagacattcttcttttggccgatgaaaaatttgacttcgatctttcattgtcttcttcgagtgcaaatgaagatgatgaagtcttcttcggaccctttggacataaagaaagatgtattgctgccagcttggaattaaataatccggttcccgaacagcctccgttgcccacatctgagagtccctttgcctggagccctctggccggggagaagttcgtggaggtgtacaaagaagctcacttactggctttacacattgagagcagcagccggaaccaggcagcccaagctgccaagcctgaagaccctcggagccagggcgtggaaagattcatacaggagtcaaaattaaaaataaacctctttgagaaagaaaaggaaatgaagaaaagccccacgtctcttaaaagggagacatactacctgtcagacagccccttgctggggccccctgtgggtgagcctcggctcttggcctcctccccggccctgcccagctctggtgcccaggcccgcctcacccgggcgccggggcctccgcactctgctcatgctttgcccagggaatcatgcactgctcatgctgcaagtcaggcagcgactcagaggaagcccgggaccaaattgctgctgcctcgagcggcctctgttagaggaagaagcatccctggggctgcggagaagcccaagaaagagattccagctagtccttccaggacaaaaatcccagctgagaaggaatcccaccgggatgttctccctgacaaacctgccccgggtgctgtcaatgtgccggccgccggaagccacttgggccagggcaagcgggcgatccctgttccaaacaagttggggctgaagaagaccctgttaaaagcacccggctctaccagcaatctcgcaaggaagtcctcctcggggcctgtttggagcggggcatccagtgcgtgcacatccccagcagtgggcaaagctaaatcaagtgaatttgcaagtattcctgcaaatagctcccggcctctgtcaaacatcagcaagtcaggcagaatgggacccgccatgctgcggccagctctgcctgcaggccctgtgggggcatcctcctggcaggccaagcgggtcgatgtttctgagctggcagcggagcagctcacggcacccccctcagcatcccccacccaaccccagactccggaaggtggcggccagtggctgaactccagttgcgcttggtcagaatcttctcaattgaataagactagaagtatcagacggcgagattcctgtctaaattccaagacaaaggttatgcctactcctacaaatcaatttaaaattcctaagttttctattggtgactccccggacagctcaacaccaaagctttcgcgggcacagcggccgcagtcgtgcacgtcagttggcagggtcactgtccacagcaccccggttagacgctcatctgggccagcaccacaaagcctgctgagcgcacggcgtgtgtcagccttgcccacacccgccagccggcgctgctctggccttccaccgatgacccccaaaacgatgcccagggccgtgggctctcccctgtgtgtgccagctcggagacgttcctctgagccccgcaagaactctgcaatgaggctcttcttgtagatatcaaactggaaccactcgcggtcactccagatgctgcaagccagcccctcattgaccttcctctcatcgacttctgcgataccccagaagcacacgtggctgtaggatctgaaagcaggcctctgatcgacctcatgacaaacactccagacatgaataaaaatgtggccaaaccttcaccggtggtgggacagctcatagacctgagctcccctctgatccagctgagccctgaggctgacaaggagaacgtggattccccactcctcaagttctaagccgaaccaaatcctttgccttgaaagaacagccctaaagtggttttcaaccctcagaaacaagctttaggctggtcgcagtggcttacacttgtaaccctagaacttgggaggctgaggtgggcggattacttgagcccaggagttcgggaccagcctgggaaatatagtgaaactcctgtccctacaaaaaatacaaaaattagccgggtgtggtagtgcatgcctgtagtcccagctacttgggaggctgaagtgggaggatggcctgagctcaaggagatgcaggctgcagtgggctgtgattgtgccactgcactccagcctgggcaccaatgtgagaacctgtcttggaaaaaaaaaaaaagaaacatgttttagtagaagttttatttgaaaaagaaaaataagcataaatatattcccagtgctggagagggtgggctgagggactggggccagcacggaccacccaaggcctctgcttcccgccgccaccctcctcgctgccattctctgggctggaatgtgaagcctcagtcactctaaatgaagaattttcttttgaatgttttgtatgtaaaatagcaagtggctatttttaaagttaagtttgtataaatagttagatattctagatttacattaaattgtaaaataaatggacttattgaagcatatcttgatttttaagcttatcttgattttcaaacatgcatagctatttttatcactctaatcagtaaggctactatctagactcgaatgctttcatacaagtgattttcaaaaattagtcaataaaaattgatgtcagtgcaggcccaggcccgcccccagatacactagtttctaggtctggggccagcctagtaattgttactaggcacacaggtgatgctgactcgatggcctgagacacaccccttgagaagaagctgctctggggagacgagggtatgagtggaaagaggatgggcgaggaggccgggcttacctggacactaaggtgatggacggcgtctgctgggcaggcctcggggaggacccctcagctttgctctcagcaggggcccgacaagctcagtgggcagtggcaggaactgagtgccactggaaagcccattccctttatttagaaaacgagctccaggaagccgctactttgtgtccatttctcttgaggaaacttaccaccttggttgagcggcttcatggcagacagcagcgagccagcggccggactctgtatttcggaccccactccagtgctccctgggtcataccaggatctgcctctgtccacaaagatgagggaaaatgatgactgtgctgtgctctctacttcctgcggttactgcgtgattctaaagctgccactcggaacagcgagtcctctgccgtcgagagcagggaggggtagggtggacaggcgatgccgtggaaagacgtctcggtggaaactgccatggtggaaaggtggcgcgcttctcacggctgagttgctgcgcctgcagacggaagctccccacaggcagagctgcttggatgtgtgagtcatgaagccagagaagccccgctccacgagcagtgactccccaggccctgtgacctccctcctgtcttgcagctcctcctggcaccagtccccagggctctcctgttggtagttcctgcttttcttcttggaaattcctcgtggacctcgagatctttaccctaaaatagttctgttgaatttcaccctggcaatgtaaattgatagcttatcttcacagatgccagacaatggacaactcaccatcagtcctctgctcacctgagacaaatgcatgtctgattgcttcctctgccctattgtttatgtgaaaatgcagattcactgagccagactaaggcatcagtgactgttcctctacctgcctctcacatggagattgtgtattcagtgaaaggctgatcaaagacccaaaggaatgcaacagtttatctcttatctacctatgacctgcgagctgcccaccacccccagttgttgcgcctttccagacagaaccagtgtacatcttacacgtattaattgatgtcctgtgtctccctaatatgtatcaaagcaagctgtgcctcgaccaccttgggcacatatcctcaggacatcatcctgaggctgtgtcactggcatgtccttaaccttggcaaaataaactttctaaattgaaacctgtctca

SEQ ID NO: 454240 - DNA, 3687 bp, Homo sapiens
ggcacgaggaaccatggagccagtgtctgggggcgtggtggcgggactggacctctggggcctgtgttgggccttagctcggtaactggtgacccctttgccctctgagcctgcttttcatcctgttgtgaatatcagatgagatcatacacatggaaatgcttgtcaactaaaacagcacaaacacagtgtaatgaattattattatcccagtaaagtcatggttcgggaaaatgagggaatgtgggctctgttgcgcgtgcctgggaagctaaacccctgcggtgttgttcctgtgggcaagtgtctagcgcatgcaggtgccgtctgacaagtcgacttcgctctgtgaaggtcgtgctcggccctgatgggatatacagccagggtggggcggcgcagtgaagatggctcttctctttctcccccgtgtccatccatcagaccacagcctttgcctgggcaggggtccccgtgtaggggtgaatgcctctcatgtggctgcctgcagcagggtggccctttgtgtacttgtctgagccagtgccacctacactcaagttgggacagtggagatactcggagaattgcccattcggtgacgatcccccaacagtaggtctccccctgatcactttacctgaccgcacacttcctttcttggacttaggtgactccccggacagctcaacaccaaagctttcgcgggcacagcggccgcagtcgtgcacgtcagttggcagggtcactgtccacagcaccccggttagacgctcatctgggccagcaccacaaagcctgctgagcgcacggcgtgtgtcagccttgcccacacccgccagccggcgctgctctggccttccaccgatgacccccaaaacgatgcccagggccgtgggctctcccctgtgtgtgccagctcggagacgttcctctgagccccgcaagaactctgcaatgagaactgaaccaacaagggagagcaacagaaagacagattccaggctggtggatgtgtcccctgacaggggttctcctccttcccgtgtgcctcaggcacttaacttttctccagaggaaagcgattctactttctccaaaagtactgccacagaagtagctcgggaggaagccaagccgggtggagatgcagcccctagtgaggctcttcttgtagatatcaaactggaaccactcgcggtcactccagatgctgcaagccagcccctcattgaccttcctctcatcgacttctgcgataccccagaagcacacgtggctgtaggatctgaaagcaggcctctgatcgacctcatgacaaacactccagacatgaataaaaatgtggccaaaccttcaccggtggtgggacagctcatagacctgagctcccctctgatccagctgagccctgaggctgacaaggagaacgtggattccccactcctcaagttctaagccgaaccaaatcctttgccttgaaagaacagccctaaagtggttttcaaccctcagaaacaagctttaggctggtcgcagtggcttacacttgtaaccctagaacttgggaggctgaggtgggcggattacttgagcccaggagttcgggaccagcctgggaaatatagtgaaactcctgtccctacaaaaaatacaaaaattagccgggtgtggtagtgcatgcctgtagtcccagctacttgggaggctgaagtgggaggatggcctgagctcaaggagatgcaggctgcagtgggctgtgattgtgccactgcactccagcctgggcaccaatgtgagaacctgtcttggaaaaaaaaaaaaagaaacatgttttagtagaagttttatttgaaaaagaaaaataagcataaatatattcccagtgctggagagggtgggctgagggactggggccagcacggaccacccaaggcctctgcttcccgccgccaccctcctcgctgccattctctgggctggaatgtgaagcctcagtcactctaaatgaagaattttcttttgaatgttttgtatgtaaaatagcaagtggctatttttaaagttaagtttgtataaatagttagatattctagatttacattaaattgtaaaataaatggacttattgaagcatatcttgatttttaagcttatcttgattttcaaacatgcatagctatttttatcactctaatcagtaaggctactatctagactcgaatgctttcatacaagtgattttcaaaaattagtcaataaaaattgatgtcagtgcaggcccaggcccgcccccagatacactagtttctaggtctggggccagcctagtaattgttactaggcacacaggtgatgctgactcgatggcctgagacacaccccttgagaagaagctgctctggggagacgagggtatgagtggaaagaggatgggcgaggaggccgggcttacctggacactaaggtgatggacggcgtctgctgggcaggcctcggggaggacccctcagctttgctctcagcaggggcccgacaagctcagtgggcagtggcaggaactgagtgccactggaaagcccattccctttatttagaaaacgagctccaggaagccgctactttgtgtccatttctcttgaggaaacttaccaccttggttgagcggcttcatggcagacagcagcgagccagcggccggactctgtatttcggaccccactccagtgctccctgggtcataccaggatctgcctctgtccacaaagatgagggaaaatgatgactgtgctgtgctctctacttcctgcggttactgcgtgattctaaagctgccactcggaacagcgagtcctctgccgtcgagagcagggaggggtagggtggacaggcgatgccgtggaaagacgtctcggtggaaactgccatggtggaaaggtggcgcgcttctcacggctgagttgctgcgcctgcagacggaagctccccacaggcagagctgcttggatgtgtgagtcatgaagccagagaagccccgctccacgagcagtgactccccaggccctgtgacctccctcctgtcttgcagctcctcctggcaccagtccccagggctctcctgttggtagttcctgcttttcttcttggaaattcctcgtggacctcgagatctttaccctaaaatagttctgttgaatttcaccctggcaatgtaaattgatagcttatcttcacagatgccagacaatggacaactcaccatcagtcctctgctcacctgagacaaatgcatgtctgattgcttcctctgccctattgtttatgtgaaaatgcagattcactgagccagactaaggcatcagtgactgttcctctacctgcctctcacatggagattgtgtattcagtgaaaggctgatcaaagacccaaaggaatgcaacagtttatctcttatctacctatgacctgcgagctgcccaccacccccagttgttgcgcctttccagacagaaccagtgtacatcttacacgtattaattgatgtcctgtgtctccctaatatgtatcaaagcaagctgtgcctcgaccaccttgggcacatatcctcaggacatcatcctgaggctgtgtcactggcatgtccttaaccttggcaaaataaactttctaaattgaaacctgtctca

SEQ ID NO: 454241 - DNA, 2272 bp, Homo sapiens
cccttttcaaaccgaccaatcggcaacccgcgtctcccggcgccgcgtttaaatccgtgccggaggcgcgtcctgcatcgtctgccgctttggtgacttctgacagctctctccatggaaggaggcggcggccgcgatgagccttcagcctgccgggcaggggacgtgaacatggatgaccctaagaaggaagacattcttcttttggccgatgaaaaatttgacttcgatctttcattgtcttcttcgagtgcaaatgaagatgatgaagtcttcttcggaccctttggacataaagaaagatgtattgctgccagcttggaattaaataatccggttcccgaacagcctccgttgcccacatctgagagtccctttgcctggagccctctggccggggagaagttcgtggaggtgtacaaagaagctcacttactggctttacacattgagagcagcagccggaaccaggcagcccaagctgccaagcctgaagaccctcggagccagggcgtggaaagattcatacaggagtcaaaattaaaaataaacctctttgagaaagaaaaggaaatgaagaaaagccccacgtctcttaaaagggagacatactacctgtcagacagccccttgctggggccccctgtgggtgagcctcggctcttggcctcctccccggccctgcccagctctggtgcccaggcccgcctcacccgggcgccggggcctccgcactctgctcatgctttgcccagggaatcatgcactgctcatgctgcaagtcaggcagcgactcagaggaagcccgggaccaaattgctgctgcctcgagcggcctctgttagaggaagaagcatccctggggctgcggagaagcccaagaaagagattccagctagtccttccaggacaaaaatcccagctgagaaggaatcccaccgggatgttctccctgacaaacctgccccgggtgctgtcaatgtgccggccgccggaagccacttgggccagggcaagcgggcgatccctgttccaaacaagttggggctgaagaagaccctgttaaaagcacccggctctaccagcaatctcgcaaggaagtcctcctcggggcctgtttggagcggggcatccagtgcgtgcacatccccagcagtgggcaaagctaaatcaagtgaatttgcaagtattcctgcaaatagctcccggcctctgtcaaacatcagcaagtcaggcagaatgggacccgccatgctgcggccagctctgcctgcaggccctgtgggggcatcctcctggcaggccaagcgggtcgatgtttctgagctggcagcggagcagctcacggcacccccctcagcatcccccacccaaccccagactccggaaggtggcggccagtggctgaactccagttgcgcttggtcagaatcttctcaattgaataagactagaagtatcagacggcgagattcctgtctaaattccaagacaaaggttatgcctactcctacaaatcaatttaaaattcctaagttttctattggtgactccccggacagctcaacaccaaagctttcgcgggcacagcggccgcagtcgtgcacgtcagttggcagggtcactgtccacagcaccccggttagacgctcatctgggccagcaccacaaagcctgctgagcgcacggcgtgtgtcagccttgcccacacccgccagccggcgctgctctggccttccaccgatgacccccaaaacgatgcccagggccgtgggctctcccctgtgtgtgccagctcggagacgttcctctgagccccgcaagaactctgcaatgagaactgaaccaacaagggagagcaacagaaagacagattccaggctggtggatgtgtcccctgacaggggttctcctccttcccgtgtgcctcaggcacttaacttttctccagaggaaagcgattctactttctccaaaagtactgccacagaagtagctcgggaggaagccaagccgggtggagatgcagcccctagtgaggtgggcagaacgggcgcagctgggttctgttagctgagattcctggaggctgctcgggaagcccgtggaacccagggctgtggctggcggagttccctgccatgcttcatcctggggccagtgcctccgtgccaagcaacccaaagggaggcagtcaggacttccaggcctccaggggagaaagccctgcatttgactaaggcaagggtcagggatcaaagctgaggaagcg

SEQ ID NO: 454242 - DNA, 1617 bp, Homo sapiens
cccttttcaaaccgaccaatcggcaacccgcgtctcccggcgccgcgtttaaatccgtgccggaggcgcgtcctgcatcgtctgccgctttggtgacttctgacagctctctccatggaaggaggcggcggccgcgatgagccttcagcctgccgggcaggggacgtgaacatggatgaccctaagaaggaagacattcttcttttggccgatgaaaaatttgacttcgatctttcattgtcttcttcgagtgcaaatgaagatgatgaagtcttcttcggaccctttggacataaagaaagatgtattgctgccagcttggaattaaataatccggttcccgaacagcctccgttgcccacatctgagagtccctttgcctggagccctctggccggggagaagttcgtggaggtgtacaaagaagctcacttactggctttacacattgagagcagcagccggaaccaggcagcccaagctgccaagcctgaagaccctcggagccagggcgtggaaagattcatacaggagtcaaaattaaaaataaacctctttgagaaagaaaaggaaatgaagaaaagccccacgtctcttaaaagggagacatactacctgtcagacagccccttgctggggccccctgtgggtgagcctcggctcttggcctcctccccggccctgcccagctctggtgcccaggcccgcctcacccgggcgccggggcctccgcactctgctcatgctttgcccagggaatcatgcactgctcatgctgcaagtcaggcagcgactcagaggaagcccgggaccaaattgctgctgcctcgagcggcctctgttagaggaagaagcatccctggggctgcggagaagcccaagaaagagattccagctagtccttccaggacaaaaatcccagctgagaaggaatcccaccgggatgttctccctgacaaacctgccccgggtgctgtcaatgtgccggccgccggaagccacttgggccagggcaagcgggcgatccctgttccaaacaagttggggctgaagaagaccctgttaaaagcacccggctctaccagcaatctcgcaaggaagtcctcctcggggcctgtttggagcggggcatccagtgcgtgcacatccccagcagtgggcaaagctaaatcaagtgaatttgcaagtattcctgcaaatagctcccggcctctgtcaaacatcagcaagtcaggcagaatgggacccgccatgctgcggccagctctgcctgcaggccctgtgggggcatcctcctggcaggccaagcgggtcgatgtttctgagctggcagcggagcagctcacggcacccccctcagcatcccccacccaaccccagactccggaaggtggcggccacacggaccacccaaggcctctgcttcccgccgccaccctcctcgctgccattctctgggctggaatgtgaagcctcagtcactctaaatgaagaattttcttttgaatgttttgtatgtaaaatagcaagtggctatttttaaagttaagtttgtataaatagttagatattctagatttacattaaattgtaaaataaatggacttattgaagcat

SEQ ID NO: 454243 - DNA, 1091 bp, Homo sapiens
  misc_feature (954)..(954): n is a, c, g, or t
cccttttcaaaccgaccaatcggcaacccgcgtctcccggcgccgcgtttaaatccgtgccggaggcgcgtcctgcatcgtctgccgctttggtgacttctgacagctctctccatggaaggaggcggcggccgcgatgagccttcagcctgccgggcaggggacgtgaacatggatgaccctaagaaggaagacattcttcttttggccgatgaaaaatttgacttcgatctttcattgtcttcttcgagtgcaaatgaagatgatgaagtcttcttcggaccctttggacataaagaaagatgtattgctgccagcttggaattaaataatccggttcccgaacagcctccgttgcccacatctgagagtccctttgcctggagccctctggccggggagaagttcgtggaggtgtacaaagaagctcacttactggctttacacattgagagcagcagccggaaccaggcagcccaagctgccaagcctgaagaccctcggagccagggcgtggaaagattcatacaggagtcaaaattaaaaataaacctctttgagaaagaaaaaaaaaaaaaaaaaaaaaaaaaacgggggcggcgcgcgcgccgcgggccccgcggaaaaaagtctttcctaaaaccaatgcgcgggggggcgcgcgggggccaccgagggaggaaagagggaacaaggggcgccaaaagcgggttccctagaggagagaacgcgcggggccgaggacacagagagagggcgggggaaatttctcccacacaaaataaaaagaggccgcgggggggacaaccgcgagagggttctgggaaaaaaaatcccgagagggggagttctcgggaggggcctataagaggggagcacctatacacaaagaggagaagtccccaaagcggagagccgccggaagatatccaaaaatataaagcgccccggagncggggggggggccccacgcaccaaaagcaagccgcacgaggcacgccaagaacaagcagaccgaggcgacgggacaaacaacgacgcccgcaacgacggccgccccaaagacaccacaacgacgtcaccacatcgcg

SEQ ID NO: 454244 - DNA, 1813 bp, Homo sapiens
cacagttgtacttttagcttcccccatcctgcaaggccactcaaccatgtgctagctggagtgatctttattcacaatgtctttacaaaggctcctgcaacacagcagcaatggcaatttggcggacttctgcgctgggccagcgtatagctcttactccacactcaccggcagccttacgatggacgataatagaaggattcaaatgctagcagacacggtggctactctgcctcggggacgaaagcagcttgctttgaccagatcaagttctttaagtgacttttcctggtctcaaagaaagcttgttactgtggagaagcaggataatgaaacatttggatttgaaattcagtcttacaggccccagaatcagaatgcctgctcctcggaaatgttcactttgatatgcaaaatacaggaggacagcccagctcactgtgctggcctgcaagctggtgatgtccttgcaaatatcaatggtgtgagcacagaaggttttacctacaaacaagtcgttgacctgatcagatcgtccggaaacctgctaacgatagagactcttaatggaacaatgattctgaaaagaacggagcttgaagcaaagctgcaggttttaaagcaaactttgaaacaaaaatgggtggagtacagatctctgcagttacaggaacatcgtctgcttcatggtgatgcagctaattgccccagtttggaaaacatggacttggatgaattgtctttgtttggacccctgcctgggccaggcccagcccttgtggaccggaatcgattatccagtgagagcagctgtaagagctggctgagctccatgacgatggacagtgaagatggctaccagacgtgtgtgtctgaggactccagcaggggtgccttcagtcggcagacgagtacagatgatgagtgctttatccccaaggagggggatgattttctgaggaggtcatcttcaaggaggaaccggagcatcagtaacaccagcagcggatccatgtctcccttgtgggagggcaacttatcaagcatgtttgggaccctgccccggaagagcagaaagggaagtgtccgaaagcaactcttgaaatttatccctggccttcatcgtgctgtggaagaggaagaaagtcgcttttgacggattgtggtgtcctttcaaattagcttatttcacaaatatctctagactcacccagatcccagcttggtgggaaagtgcagaagaattgcaaaactgacatcccatttcacagcaatagtgacctttatttaaattgttgtgttatagtttatgcttcttaaatcatttttcaacctaaacagccaatttctaagcagacaggaaaactaaataataagttaattaatataacaaagatgcaggttcctgctcattccagtaatgtctttgaaagcaaaactaatatttattttctagattatccctgtgaataattgagaactttttggagtcaagtatgaataaaggtgtggcagaatataataatctggactattttctataggataattgctgggttataaaatcttaggtttgcttatgcccagtagctcctgcggaggcttaataataggcaattttgaatttgttcaaacctgtaatggcttgtaaacaaagatgaccatcagctgtttctcacatctatagtgacaataaagcgggaagtataagatttaataggaggggttaaggttcatgagaaccatggaaagatgtggtctgagatgggtgctgcaaagatcataataaagtcatttttatagacagtctaaa

SEQ ID NO: 454245 - DNA, 2638 bp, Homo sapiens
cacagttgtacttttagcttcccccatcctgcaaggccactcaaccatgtgctagctggagtgatctttattcacaatgtctttacaaaggctcctgcaacacagcagcaatggcaatttggcggacttctgcgctgggccagcgtatagctcttactccacactcaccggcagccttacgatggacgataatagaaggattcaaatgctagcagacacggtggctactctgcctcggggacgaaagcagcttgctttgaccagatcaagttctttaagtgacttttcctggtctcaaagaaagcttgttactgtggagaagcaggataatgaaacatttggatttgaaattcagtcttacaggccccagaatcagaatgcctgctcctcggaaatgttcactttgatatgcaaaatacaggaggacagcccagctcactgtgctggcctgcaagctggtgatgtccttgcaaatatcaatggtgtgagcacagaaggttttacctacaaacaagtcgttgacctgatcagatcgtccggaaacctgctaacgatagagactcttaatggaacaatgattctgaaaagaacggagcttgaagcaaagctgcaggttttaaagcaaactttgaaacaaaaatgggtggagtacagatctctgcagttacaggaacatcgtctgcttcatggtgatgcagctaattgccccagtttggaaaacatggacttggatgaattgtctttgtttggacccctgcctgggccaggcccagcccttgtggaccggaatcgattatccagtgagagcagctgtaagagctggctgagctccatgacgatggacagtgaagatggctaccagacgtgtgtgtctgaggactccagcaggggtgccttcagtcggcagacgagtacagatgatgagtgctttatccccaaggagggggatgattttctgaggaggtcatcttcaaggaggaaccggagcatcagtaacaccagcagcggatccatgtctcccttgtgggagggcaacttatcaagcatgtttgggaccctgccccggaagagcagaaagggaagtgtccgaaagcaactcttgaaatttatccctggccttcatcgtgctgtggaagaggaagaaagtcgcttttgacggattgtggtgtcctttcaaattagcttatttcacaaatatctctagactcacccagatcccagcttggtgggaaagtgcagaagaattgcaaaactgacatcccatttcacagcaatagtgacctttatttaaattgttgtgttatagtttatgcttcttaaatcatttttcaacctaaacagccaatttctaagcagacaggaaaactaaataataagttaattaatataacaaagatgcaggttcctgctcattccagtaatgtctttgaaagcaaaactaatatttattttctagattatccctgtgaataattgagaactttttggagtcaagtatgaataaaggtgtggcagaatataataatctggactattttctataggataattgctgggttataaaatcttaggtttgcttatgcccagtagctcctgcggaggcttaataataggcaattttgaatttgttcaaacctgtaatggcttgtaaacaaagatgaccatcagctgtttctcacatctatagtgacaataaagcgggaagtataagatttaataggaggggttaaggttcatgagaaccatggaaagatgtggtctgagatgggtgctgcaaagatcataataaagtcatttttatagacagtctaaacaaaatgggtggggatgtcatgttttttgcccaattcagcttttgttctgcctgaacattaatggcaagtctagaactctccgaatcctacagctttgtaattttttttctacaaatgtctaacatccaaaactgagggttgggaaaaggacttccctcctgtagtttttttcatattacttctcactttatatcttatattctaaatagctatcacctcagcagtcttttgcctattggttatgttagtatcacattacttctagcctttcaattactccatgttttatttaatatccattgaagtctatgaattctctgttctggtggcacagctattcataacctatattctagagtagacaatctggactatgtaataaatagtctgctgattttaagttctctctctctctctctctctctctctctctctctgtgcgtgtgtgtgtgtgtttgggagaaatagaaacacttcaatttaagtagagctgctaaatttaattaaacttctgcttaagaaatgagttattttgagataaaagagggtagggtaaggaagcatctaagacgagaaagaaatgataaagtatgaaaagatttctagttgggacttgccttctattaactctttgaactgagaaacatccagtggcctgtgcatgacagtcactcatatgaaaggcagggtgtcacacctttcacagaaatgatagcaatactgtctaccatttactgagtacctagttggctaaagacactttacgtatgatcctcacaattactatatagtaggtgtaggcatacagataacaagtcaggaat

SEQ ID NO: 454246 - DNA, 1821 bp, Homo sapiens
gccaggcgcagtggctcacacctgtaatcccagcactttgggaggccgaggcgggtggattacaaggtcaggagatcgagaccatcctggctaacaaggctcctgcaacacagcagcaatggcaatttggcggacttctgcgctgggccagcgtatagctcttactccacactcaccggcagccttacgatggacgataatagaaggattcaaatgctagcagacacggtggctactctgcctcggggacgaaagcagcttgctttgaccagatcaagttctttaagtgacttttcctggtctcaaagaaagcttgttactgtggagaagcaggataatgaaacatttggatttgaaattcagtcttacaggccccagaatcagaatgcctgctcctcggaaatgttcactttgatatgcaaaatacaggaggacagcccagctcactgtgctggcctgcaagctggtgatgtccttgcaaatatcaatggtgtgagcacagaaggttttacctacaaacaagtcgttgacctgatcagatcgtccggaaacctgctaacgatagagactcttaatggaacaatgattctgaaaagaacggagcttgaagcaaagctgcaggttttaaagcaaactttgaaacaaaaatgggtggagtacagatctctgcagttacaggaacatcgtctgcttcatggtgatgcagctaattgccccagtttggaaaacatggacttggatgaattgtctttgtttggacccctgcctgggccaggcccagcccttgtggaccggaatcgattatccagtgagagcagctgtaagagctggctgagctccatgacgatggacagtgaagatggctaccagacgtgtgtgtctgaggactccagcaggggtgccttcagtcggcagacgagtacagatgatgagtgctttatccccaaggagggggatgattttctgaggaggtcatcttcaaggaggaaccggagcatcagtaacaccagcagcggatccatgtctcccttgtgggagggcaacttatcaagcatgtttgggaccctgccccggaagagcagaaagggaagtgtccgaaagcaactcttgaaatttatccctggccttcatcgtgctgtggaagaggaagaaagtcgcttttgacggattgtggtgtcctttcaaattagcttatttcacaaatatctctagactcacccagatcccagcttggtgggaaagtgcagaagaattgcaaaactgacatcccatttcacagcaatagtgacctttatttaaattgttgtgttatagtttatgcttcttaaatcatttttcaacctaaacagccaatttctaagcagacaggaaaactaaataataagttaattaatataacaaagatgcaggttcctgctcattccagtaatgtctttgaaagcaaaactaatatttattttctagattatccctgtgaataattgagaactttttggagtcaagtatgaataaaggtgtggcagaatataataatctggactattttctataggataattgctgggttataaaatcttaggtttgcttatgcccagtagctcctgcggaggcttaataataggcaattttgaatttgttcaaacctgtaatggcttgtaaacaaagatgaccatcagctgtttctcacatctatagtgacaataaagcgggaagtataagatttaataggaggggttaaggttcatgagaaccatggaaagatgtggtctgagatgggtgctgcaaagatcataataaagtcatttttatagacagtctaaa

SEQ ID NO: 454247 - DNA, 735 bp, Homo sapiens
cacagttgtacttttagcttcccccatcctgcaaggccactcaaccatgtgctagctggagtgatctttattcacaatgtctttacaaaggctcctgcaacacagcagcaatggcaatttggcggacttctgcgctgggccagcgtatagctcttactccacactcaccggcagccttacgatggacgataatagaaggattcaaatgctagcagacacggtggctactctgcctcggggacgaaagcagcttgctttgaccagatcaagttctttaagtgacttttcctggtctcaaagaaagcttgttactgtggagaagcaggataatgaaacatttggatttgaaattcagtcttacaggccccagaatcagaatgcctgctcctcggaaatgttcactttgatatgcaaaatacaggaggacagcccagctcactgtgctggcctgcaagctggtgatgtccttgcaaatatcaatggtgtgagcacagaaggttttacctacaaacaagtcgttgacctgatcagatcgtccggaaacctgctaacgatagagactcttaatggaacaatgattctgaaaagaacggagcttgaagcaaagctgcaggttttaaagcaaactttgaaacaaaaatgggtggagtacagatctctgcagttacaggaacatcgtctgcttcatggtaaatgcaatttcctgttcagaaaccacactaacattacttcttt

SEQ ID NO: 454248 - DNA, 714 bp, Homo sapiens
cacagttgtacttttagcttcccccatcctgcaaggccactcaaccatgtgctagctggagtgatctttattcacaatgtctttacaaaggctcctgcaacacagcagcaatggcaatttggcggacttctgcgctgggccagcgtatagctcttactccacactcaccggcagccttacgatggacgataatagaaggattcaaatgctagcagacacggtggctactctgcctcggggacgaaagcagcttgctttgaccagatcaagttctttaagtgacttttcctggtctcaaagaaagcttgttactgtggagaagcaggataatgaaacatttggatttgaaattcagtcttacaggccccagaatcagaatgcctgctcctcggaaatgttcactttgatatgcaaaatacaggaggacagcccagctcactgtgctggcctgcaagctggtgatgtccttgcaaatatcaatggtgtgagcacagaaggttttacctacaaacaagtcgttgacctgatcagatcgtccggaaacctgctaacgatagagactcttaatggaacaatgattctgaaaagaacggagcttgaagcaaagctgcaggttttaaaggaatgagctatctttcagattaaggagactcccttctatacgaagtttgctggtagtgtttatagtgcttgtccattaaactttatcaaata

SEQ ID NO: 454249 - DNA, 1521 bp, Homo sapiens
cacagttgtacttttagcttcccccatcctgcaaggccactcaaccatgtgctagctggagtgatctttattcacaatgtctttacaaaggctcctgcaacacagcagcaatggcaatttggcggacttctgcgctgggccagcgtatagctcttactccacactcaccggcagccttacgatggacgataatagaaggattcaaatgctagcagacacggtggctactctgcctcggggacgaaagcagcttgctttgaccagatcaagttctttaagtgacttttcctggtctcaaagaaagcttgttactgtggagaagcaggataatgaaacatttggatttgaaattcagtcttacaggccccagaatcagaatgcctgctcctcggaaatgttcactttgatatgcaaaatacaggaggacagcccagctcactgtgctggcctgcaagctggtgatgtccttgcaaatatcaatggtgtgagcacagaaggttttacctacaaacaagtcgttgacctgatcagatcgtccggaaacctgctaacgatagagactcttaatggaacaatgattctgaaaagaacggagcttgaagcaaagctgcaggttttaaagcaaactttgaaacaaaaatgggtggagtacagatctctgcagttacaggaacatcgtctgcttcatggtgatgcagctaattgccccagtttggaaaacatggacttggatgaattgtctttgtttggacccctgcctgggccaggcccagcccttgtggaccggaatcgattatccagtgagagcagctgtaagagctggctgagctccatgacgatggacagtgaagatggctaccagacgtgtgtgtctgaggactccagcaggggtgccttcagtcggcagacgagtacagatgatgagtgctttatccccaaggagggggatgattttctgaggaggtcatcttcaaggaggaaccggagcatcagtaacaccagcagcggatccatgtctcccttgtgggagggcaacttatcaagcatgtttgggaccctgccccggaagagcagaaagggaagtgtccgaaagcaactcttgaaatttatccctggccttcatcgtgctgtggaagaggaagaaagtcgcttttgacggattgtggtgtcctttcaaattagcttatttcacaaatatctctagactcacccagatcccagcttggtgggaaagtgcagaagaattgcaaaactgacatcccatttcacagcaatagtgacctttatttaaattgttgtgttatagtttatgcttcttaaatcatttttcaacctaaacagccaatttctaagcagacaggaaaactaaataataagttaattaatataacaaagatgcaggttcctgctcattccagtaatgtctttgaaagcaaaactaatatttattttctagattatccctgtgaataattgagaactttttggagtcaagtatgaataaaggtgtggcagaatata

SEQ ID NO: 454250 - DNA, 2352 bp, Homo sapiens
ataagctatagtttacaaattaactaggatcctttcttttagccaccttctcaaggggagttttcccccattttctttctctgttatcagaagatttggctttggtccagctactcgaagtgccatgagaactgtaacatttgtatttcgtttttagtatagtatgtgctcaaagtgtagtactctgtagtatggtacttatttaaacgaatcactcatgttactcactccccaccttcctcttcttttttttttccttaaaacaggatagagactcttaatggaacaatgattctgaaaagaacggagcttgaagcaaagctgcaggttttaaagcaaactttgaaacaaaaatgggtggagtacagatctctgcagttacaggaacatcgtctgcttcatggtgatgcagctaattgccccagtttggaaaacatggacttggatgaattgtctttgtttggacccctgcctgggccaggcccagcccttgtggaccggaatcgattatccagtgagagcagctgtaagagctggctgagctccatgacgatggacagtgaagatggctaccagacgtgtgtgtctgaggactccagcaggggtgccttcagtcggcagacgagtacagatgatgagtgctttatccccaaggagggggatgattttctgaggaggtcatcttcaaggaggaaccggagcatcagtaacaccagcagcggatccatgtctcccttgtgggagggcaacttatcaagcatgtttgggaccctgccccggaagagcagaaagggaagtgtccgaaagcaactcttgaaatttatccctggccttcatcgtgctgtggaagaggaagaaagtcgcttttgacggattgtggtgtcctttcaaattagcttatttcacaaatatctctagactcacccagatcccagcttggtgggaaagtgcagaagaattgcaaaactgacatcccatttcacagcaatagtgacctttatttaaattgttgtgttatagtttatgcttcttaaatcatttttcaacctaaacagccaatttctaagcagacaggaaaactaaataataagttaattaatataacaaagatgcaggttcctgctcattccagtaatgtctttgaaagcaaaactaatatttattttctagattatccctgtgaataattgagaactttttggagtcaagtatgaataaaggtgtggcagaatataataatctggactattttctataggataattgctgggttataaaatcttaggtttgcttatgcccagtagctcctgcggaggcttaataataggcaattttgaatttgttcaaacctgtaatggcttgtaaacaaagatgaccatcagctgtttctcacatctatagtgacaataaagcgggaagtataagatttaataggaggggttaaggttcatgagaaccatggaaagatgtggtctgagatgggtgctgcaaagatcataataaagtcatttttatagacagtctaaacaaaatgggtggggatgtcatgttttttgcccaattcagcttttgttctgcctgaacattaatggcaagtctagaactctccgaatcctacagctttgtaattttttttctacaaatgtctaacatccaaaactgagggttgggaaaaggacttccctcctgtagtttttttcatattacttctcactttatatcttatattctaaatagctatcacctcagcagtcttttgcctattggttatgttagtatcacattacttctagcctttcaattactccatgttttatttaatatccattgaagtctatgaattctctgttctggtggcacagctattcataacctatattctagagtagacaatctggactatgtaataaatagtctgctgattttaagttctctctctctctctctctctctctctctctctctgtgcgtgtgtgtgtgtgtttgggagaaatagaaacacttcaatttaagtagagctgctaaatttaattaaacttctgcttaagaaatgagttattttgagataaaagagggtagggtaaggaagcatctaagacgagaaagaaatgataaagtatgaaaagatttctagttgggacttgccttctattaactctttgaactgagaaacatccagtggcctgtgcatgacagtcactcatatgaaaggcagggtgtcacacctttcacagaaatgatagcaatactgtctaccatttactgagtacctagttggctaaagacactttacgtatgatcctcacaattactatatagtaggtgtaggcatacagataacaagtcaggaat

SEQ ID NO: 454251 - DNA, 2119 bp, Homo sapiens
agtttactagtatcattggaacggtgctcgtgcccaagaaggtaggtggaacgtggtcctggcgtgtttccatagcgagattctgagtcatgacataggtgcgtgggtacactactctcattgtagaaaccgccacggtggtctgcgtacagggctgggtagcaaatccaatgagtgccgttctgggagaacatatagggtagctattgcaatcgtcagtgcaaggaccctctgatatgggaattgaggccacgcccttgtggaccggaatcgattatccagtgagagcagctgtaagagctggctgagctccatgacgatggacagtgaagatggctaccagacgtgtgtgtctgaggactccagcaggggtgccttcagtcggcagacgagtacagatgatgagtgctttatccccaaggagggggatgattttctgaggaggtcatcttcaaggaggaaccggagcatcagtaacaccagcagcggatccatgtctcccttgtgggagggcaacttatcaagcatgtttgggaccctgccccggaagagcagaaagggaagtgtccgaaagcaactcttgaaatttatccctggccttcatcgtgctgtggaagaggaagaaagtcgcttttgacggattgtggtgtcctttcaaattagcttatttcacaaatatctctagactcacccagatcccagcttggtgggaaagtgcagaagaattgcaaaactgacatcccatttcacagcaatagtgacctttatttaaattgttgtgttatagtttatgcttcttaaatcatttttcaacctaaacagccaatttctaagcagacaggaaaactaaataataagttaattaatataacaaagatgcaggttcctgctcattccagtaatgtctttgaaagcaaaactaatatttattttctagattatccctgtgaataattgagaactttttggagtcaagtatgaataaaggtgtggcagaatataataatctggactattttctataggataattgctgggttataaaatcttaggtttgcttatgcccagtagctcctgcggaggcttaataataggcaattttgaatttgttcaaacctgtaatggcttgtaaacaaagatgaccatcagctgtttctcacatctatagtgacaataaagcgggaagtataagatttaataggaggggttaaggttcatgagaaccatggaaagatgtggtctgagatgggtgctgcaaagatcataataaagtcatttttatagacagtctaaacaaaatgggtggggatgtcatgttttttgcccaattcagcttttgttctgcctgaacattaatggcaagtctagaactctccgaatcctacagctttgtaattttttttctacaaatgtctaacatccaaaactgagggttgggaaaaggacttccctcctgtagtttttttcatattacttctcactttatatcttatattctaaatagctatcacctcagcagtcttttgcctattggttatgttagtatcacattacttctagcctttcaattactccatgttttatttaatatccattgaagtctatgaattctctgttctggtggcacagctattcataacctatattctagagtagacaatctggactatgtaataaatagtctgctgattttaagttctctctctctctctctctctctctctctctctctgtgcgtgtgtgtgtgtgtttgggagaaatagaaacacttcaatttaagtagagctgctaaatttaattaaacttctgcttaagaaatgagttattttgagataaaagagggtagggtaaggaagcatctaagacgagaaagaaatgataaagtatgaaaagatttctagttgggacttgccttctattaactctttgaactgagaaacatccagtggcctgtgcatgacagtcactcatatgaaaggcagggtgtcacacctttcacagaaatgatagcaatactgtctaccatttactgagtacctagttggctaaagacactttacgtatgatcctcacaattactatatagtaggtgtaggcatacagataacaagtcaggaat

SEQ ID NO: 454252 - DNA, 2654 bp, Homo sapiens
atctctcggcttccgttgagcaccaagcaagatggcagcttccgagacggttaggctacggcttcaatttgattacccgccgccagctaccccgcactgtacggccttctggcttctggtcgacttgaacagatgccgagtcgtcacagatctcattagtctcatccgccagcgcttcggcttcagttctggggccttcctaggcctctacctggagggggggctcttgccccccgccgagagcgcgcgccttgtgagagacaacgactgcctcagagttaaattagaagagagaggagttgctgagaattctgtagtcatcagtaatggtgacattaatttatctcttagaaaagcaaagaagcgggcatttcagttagaggagggtgaagaaactgaaccagattgcaaatattcaaagaagcattggaagagtcgagagaacaataacaataatgagaaggtcttggatctggaaccaaaagctgtcacagatcagactgtcagcaaaaaaaacaagagaaaaaataaagcaacctgtggcacagtgggtgatgataacgaagaggccaaaagaaaatcaccaaagaaaaaggagaaatgtgaatataaaaaaaaggctaagaatcccaagtctccgaaagtacaggcagtgaaagactgggccaatcagagatgtagttctccaaaaggttctgctagaaacagccttgttaaagccaaaaggaaaggtagtgtaagcgtttgctcaaaagagagtcccagttcctcctcggagtctgagtcttgtgatgaatctatcagtgatggtcccagcaaagtcactttggaggccagaaattcctcagagaaattaccaactgagttatcaaaggaagaaccctctaccaaaaatacaactgcagacaaactggctataaaacttggctttagccttacccccagcaagggcaagacctctggaacaacatcttccagttcagactctagtgcagagtcagacgaccaatgcttgatgtcatcgagcaccccggagtgtgctgcgggtttcttaaagacagtaggcctttttgcaggaagaggtcgtccaggcccagggctgtcatcacagactgcaggtgctgctggatggaggcgttctggctcaaatggtggtggacaggctcctggtgcttctcccagtgtgtctctccctgctagtttaggaagaggatggggtagagaagagaaccttttttcttggaagggagctaagggacggggcatgcgggggagaggtcgaggacgagggcatcctgtttcctgtgttgtaaatagaagcactgacaaccagaggcaacagcaattaaatgacgtggtaaaaaattcatctactattatccagaatccagtagagacacccaagaaggactatagtctgttaccactgttagcagctgcccctcaagttggagaaaagattgcatttaagcttttggagctaacatccagttactctcctgatgtctctgactacaaggaaggaagaatattaagccacaatccagagacccagcaagtagatatagaaattctttcatccttacctgccttgagagaacctgggaaatttgatttagtttatcacaatgaaaatggagccgaggtagtggagtacgctgtgacacaggagagcaagatcactgtattttggaaagagttgattgacccaagactgattattgaatctccaagtaacacatcaagtacagaacctgcctgagtatgacctctccaccttatagtttatgaatgtcttgtttgtgaaagtgactataacccaaactttttttttttttaaagaggatttggaagttgtatggatttttttgttatcttcactttactgcataggaaacaatctacctcatcatttaaaatgacatgggtgtcggttttgtagatctttggtttttttgtcaggtttaatttcagttaacaaaatgtaaaacatgacattccctgcagatattgttgtataccagtatggtttcttctctttctttaaatgtttttggccatcaagtagcagtcgtcagtaggagtttataataccaagaatgtgctgcgtatcttgtctcaataagttttaagtaacatttaaaaatattaaagcatgttatttgacctaattttttagcatttgagttgttccattaaatggagcatcttgtaaatttcaagtattttatacttgcaattgttaagagttaacaggtagttggatttgtcgcagacaatgagttaaggaatcctttcacgtttttcccaactttaaaattaaggattctcaggtccctgtgtagagcagtgaaaataagatgtgcgtatgtgtgtgtatgcctggagaattggtgtttcacttcagtgagaggattggctgtgagcttcagaccaggaaatgtgtcatcttgccaggcacctggctgagtgtgctggagtgaggatcttgaacagaaacttccttttctgttattattcactacgaagctaaaatggccaaatatataccgtgaaaattggtttcatttaacaaaagatcagatccctccttcagctgtacacatttttaaataaaatcatattgaactaaacatctctaccgagttatcatg

SEQ ID NO: 454253 - DNA, 392 bp, Homo sapiens
agcaattaaatgacgtggtaaaaaattcatctactattatccaggtaagtattattttttgtaagttatctcctccctttccccttagaatgtgtgtggagttcatgtcatggattcacattttctcaccagtgatgatgtcacatgactaacactgtttttcagaatccagtagagacacccaagaaggactatagtctgttaccactgttagcagctgcccctcaagttggagaaaagattgcatttaaggtatatttcaaaagaacagtcacagcaaaaaaggttcattccccttccaaataaacttacttagaaaatcaggttaaatgtgtttgtaaaagcccttcccactggaaccccagtgttgttacgggttcctggtagggctc

SEQ ID NO: 454254 - DNA, 326 bp, Homo sapiens
ccaactttaaaattaaggattctcaggtccctgtgtagagcagtgaaaataagatgtgcgtatgtgtgtgtatgcctggagaattggtgtttcacttcagtgagaggattggctgtgagcttcagaccaggaaatgtgtcatcttgccaggcacctggctgagtgtgctggagtgaggatcttgaacagaaacttccttttctgttattattcactacgaagctaaaatggccaaatatataccgtgaaaattggtttcatttaacaaaagatcagatccctccttcagctgtacacatttttaaataaaatcatattgaactaaa

SEQ ID NO: 454255 - DNA, 296 bp, Homo sapiens
ccctataactacactgattgtatacaatataaagacttttcctcctgtttaaatgagtagtaacattactatgaacaatcaaacagaatcattgctatataaaagtagctttattaatttttgtacatttcacagtgcctaacacatacatggttagtgtacaataaatgttaataattttatgattatagtgaaataaatagaacaaaaaactaaaggttttagtattcaaaggcagccagtgctaactcaaaatagaaactgtctcactcgttcacccaggctgcagtgcagtg

SEQ ID NO: 454256 - DNA, 628 bp, Homo sapiens
ctcccaaagtactgggattataggcgtgagccactgcgcctggctgatacatattatctttaataaaaattgtatatatgtatgcatgtacagatctgtgtatgcacatatacataaagcatttccatagtgaataagatggcttaggtttatggctttgaattaagtgcatgattatatcctggaataaagtaaatgttaattcatttattattttttcaaatctttatagaacattttaattgcactctccatttaaactgtttcaggatataaagtgacaaatgagctataacaaaacagtaggagcctcaaatgaaaaggagataaaacggcctaattcataacccactgattttgatctaggaaggccatttccaaagatctagtgctgtgtcgttaatcctggggaactaggttcttgcttactctgaaattatgttaataaaaactgtccagggattaatcactggacagtttttattttttcaaatagatgttgaaattctgatttacttttcttaccccgggaaagtatgtgtaagtggccttcctgtttcagtattgaagtactgttctctgaaatgattatttctgtcttcaacaacaaaagacaaatcttaaatta

SEQ ID NO: 454257 - DNA, 957 bp, Homo sapiens
gggcggtgcctgcgtccggcccgcgcggccacagtccctgcattgcgcgcgacccggcggcgggacaggcttgctgcttcctcctcctcggcctcaccattccagaccaaaattgaaaaaatggttgacctcacccaggtaatggatgatgaagtattcatggcttttgcatcctatgcaacaattattctttcaaaaatgatgcttatgagtactgcaactgcattctatagattgacaagaaaggtttttgccaatccagaagactgtgtagcatttggcaaaggagaaaatgccaagaagtatcttcgaacagatgacagagtagaacgtgtacgcagagcccacctgaatgaccttgaaaatattattccatttcttggaattggcctcctgtattccttgagtggtcccgacccctctacagccatcctgcacttcagactatttgtcggagcacggatctaccacaccattgcatatttgacaccccttccccagccaaatagagctttgagtttttttgttggatatggagttactctttccatggcttacaggttgctgaaaagtaaattgtacctgtaaagaaaatcatacaactcagcatccagttggctttttaagaattctgtacttccaatttataatgaatactttcttagattttaggtaggaggggagcagaggaattatgaactggggtaaacccattttgaatattagcattgccaatatcctgtattcttgttttacatttggattagaaatttaacatagtaattcttaagtcttttgtctgatttttaaagtactttcttataaatttggatcatgttatgatttgtaacattcacacaacacctcacttttgaatctataaaagaattgcacgtatgagaaacctatatttcaatactgctgaaacagacatgaaataaagaatttaaagaatga

SEQ ID NO: 454258 - DNA, 789 bp, Homo sapiens
gaaaatccaagtaagtctcctgtgtgaaagcgtaacaaaagatattttatttggggattttagattcctccctactattctttccgaccttccacccttactccctgcccgtgggattgtacttttagaggaaaacgacgttatctaaattgatccgctagtcaggttgcaaatgaatgttagaaagaacaattgaccccagttctgtaaaggttccgagtcctgggaggaggtgcagcgactgtgtgcacagcgccccctggtgatgagacactggcttttccgcatactaagagaagagcgtctccaacagagcggagtttcccagttgtataatgctttttgagacagtacctgtttcatcgaaaaagtgcctaataacacacttttggagacacttttcagacagagcgtttccagcatcttccctttccacttttaagttaagactttttttttttcacctctctcgttacttcagtcattgtaaagctgttacgattagcatatttgaacggcagagccagaatggggctacaaatgaagtgaaaagtatgctttaccgtgtgcaacaattgtgaaagttaatacatacacatatggaacaattaactaaaaacttaaggtaatatgtgttgaaataccaagatatgtgacttaaagtcagttatttgagttctggaaagacagaaaccagtgatggttagaaagcacttgacatatttatttatttatttaataccatcttagcttgtctaggaagcattcaagaccatatacattcaacac

SEQ ID NO: 454259 - DNA, 769 bp, Homo sapiens
gctggtacggtccgggatttagggatctgcaactgcattctatagattgacaagaaaggtttttgccaatccagaagactgtgtagcatttggcaaaggagaaaatgccaagaagtatcttcgaacagatgacagagtagaacgtgtacgcagagcccacctgaatgaccttgaaaatattattccatttcttggaattggcctcctgtattccttgagtggtcccgacccctctacagccatcctgcacttcagactatttgtcggagcacggatctaccacaccattgcatatttgacaccccttccccagccaaatagagctttgagtttttttgttggatatggagttactctttccatggcttacaggttgctgaaaagtaaattgtacctgtaaagaaaatcatacaactcagcatccagttggctttttaagaattctgtacttccaatttataatgaatactttcttagattttaggtaggaggggagcagaggaattatgaactggggtaaacccattttgaatattagcattgccaatatcctgtattcttgttttacatttggattagaaatttaacatagtaattcttaagtcttttgtctgatttttaaagtactttcttataaatttggatcatgttatgatttgtaacattcacacaacacctcacttttgaatctataaaagaattgcacgtatgagaaacctatatttcaatactgctgaaacagacatgaaataaagaatttaaagaatga

SEQ ID NO: 454260 - DNA, 718 bp, Homo sapiens
aggatccattagtgctcagatttagtttttagaagagagagaaaaaaggatacatatctagtattttgaaattagtgtctttaatagttatctttttccacaagcccacctgaatgaccttgaaaatattattccatttcttggaattggcctcctgtattccttgagtggtcccgacccctctacagccatcctgcacttcagactatttgtcggagcacggatctaccacaccattgcatatttgacaccccttccccagccaaatagagctttgagtttttttgttggatatggagttactctttccatggcttacaggttgctgaaaagtaaattgtacctgtaaagaaaatcatacaactcagcatccagttggctttttaagaattctgtacttccaatttataatgaatactttcttagattttaggtaggaggggagcagaggaattatgaactggggtaaacccattttgaatattagcattgccaatatcctgtattcttgttttacatttggattagaaatttaacatagtaattcttaagtcttttgtctgatttttaaagtactttcttataaatttggatcatgttatgatttgtaacattcacacaacacctcacttttgaatctataaaagaattgcacgtatgagaaacctatatttcaatactgctgaaacagacatgaaataaagaatttaaagaatga

SEQ ID NO: 454261 - DNA, 596 bp, Homo sapiens
tccccgtacagagtgaatgtgtacagagtgaatgtgtacagagtgaatgtgtacgcagcccacctgaatgaccttgaaaatattattccatttcttggaattggcctcctgtattccttgagtggtcccgacccctctacagccatcctgcacttcagactatttgtcggagcacggatctaccacaccattgcatatttgacaccccttccccagccaaatagagctttgagtttttttgttggatatggagttactctttccatggcttacaggttgctgaaaagtaaattgtacctgtaaagaaaatcatacaactcagcatccagttggctttttaagaattctgtacttccaatttataatgaatactttcttagattttaggtaggaggggagcagaggaattatgaactggggtaaacccattttgaatattagcattgccaatatcctgtattcttgttttacatttggattagaaatttaacatagtaattcttaagtcttttgtctgatttttaaagtactttcttataaatttggatcatgttatgatttgtaccttccctctgtaccgggatcctctaaaagtc

SEQ ID NO: 454262 - DNA, 1190 bp, Homo sapiens
gggcggtgcctgcgtccggcccgcgcggccacagtccctgcattgcgcgcgacccggcggcgggacaggcttgctgcttcctcctcctcggcctcaccgtgcgtactgggaggggagaaggggaccgcatgcaaagggtggcaggcagggagggccagggtgggtggcagatggaagacttgggggggtctctgccagctggaagtgcttggctccacttagcagctaaacttagcttttcaatcgatcgcttttgaaagggaattgtatttctgtccccgtgcgggtaagttttcccatttctcaaactccaggaatgaaacgagagagtcttttcatgcttgagtgatgatttccaaacttagccttttcaagtcaaagtaacctcctgtttgaaagggtcccttgaactctggggaaggaggaaaaggcacgtgtagtaatggaggaaatgcctgtagtttgaacgactgctgttctccccaagagtgcaaaagcctgcgatgtctcaggtttcatgggcatagtggcctttatgcctattgtaaggcaggatttgctcttctgagttcactttgataggagaaacatcagcaagttttaaaataatactaaataatactactgctaataatgctagctatcgaaacaagaggatgtgggttagatgataatatttttgtgtgatattatagccagtgacaagagagctaagggtgagccccttgggacggttctcacctgtgccccacttccccagtctggaggaggaagccatgtggaaggagaaaaggagaagggaactctctttttcgggaattaaggtgtcatatattgctctagctggcttgggacagaggagagaggagtgcatgtaaatcttctagtctctctgcttctcttgaaatgtggcagtctgagctccacgtttatattcccctatttcttctccctaatttcttacccagtgagtgctgagtgggtgcccgcaagcattgctgtatggcacccaggcctccagtgagcaatccttaaagcccagttttcctggggtcccagcctgctgtgagtcccagcctacacctaccttttgcatatgcttttcttggccttaggatagtactggactttgttgtcctctgctgtttccaaaataagagggctatgtgtgcgattatctttggtaattt

SEQ ID NO: 454263 - DNA, 856 bp, Homo sapiens
  misc_feature (695)..(695): n is a, c, g, or t
  misc_feature (702)..(703): n is a, c, g, or t
  misc_feature (709)..(709): n is a, c, g, or t
  misc_feature (716)..(716): n is a, c, g, or t
  misc_feature (718)..(718): n is a, c, g, or t
  misc_feature (722)..(722): n is a, c, g, or t
  misc_feature (739)..(739): n is a, c, g, or t
  misc_feature (746)..(746): n is a, c, g, or t
gggcggtgcctgcgtccggcccgcgcggccacagtccctgcattgcgcgcgacccggcggcgggacaggcttgctgcttcctcctcctcggcctcaccattccagaccaaaattgaaaaaatggttgacctcacccaggtaatggatgatgaagtattcatggcttttgcatcctatgcaacaattattctttcaaaaatgatgcttatgagtactgcaactgcattctatagattgacaagaaaggtttttgccaatccagaagactgtgtagcatttggcaaaggagaaaatgccaagaagtatcttcgaacagatgacagagtagaacgtgtacgcagggcacaggagatcttaggcccagaaaggcagattcagaagaacctacatgtaaatgagactggagtggaaatgagaatggcaggaaatgcatggaaacagacttgtaactgtctcatggcctggtcgtccaaatcccagaggatggagtgcaatggcatgatctcagctcaccgcaacctctgcctcccggattcaagtgattctcctgcctcagcctcttgagtagctgggattacaggttgtgcagaagtcaagagctaaccaagaagacaaggaatgtaacatatttatcaaatagcacatcatctctattataagacagtggttgttaatactatcactgacagatattncgatttnnaacacnagcaatntnagtnagatcagcactttcttnagatagntcaattggttgctgaaaagaggataccagggttgattatgtctcaaatgggaaaagttggggaaagggggtgtaaatgggaaaaagcccaggaagggataacgaattgag

SEQ ID NO: 454264 - DNA, 550 bp, Homo sapiens
gggcggtgcctgcgtccggcccgcgcggccacagtccctgcattgcgcgcgacccggcggcgggacaggcttgctgcttcctcctcctcggcctcaccattccagaccaaaattgaaaaaatggttgacctcacccaggtaatggatgatgaagtattcatggcttttgcatcctatgcaacaattattctttcaaaaatgatgcttatgagtactgcaactgcattctatagattgacaagaaaggtttttgccaatccagaagactgtgtagcatttggcaaaggagaaaatgccaagaagtatcttcgaacagatgacagagtagaacgtgtacgcagggcacaggagatcttaggcccagaaaggcagattcagaagaacctacatgtaaatgagactggagtggaaatgagaatggcaggaaatgcatggaaacagacttgtaactgtctcatggcctggtcgtccaaatcccagagtaggttagcctgactgtgctatcacagcataggagcaagacaggaaatggaactgcataaatctcctt

SEQ ID NO: 454265 - DNA, 673 bp, Homo sapiens
cgatctaaggatcctactctcacccacccaatgctgcaatgtaagaacatcaaatgatcttccagttattttgggtatttatgtctgctttttcccattttatttaaatctttttaagattccagaccaaaattgaaaaaatggttgacctcacccaggtaatggatgatgaagtattcatggcttttgcatcctatgcaacaattattctttcaaaaatgatgcttatgagtactgcaactgcattctatagattgacaagaaaggtaagaaatttggaggtaatattttcttacttttaagagttggaattctggagagcagttttcttaattttctttttttatttttggtaaagcccaatagcacactgttttatgctgtaagtgaagtatgccatcgtttggcacagatggatctgatgtatttatggaacagttgctttctcctagaaactagtaaatggttttttcattatggcttttacctttttatcattctgctaagcagatgagatattctggaatatcaaagttttcacggaaactttctttcattttggaattaattttgccaatgagggtttagaaaacaatcattttctagacagttaactggtattttcagctctagtgcaggtcaagggtatgattttggttaaaaaaaaatagaa

SEQ ID NO: 454266 - DNA, 308 bp, Homo sapiens
cctcctgggttcaagccactctccgcctcggcctcccaaagtgctgggactacaggcgtgagccaccacaccaggcctactgtttcgattttaagaatgaagaaatttagtctcagagactgaatccctcaagcaaggttaacagctaaatcgtgggactggaattcaagtcctaaagcctacagttttgaatactactgaaatgacaagttgtaagttgggtctccaaagcaggatacataagaactgagccttcctaagttcagtgctgctgctaggtacatagcttgatgtttccaaagagatca

SEQ ID NO: 454267 - DNA, 502 bp, Homo sapiens
cagggtcttgctctgtcacccagactagattgtagtggtgcaatcacagctcactgcagcctcaacctctcgggctcaggtgatcctccaacctcaacctcctgagtagctaggaccacaggcatgcatgtggcccactaccatgcaaaattttttttaaaaaaatttgtagatatgggtactccctatgttgcccaggctgatcttgaattcttgggctcaagcaatcctgcctcagcctcacaaagcgctggaattacaggtgtgagctattgctcctggccagtatttgaaataagttttttttcttggtatttggataggtttttgccaatccagaagactgtgtagcatttggcaaaggagaaaatgccaagaagtatcttcgaacagatgacagagtagaacgtgtacgcaggtaaaccagtgtctcttgaaattacttactttatgaaacaattttggtcaaggagttcagtgaagatgtctcagggtcttggag

SEQ ID NO: 454268 - DNA, 280 bp, Homo sapiens
gggggtgatcttgggtgagaatgctctcttctgctgagaacaactgccagaggactcaactgagcacctttaaccattagctgaggcttcttagcagtctgccatagcaactcaagtaatgcaactttactcagcatggaccgtcactttctccagacttctaagagatgccatagcagaaaatttatgcctttccctgcagtccttgtcaagtgttaaatcccatggccttatatcctgagaggatggctctaaatcaataaactctcctttatctagt

SEQ ID NO: 454269 - DNA, 1042 bp, Homo sapiens
gggcggtgcctgcgtccggcccgcgcggccacagtccctgcattgcgcgcgacccggcggcgggacaggcttgctgcttcctcctcctcggcctcaccattccagaccaaaattgaaaaaatggttgacctcacccaggtaatggatgatgaagtattcatggcttttgcatcctatgcaacaattattctttcaaaaatgatgcttatgagtactgcaactgcattctatagattgacaagaaaggtttttgccaatccagaagactgtgtagcatttggcaaaggagaaaatgccaagaagtatcttcgaacagatgacagagtagaacgtgtacgcagagcccacctgaatgaccttgaaaatattattccatttcttggaattggcctcctgtattccttgagtggtcccgacccctctacagccatcctgcacttcagactatttgtcggagcacggatctaccacaccattgcatatttgacaccccttccccagccaaatagagctttgagtttttttgttggatatggagttactctttccatggcttacaggttgctgaaaagtaaattgtacctgtaaagaaaatcatacaactcagcatccagttggctttttaagaattctgtacttccaatttataatgaatactttcttagattttaggtaggaggggagcagaggaattatgaactggggtaaacccattttgaatattagcattgccaatatcctgtattcttgttttacatttggattagaaatttaacatagtaattcttaagtcttttgtctgatttttaaagtactttcttataaatttggatcatgttatgatttgtaacattcacacaacacctcacttttgaatctataaaagaattgcacgtatgagaaacctatatttcaatactgctgaaacagacatgaaataaagaatttaaagaatgagaatatcccacttcacatacctaaaacacccaagggggggccccggtccccaattcgccccaaactgaagtcgacttacaattca

SEQ ID NO: 454270 - DNA, 881 bp, Homo sapiens
gggcggtgcctgcgtccggcccgcgcggccacagtccctgcattgcgcgcgacccggcggcgggacaggcttgctgcttcctcctcctcggcctcaccattccagaccaaaattgaaaaaatggttgacctcacccaggtaatggatgatgaagtattcatggcttttgcatcctatgcaacaattattctttcaaaaatgatgcttatgagtactgcaactgcattctatagattgacaagaaaggtttttgccaatccagaagactgtgtagcatttggcaaaggagaaaatgccaagaagtatcttcgaacagatgacagagtagaacgtgtacgcagagcccacctgaatgaccttgaaaatattattccatttcttggaattggcctcctgtattccttgagtggtcccgacccctctacagccatcctgcacttcagactatttgtcggagcacggatctaccacaccattgcatatttgacaccccttccccagccaaatagagctttgagtttttttgttggatatggagttactctttccatggcttacaggttgctgaaaagtaaattgtacctgtaaagaaaatcatacaactcagcatccagttggctttttaagaattctgtacttccaatttataatgaatactttcttagattttaggtaggaggggagcagaggaattatgaactggggtaaacccattttgaatattagcattgccaatatcctgtattcttgttttacatttggattagaaatttaacatagtaattcttaagtcttttgtctgatttttaaagtactttcttataaatttggatcatgttatgatttgtaccttccctctgtaccgggatcctctaaaagtc

SEQ ID NO: 454271 - DNA, 1145 bp, Homo sapiens
gggcggtgcctgcgtccggcccgcgcggccacagtccctgcattgcgcgcgacccggcggcgggacaggcttgctgcttcctcctcctcggcctcaccgtgcgtactgggaggggagaaggggaccgcatgcaaagggtggcaggcagggagggccagggtgggtggcagatggaagacttgggggggtctctgccagctggaagtgcttggctccacttagcagctaaacttagcttttcaatcgatcgcttttgaaagggaattgtatttctgtccccgtgcggattccagaccaaaattgaaaaaatggttgacctcacccaggtaatggatgatgaagtattcatggcttttgcatcctatgcaacaattattctttcaaaaatgatgcttatgagtactgcaactgcattctatagattgacaagaaaggtttttgccaatccagaagactgtgtagcatttggcaaaggagaaaatgccaagaagtatcttcgaacagatgacagagtagaacgtgtacgcagagcccacctgaatgaccttgaaaatattattccatttcttggaattggcctcctgtattccttgagtggtcccgacccctctacagccatcctgcacttcagactatttgtcggagcacggatctaccacaccattgcatatttgacaccccttccccagccaaatagagctttgagtttttttgttggatatggagttactctttccatggcttacaggttgctgaaaagtaaattgtacctgtaaagaaaatcatacaactcagcatccagttggctttttaagaattctgtacttccaatttataatgaatactttcttagattttaggtaggaggggagcagaggaattatgaactggggtaaacccattttgaatattagcattgccaatatcctgtattcttgttttacatttggattagaaatttaacatagtaattcttaagtcttttgtctgatttttaaagtactttcttataaatttggatcatgttatgatttgtaacattcacacaacacctcacttttgaatctataaaagaattgcacgtatgagaaacctatatttcaatactgctgaaacagacatgaaataaagaatttaaagaatga

SEQ ID NO: 454272 - DNA, 1154 bp, Homo sapiens
  misc_feature (113)..(113): n is a, c, g, or t
  misc_feature (117)..(117): n is a, c, g, or t
  misc_feature (128)..(130): n is a, c, g, or t
tcgtcgtcgtcgtcatccatcgtcctcatcatcctcttcttcatcttcatcctcagccacagttcttggctttcacaggaacaacttttgcagctttctttcctttggctggngtantctccatagcnnnttcttcagagtcatcttcctcatcgtcatcgtcatcctcatcatcttcgtcatcctcatcgtcctcatcctctgaggcaggggcagcagctgctgctttcatcgctgctggttcaatttcatcttcatcctcatcctcgtcctcgtcatcctcctcggcctcaccattccagaccaaaattgaaaaaatggttgacctcacccaggtaatggatgatgaagtattcatggcttttgcatcctatgcaacaattattctttcaaaaatgatgcttatgagtactgcaactgcattctatagattgacaagaaaggtttttgccaatccagaagactgtgtagcatttggcaaaggagaaaatgccaagaagtatcttcgaacagatgacagagtagaacgtgtacgcagagcccacctgaatgaccttgaaaatattattccatttcttggaattggcctcctgtattccttgagtggtcccgacccctctacagccatcctgcacttcagactatttgtcggagcacggatctaccacaccattgcatatttgacaccccttccccagccaaatagagctttgagtttttttgttggatatggagttactctttccatggcttacaggttgctgaaaagtaaattgtacctgtaaagaaaatcatacaactcagcatccagttggctttttaagaattctgtacttccaatttataatgaatactttcttagattttaggtaggaggggagcagaggaattatgaactggggtaaacccattttgaatattagcattgccaatatcctgtattcttgttttacatttggattagaaatttaacatagtaattcttaagtcttttgtctgatttttaaagtactttcttataaatttggatcatgttatgatttgtaacattcacacaacacctcacttttgaatctataaaagaattgcacgtatgagaaacctatatttcaatactgctgaaacagacatgaaataaagaatttaaagaatga

SEQ ID NO: 454273 - DNA, 1034 bp, Homo sapiens
cagggtcttgctctgtcacccagactagattgtagtggtgcaatcacagctcactgcagcctcaacctctcgggctcaggtgatcctccaacctcaacctcctgagtagctaggaccacaggcatgcatgtggcccactaccatgcaaaattttttttaaaaaaatttgtagatatgggtactccctatgttgcccaggctgatcttgaattcttgggctcaagcaatcctgcctcagcctcacaaagcgctggaattacaggtgtgagctattgctcctggccagtatttgaaataagttttttttcttggtatttggataggtttttgccaatccagaagactgtgtagcatttggcaaaggagaaaatgccaagaagtatcttcgaacagatgacagagtagaacgtgtacgcagagcccacctgaatgaccttgaaaatattattccatttcttggaattggcctcctgtattccttgagtggtcccgacccctctacagccatcctgcacttcagactatttgtcggagcacggatctaccacaccattgcatatttgacaccccttccccagccaaatagagctttgagtttttttgttggatatggagttactctttccatggcttacaggttgctgaaaagtaaattgtacctgtaaagaaaatcatacaactcagcatccagttggctttttaagaattctgtacttccaatttataatgaatactttcttagattttaggtaggaggggagcagaggaattatgaactggggtaaacccattttgaatattagcattgccaatatcctgtattcttgttttacatttggattagaaatttaacatagtaattcttaagtcttttgtctgatttttaaagtactttcttataaatttggatcatgttatgatttgtaacattcacacaacacctcacttttgaatctataaaagaattgcacgtatgagaaacctatatttcaatactgctgaaacagacatgaaataaagaatttaaagaatga

SEQ ID NO: 454274 - DNA, 862 bp, Homo sapiens
gggcggtgcctgcgtccggcccgcgcggccacagtccctgcattgcgcgcgacccggcggcgggacaggcttgctgcttcctcctcctcggcctcaccattccagaccaaaattgaaaaaatggttgacctcacccaggtaatggatgatgaagtattcatggcttttgcatcctatgcaacaattattctttcaaaaatgatgcttatgagtactgcaactgcattctatagattgacaagaaagagcccacctgaatgaccttgaaaatattattccatttcttggaattggcctcctgtattccttgagtggtcccgacccctctacagccatcctgcacttcagactatttgtcggagcacggatctaccacaccattgcatatttgacaccccttccccagccaaatagagctttgagtttttttgttggatatggagttactctttccatggcttacaggttgctgaaaagtaaattgtacctgtaaagaaaatcatacaactcagcatccagttggctttttaagaattctgtacttccaatttataatgaatactttcttagattttaggtaggaggggagcagaggaattatgaactggggtaaacccattttgaatattagcattgccaatatcctgtattcttgttttacatttggattagaaatttaacatagtaattcttaagtcttttgtctgatttttaaagtactttcttataaatttggatcatgttatgatttgtaacattcacacaacacctcacttttgaatctataaaagaattgcacgtatgagaaacctatatttcaatactgctgaaacagacatgaaataaagaatttaaagaatga

SEQ ID NO: 454275 - DNA, 1013 bp, Homo sapiens
gggcggtgcctgcgtccggcccgcgcggccacagtccctgcattgcgcgcgacccggcggcgggacaggcttgctgcttcctcctcctcggcctcaccattccagaccaaaattgaaaaaatggttgacctcacccaggtaatggatgatgaagtattcatggcttttgcatcctatgcaacaattattctttcaaaaatgatgcttatgagtactgcaactgcattctatagattgacaagaaaggtttttgccaatccagaagactgtgtagcatttggcaaaggagaaaatgccaagaagtatcttcgaacagatgacagagtagaacgtgtacgcagagcccacctgaatgaccttgaaaatattattccatttcttggaattggcctcctgtattccttgagtggtcccgacccctctacagccatcctgcacttcagactatttgtcggagcacggatctaccacaccattgcatatttgacaccccttccccagccaaatagagctttgagtttttttgttggatatggagttactctttccatggcttacaggttgctgaaaagtaaattgtacctgtaaagaaaatcatacaactcagcatccagttggctttttaagaattctgtacttccaatttataatgaatactttcttagattttaggtaggaggggagcagaggaattatgaactggggtaaagtacagaattcttaaaaagccaattggaggtagagtgtatggtgtggatatggagtaactactataactatggattacaagttgctgacacagtagattgtactggtaaagaaatctaccaattagggatcaggtggtttttggaatttgtacttcaattatatgaatctttttcgattgcgtagagggaccatttatttagctgggtaaccctttgaatatgttggcaaatcgagtttgtcattggttaaatacataatctcataggcaaaaattatatggattgtagagaacacctttctta

SEQ ID NO: 454276 - DNA, 1101 bp, Homo sapiens
gggcggtgcctgcgtccggcccgcgcggccacagtccctgcattgcgcgcgacccggcggcgggacaggcttgctgcttcctcctcctcggcctcaccattccagaccaaaattgaaaaaatggttgacctcacccaggtaatggatgatgaagtattcatggcttttgcatcctatgcaacaattattctttcaaaaatgatgcttatgagtactgcaactgcattctatagattgacaagaaaggtttttgccaatccagaagactgtgtagcatttggcaaaggagaaaatgccaagaagtatcttcgaacagatgacagagtagaacgtgtacgcagtcattgtaaagctgttacgattagcatatttgaacggcagagccagaatggggctacaaatgaagtgaaaagtatgctttaccgtgtgcaacaattgtgaaagttaatacatacacatatggaacaattaactaaaaacttaagagcccacctgaatgaccttgaaaatattattccatttcttggaattggcctcctgtattccttgagtggtcccgacccctctacagccatcctgcacttcagactatttgtcggagcacggatctaccacaccattgcatatttgacaccccttccccagccaaatagagctttgagtttttttgttggatatggagttactctttccatggcttacaggttgctgaaaagtaaattgtacctgtaaagaaaatcatacaactcagcatccagttggctttttaagaattctgtacttccaatttataatgaatactttcttagattttaggtaggaggggagcagaggaattatgaactggggtaaacccattttgaatattagcattgccaatatcctgtattcttgttttacatttggattagaaatttaacatagtaattcttaagtcttttgtctgatttttaaagtactttcttataaatttggatcatgttatgatttgtaacattcacacaacacctcacttttgaatctataaaagaattgcacgtatgagaaacctatatttcaatactgctgaaacagacatgaaataaagaatttaaagaatga

SEQ ID NO: 454277 - DNA, 1050 bp, Homo sapiens
gggcggtgcctgcgtccggcccgcgcggccacagtccctgcattgcgcgcgacccggcggcgggacaggcttgctgcttcctcctcctcggcctcaccgtgcgtactgggaggggagaaggggaccgcatgcaaagggtggcaggcagggagggccagggtgggtggcagatggaagacttgggggggtctctgccagctggaagtgcttggctccacttagcagctaaacttagcttttcaatcgatcgcttttgaaagggaattgtatttctgtccccgtgcggattccagaccaaaattgaaaaaatggttgacctcacccaggtaatggatgatgaagtattcatggcttttgcatcctatgcaacaattattctttcaaaaatgatgcttatgagtactgcaactgcattctatagattgacaagaaagagcccacctgaatgaccttgaaaatattattccatttcttggaattggcctcctgtattccttgagtggtcccgacccctctacagccatcctgcacttcagactatttgtcggagcacggatctaccacaccattgcatatttgacaccccttccccagccaaatagagctttgagtttttttgttggatatggagttactctttccatggcttacaggttgctgaaaagtaaattgtacctgtaaagaaaatcatacaactcagcatccagttggctttttaagaattctgtacttccaatttataatgaatactttcttagattttaggtaggaggggagcagaggaattatgaactggggtaaacccattttgaatattagcattgccaatatcctgtattcttgttttacatttggattagaaatttaacatagtaattcttaagtcttttgtctgatttttaaagtactttcttataaatttggatcatgttatgatttgtaacattcacacaacacctcacttttgaatctataaaagaattgcacgtatgagaaacctatatttcaatactgctgaaacagacatgaaataaagaatttaaagaatga

SEQ ID NO: 454278 - DNA, 1241 bp, Homo sapiens
gaaaatccaagtaagtctcctgtgtgaaagcgtaacaaaagatattttatttggggattttagattcctccctactattctttccgaccttccacccttactccctgcccgtgggattgtacttttagaggaaaacgacgttatctaaattgatccgctagtcaggttgcaaatgaatgttagaaagaacaattgaccccagttctgtaaaggttccgagtcctgggaggaggtgcagcgactgtgtgcacagcgccccctggtgatgagacactggcttttccgcatactaagagaagagcgtctccaacagagcggagtttcccagttgtataatgctttttgagacagtacctgtttcatcgaaaaagtgcctaataacacacttttggagacacttttcagacagagcgtttccagcatcttccctttccacttttaagttaagactttttttttttcacctctctcgttacttcagtcattgtaaagctgttacgattagcatatttgaacggcagagccagaatggggctacaaatgaagtgaaaagtatgctttaccgtgtgcaacaattgtgaaagttaatacatacacatatggaacaattaactaaaaacttaagagcccacctgaatgaccttgaaaatattattccatttcttggaattggcctcctgtattccttgagtggtcccgacccctctacagccatcctgcacttcagactatttgtcggagcacggatctaccacaccattgcatatttgacaccccttccccagccaaatagagctttgagtttttttgttggatatggagttactctttccatggcttacaggttgctgaaaagtaaattgtacctgtaaagaaaatcatacaactcagcatccagttggctttttaagaattctgtacttccaatttataatgaatactttcttagattttaggtaggaggggagcagaggaattatgaactggggtaaacccattttgaatattagcattgccaatatcctgtattcttgttttacatttggattagaaatttaacatagtaattcttaagtcttttgtctgatttttaaagtactttcttataaatttggatcatgttatgatttgtaacattcacacaacacctcacttttgaatctataaaagaattgcacgtatgagaaacctatatttcaatactgctgaaacagacatgaaataaagaatttaaagaatga

SEQ ID NO: 454279 - DNA, 677 bp, Homo sapiens
ctccaagatgggatctctgtgtctgacattcactctgtactacagagtgaaatgtgtacgcagcccacctgaatgaccttgaaaatattattccatttcttggaattggcctcctgtattccttgagtggtcccgacccctctacagccatcctgcacttcagactatttgtcggagcacggatctaccacaccattgcatatttgacaccccttccccagccaaatagagctttgagtttttttgttggatatggagttactctttccatggcttacaggttgctgaaaagtaaattgtacctgtaaagaaaatcatacaactcagcatccagttggctttttaagaattctgtacttccaatttataatgaatactttcttagattttaggtaggaggggagcagaggaattatgaactggggtaaacccattttgaatattagcattgccaatatcctgtattcttgttttacatttggattagaaatttaacatagtaattcttaagtcttttgtctgatttttaaagtactttcttataaatttggatcatgttatgatttgtaacattcacacaacacctcacttttgaatctataaaagaattgcacgtatgagaaacctatatttcaatactgctgaaacagacatgaaataaagaatttaaagaatga

SEQ ID NO: 454280 - DNA, 669 bp, Homo sapiens
cgtccaacggtacgggcaaggaaccacaaatacaattcataatagttccagtaagcccacctgaatgaccttgaaaatattattccatttcttggaattggcctcctgtattccttgagtggtcccgacccctctacagccatcctgcacttcagactatttgtcggagcacggatctaccacaccattgcatatttgacaccccttccccagccaaatagagctttgagtttttttgttggatatggagttactctttccatggcttacaggttgctgaaaagtaaattgtacctgtaaagaaaatcatacaactcagcatccagttggctttttaagaattctgtacttccaatttataatgaatactttcttagattttaggtaggaggggagcagaggaattatgaactggggtaaacccattttgaatattagcattgccaatatcctgtattcttgttttacatttggattagaaatttaacatagtaattcttaagtcttttgtctgatttttaaagtactttcttataaatttggatcatgttatgatttgtaacattcacacaacacctcacttttgaatctataaaagaattgcacgtatgagaaacctatatttcaatactgctgaaacagacatgaaataaagaatttaaagaatga

SEQ ID NO: 454281 - DNA, 898 bp, Homo sapiens
gggcggtgcctgcgtccggcccgcgcggccacagtccctgcattgcgcgcgacccggcggcgggacaggcttgctgcttcctcctcctcggcctcaccattccagaccaaaattgaaaaaatggttgacctcacccaggtaatggatgatgaagtattcatggcttttgcatcctatgcaacaattattctttcaaaaatgatgcttatgagtactgcaactgcattctatagattgacaagaaaggtttttgccaatccagaagactgtgtagcatttggcaaaggagaaaatgccaagaagtatcttcgaacagatgacagagtagaacgtgtacgcagccttgagtggtcccgacccctctacagccatcctgcacttcagactatttgtcggagcacggatctaccacaccattgcatatttgacaccccttccccagccaaatagagctttgagtttttttgttggatatggagttactctttccatggcttacaggttgctgaaaagtaaattgtacctgtaaagaaaatcatacaactcagcatccagttggctttttaagaattctgtacttccaatttataatgaatactttcttagattttaggtaggaggggagcagaggaattatgaactggggtaaacccattttgaatattagcattgccaatatcctgtattcttgttttacatttggattagaaatttaacatagtaattcttaagtcttttgtctgatttttaaagtactttcttataaatttggatcatgttatgatttgtaacattcacacaacacctcacttttgaatctataaaagaattgcacgtatgagaaacctatatttcaatactgctgaaacagacatgaaataaagaatttaaagaatga

SEQ ID NO: 454282 - DNA, 808 bp, Homo sapiens
gggcggtgcctgcgtccggcccgcgcggccacagtccctgcattgcgcgcgacccggcggcgggacaggcttgctgcttcctcctcctcggcctcaccattccagaccaaaattgaaaaaatggttgacctcacccaggtaatggatgatgaagtattcatggcttttgcatcctatgcaacaattattctttcaaaaatgatgcttatgagtactgcaactgcattctatagattgacaagaaagagcccacctgaatgaccttgaaaatattattccatttcttggaattggcctcctgtattccttgagtggtcccgacccctctacagccatcctgcacttcagactatttgtcggagcacggatctaccacaccattgcatatttgacaccccttccccagccaaatagagctttgagtttttttgttggatatggagttactctttccatggcttacaggttgctgaaaagtaaattgtacctgtaaagttataatgaatactttcttagattttaggtaggaggggagcagaggaattatgaactggggtaaacccattttgaatattagcattgccaatatcctgtattcttgttttacatttggattagaaatttaacatagtaattcttaagtcttttgtctgatttttaaagtactttcttataaatttggatcatgttatgatttgtaacattcacacaacacctcacttttgaatctataaaagaattgcacgtatgagaaacctatatttcaatactgctgaaacagacatgaaataaagaatttaaagaatga

SEQ ID NO: 454283 - DNA, 1047 bp, Homo sapiens
gggcggtgcctgcgtccggcccgcgcggccacagtccctgcattgcgcgcgacccggcggcgggacaggcttgctgcttcctcctcctcggcctcaccgtgcgtactgggaggggagaaggggaccgcatgcaaagggtggcaggcagggagggccagggtgggtggcagatggaagacttgggggggtctctgccagctggaagtgcttggctccacttagcagctaaacttagcttttcaatcgatcgcttttgaaagggaattgtatttctgtccccgtgcggattccagaccaaaattgaaaaaatggttgacctcacccaggtaatggatgatgaagtattcatggcttttgcatcctatgcaacaattattctttcaaaaatgatgcttatgagtactgcaactgcattctatagattgacaagaaaggtttttgccaatccagaagactgtgtagcatttggcaaaggagaaaatgccaagaagtatcttcgaacagatgacagagtagaacgtgtacgcagaatcaaacaaaccctgagcatttatcttgcctcttctatataaagtttaactcggcataaccaattgctgatgaagaagaaatgtttccttgtagaagcaaaccagtgaataattgaagaaaaaatttatcttttcaacatctaatgagttaatggattcaagcaaagattatccacggctgttaacaacacaaaaagacaatcggaaattagctattactgcgggaagtacccaataccatctatgaaactgtgtggacaaaaacactgacaaaaatctccacgaatctctaattttgaatacaaatttaaagaaaatgcaaaggattaaaatagaccatgatgaagtcagaaaaattcagacagagaaaaatgctccaggaccagaaacccatttcttccgcaaaagcttccaggtagagattgactgaccgagagaacagagacatagagagaacctagagattaaaagaaacttgagcgatttgtcagcattcagttgcaacgtatggatgtga

SEQ ID NO: 454284 - DNA, 761 bp, Homo sapiens
  misc_feature (600)..(600): n is a, c, g, or t
  misc_feature (607)..(608): n is a, c, g, or t
  misc_feature (614)..(614): n is a, c, g, or t
  misc_feature (621)..(621): n is a, c, g, or t
  misc_feature (623)..(623): n is a, c, g, or t
  misc_feature (627)..(627): n is a, c, g, or t
  misc_feature (644)..(644): n is a, c, g, or t
  misc_feature (651)..(651): n is a, c, g, or t
gggcggtgcctgcgtccggcccgcgcggccacagtccctgcattgcgcgcgacccggcggcgggacaggcttgctgcttcctcctcctcggcctcaccattccagaccaaaattgaaaaaatggttgacctcacccaggtaatggatgatgaagtattcatggcttttgcatcctatgcaacaattattctttcaaaaatgatgcttatgagtactgcaactgcattctatagattgacaagaaagggcacaggagatcttaggcccagaaaggcagattcagaagaacctacatgtaaatgagactggagtggaaatgagaatggcaggaaatgcatggaaacagacttgtaactgtctcatggcctggtcgtccaaatcccagaggatggagtgcaatggcatgatctcagctcaccgcaacctctgcctcccggattcaagtgattctcctgcctcagcctcttgagtagctgggattacaggttgtgcagaagtcaagagctaaccaagaagacaaggaatgtaacatatttatcaaatagcacatcatctctattataagacagtggttgttaatactatcactgacagatattncgatttnnaacacnagcaatntnagtnagatcagcactttcttnagatagntcaattggttgctgaaaagaggataccagggttgattatgtctcaaatgggaaaagttggggaaagggggtgtaaatgggaaaaagcccaggaagggataacgaattgag

SEQ ID NO: 454285 - DNA, 930 bp, Homo sapiens
  misc_feature (799)..(799): n is a, c, g, or t
  misc_feature (801)..(801): n is a, c, g, or t
gggcggtgcctgcgtccggcccgcgcggccacagtccctgcattgcgcgcgacccggcggcgggacaggcttgctgcttcctcctcctcggcctcaccattccagaccaaaattgaaaaaatggttgacctcacccaggtaatggatgatgaagtattcatggcttttgcatcctatgcaacaattattctttcaaaaatgatgcttatgagtactgcaactgcattctatagattgacaagaaaggtttttgccaatccagaagactgtgtagcatttggcaaaggagaaaatgccaagaagtatcttcgaacagatgacagagtagaacgtgtacgcagtcattgtaaagctgttacgattagcatatttgaacggcagagccagaatggggctacaaatgaagtgaaaagtatgctttaccgtgtgcaacaattgtgaaagttaatacatacacatatggaacaattaactaaaaacttaagagcccacctgaatgaccttgaaaatattattccatttcttggaattggcctcctgtattccttgagtggtcccgacccctctacagccatcctgcacttcagactatttgtcggagcacggatctaccacaccattgcatatttgacaccccttccccagccaaatagagctttgagtttttttgttggatatggagttactctttccatggcttacaggttgctgaaaagtaaattgtacctgtaaagaaaatcatacaactcagcatccagttggctttttaagaattctgtacttccaatatatgatactntngattaggggggggccgagattgaagggtaccctgataagtgcacacgttccgttaatgttgagacaacattatgtgtaaaccttaaggagtgtaaccccctgaaaacgaaatccgacgaaaaaatcgtc

SEQ ID NO: 454286 - DNA, 654 bp, Homo sapiens
gggcggtgcctgcgtccggcccgcgcggccacagtccctgcattgcgcgcgacccggcggcgggacaggcttgctgcttcctcctcctcggcctcaccattccagaccaaaattgaaaaaatggttgacctcacccaggtaatggatgatgaagtattcatggcttttgcatcctatgcaacaattattctttcaaaaatgatgcttatgagtactgcaactgcattctatagattgacaagaaaggtttttgccaatccagaagactgtgtagcatttggcaaaggagaaaatgccaagaagtatcttcgaacagatgacagagtagaacgtgtacgcagacggagttttgttcttgttgtccaggatggagtgcaatggcatgatctcagctcaccgcaacctctgcctcccggattcaagtgattctcctgcctcagcctcttgagtagctgggattacaggttgtgctctgccatagcaactcaagtaatgcaactttactcagcatggaccgtcactttctccagacttctaagagatgccatagcagaaaatttatgcctttccctgcagtccttgtcaagtgttaaatcccatggccttatatcctgagaggatggctctaaatcaataaactctcctttatctagt

SEQ ID NO: 454287 - DNA, 1131 bp, Homo sapiens
  misc_feature (968)..(968): n is a, c, g, or t
  misc_feature (1106)..(1106): n is a, c, g, or t
gggcggtgcctgcgtccggcccgcgcggccacagtccctgcattgcgcgcgacccggcggcgggacaggcttgctgcttcctcctcctcggcctcaccattccagaccaaaattgaaaaaatggttgacctcacccaggtaatggatgatgaagtattcatggcttttgcatcctatgcaacaattattctttcaaaaatgatgcttatgagtactgcaactgcattctatagattgacaagaaaggtttttgccaatccagaagactgtgtagcatttggcaaaggagaaaatgccaagaagtatcttcgaacagatgacagagtagaacgtgtacgcagagcccacctgaatgaccttgaaaatattattccatttcttggaattggcctcctgtattccttgagtggtcccgacccctctacagccatcctgcacttcagactatttgtcggagcacggatctaccacaccattgcatatttgacaccccttccccagccaaatagagctttgagtttttttgttggatatggagttactctttccatggcttacaggttgctgaaaagtaaattgtacctgtaaagaaaatcatacaactcagcatccagttggctttttaagaattctgtacttccaatttataatgaatactttcttagattttaggtaggaggggagcagaggaattatgaactggggtaaacccattttgaatattagcattgccaatatcctgtattcttgttttacatttggattagaaatttaacatagtaattcttaagtcttttgtctgatttttaaagtactttcttataaatttggatcatgttatgatttgtaacattcacacaacacctcacttttgaatctataaaagaattgcacgtatgagaaacctatatttcaatactgctgaaacagacatgaaataaagaatttaaagaatgaaaaaaaaaaanaaattttgacaaaaaacaaacatgtcggaccgcttggcccaatcggatttaggatttaacaaacttatgcatcccggccggattggagctcacttgggccattcgccctatagggaagggttttccaatccactggcncggcgtttacaacgccggacttggg

SEQ ID NO: 454288 - DNA, 1330 bp, Homo sapiens
caataacccattaagttagaagctattactatttcaatttttttttttggagggggagacagagtctcactctgtcacccaggctagagtgcagtggtgccatcttggctcactgcaagctctgcctcctgggttcatgctattctcctgcttcagcctcccaagcagccgggactacaggcgcctgccaccacacccggctaattttttgtatttttagtagagacggggtttcactgtgtcagccaggatggacttgatctctcgacctcgtgatccacccgcctcggcctcccaaagtgctgggactacaggcgtgagccaccacaccaggcctactgtttcgattttaagaatgaagaaatttagtctcagagactgaatccctcaagcaaggttaacagctaaatcgtgggactggaattcaagtcctaaagcctacagttttgaatactactgaaatgacaagttattccagaccaaaattgaaaaaatggttgacctcacccaggtaatggatgatgaagtattcatggcttttgcatcctatgcaacaattattctttcaaaaatgatgcttatgagtactgcaactgcattctatagattgacaagaaaggtttttgccaatccagaagactgtgtagcatttggcaaaggagaaaatgccaagaagtatcttcgaacagatgacagagtagaacgtgtacgcagagcccacctgaatgaccttgaaaatattattccatttcttggaattggcctcctgtattccttgagtggtcccgacccctctacagccatcctgcacttcagactatttgtcggagcacggatctaccacaccattgcatatttgacaccccttccccagccaaatagagctttgagtttttttgttggatatggagttactctttccatggcttacaggttgctgaaaagtaaattgtacctgtaaagaaaatcatacaactcagcatccagttggctttttaagaattctgtacttccaatttataatgaatactttcttagattttaggtaggaggggagcagaggaattatgaactggggtaaacccattttgaatattagcattgccaatatcctgtattcttgttttacatttggattagaaatttaacatagtaattcttaagtcttttgtctgatttttaaagtactttcttataaatttggatcatgttatgatttgtaacattcacacaacacctcacttttgaatctataaaagaattgcacgtatgagaaacctatatttcaatactgctgaaacagacatgaaataaagaatttaaagaatga

SEQ ID NO: 454289 - DNA, 951 bp, Homo sapiens
cagtacaattgcctccaatttcattctggaccctgaacaggaggggacatcgtgacaaagcaaattgtctggtatcatgaatttggaacaccattccagaccaaaattgaaaaaatggttgacctcacccaggtaatggatgatgaagtattcatggcttttgcatcctatgcaacaattattctttcaaaaatgatgcttatgagtactgcaactgcattctatagattgacaagaaaggtttttgccaatccagaagactgtgtagcatttggcaaaggagaaaatgccaagaagtatcttcgaacagatgacagagtagaacgtgtacgcagagcccacctgaatgaccttgaaaatattattccatttcttggaattggcctcctgtattccttgagtggtcccgacccctctacagccatcctgcacttcagactatttgtcggagcacggatctaccacaccattgcatatttgacaccccttccccagccaaatagagctttgagtttttttgttggatatggagttactctttccatggcttacaggttgctgaaaagtaaattgtacctgtaaagaaaatcatacaactcagcatccagttggctttttaagaattctgtacttccaatttataatgaatactttcttagattttaggtaggaggggagcagaggaattatgaactggggtaaacccattttgaatattagcattgccaatatcctgtattcttgttttacatttggattagaaatttaacatagtaattcttaagtcttttgtctgatttttaaagtactttcttataaatttggatcatgttatgatttgtaacattcacacaacacctcacttttgaatctataaaagaattgcacgtatgagaaacctatatttcaatactgctgaaacagacatgaaataaagaatttaaagaatga

SEQ ID NO: 454290 - DNA, 958 bp, Homo sapiens
gtccccactcgacccaggaagtccagctggcttcacctctcaccaggccctgttttaagcactgtttatttatttaatcatgacaaaaatccccatgagattccagaccaaaattgaaaaaatggttgacctcacccaggtaatggatgatgaagtattcatggcttttgcatcctatgcaacaattattctttcaaaaatgatgcttatgagtactgcaactgcattctatagattgacaagaaaggtttttgccaatccagaagactgtgtagcatttggcaaaggagaaaatgccaagaagtatcttcgaacagatgacagagtagaacgtgtacgcagagcccacctgaatgaccttgaaaatattattccatttcttggaattggcctcctgtattccttgagtggtcccgacccctctacagccatcctgcacttcagactatttgtcggagcacggatctaccacaccattgcatatttgacaccccttccccagccaaatagagctttgagtttttttgttggatatggagttactctttccatggcttacaggttgctgaaaagtaaattgtacctgtaaagaaaatcatacaactcagcatccagttggctttttaagaattctgtacttccaatttataatgaatactttcttagattttaggtaggaggggagcagaggaattatgaactggggtaaacccattttgaatattagcattgccaatatcctgtattcttgttttacatttggattagaaatttaacatagtaattcttaagtcttttgtctgatttttaaagtactttcttataaatttggatcatgttatgatttgtaacattcacacaacacctcacttttgaatctataaaagaattgcacgtatgagaaacctatatttcaatactgctgaaacagacatgaaataaagaatttaaagaatga

SEQ ID NO: 454291 - DNA, 812 bp, Homo sapiens
gggcggtgcctgcgtccggcccgcgcggccacagtccctgcattgcgcgcgacccggcggcgggacaggcttgctgcttcctcctcctcggcctcaccattccagaccaaaattgaaaaaatggttgacctcacccaggtaatggatgatgaagtattcatggcttttgcatcctatgcaacaattattctttcaaaaatgatgcttatgagtactgcaactgcattctatagattgacaagaaaggtttttgccaatccagaagactgtgtagcatttggcaaaggagaaaatgccaagaagtatcttcgaacagatgacagagtagaacgtgtacgcagagcccacctgaatgaccttgaaaatattattccatttcttggaattggcctcctgtattccttgagtggtcccgacccctctacagccatcctgcacttcagactatttgtcggagcacggatctaccacaccattgcatatttgacaccccttccccagccaaatagagctttgagtttttttgttggatatggagttactctttccatggcttacaggttgctgaaaagtaaattgtacctgtaaagaaaatcatacaactcagcatccagttggctttttaagaattctgtacttccaatttataatgaatactttcttagattttaggtaggaggggagcagaggaattatgaactggggtagtcgtgccatattaccgcttccaatactctgctattcgactctagcgattgcactagtgaacgaataagagatgttgagatgatcgtgctgtatcgattacagct

SEQ ID NO: 454292 - DNA, 903 bp, Homo sapiens
gggcggtgcctgcgtccggcccgcgcggccacagtccctgcattgcgcgcgacccggcggcgggacaggcttgctgcttcctcctcctcggcctcaccattccagaccaaaattgaaaaaatggttgacctcacccaggtaatggatgatgaagtattcatggcttttgcatcctatgcaacaattattctttcaaaaatgatgcttatgagtactgcaactgcattctatagattgacaagaaaggtttttgccaatccagaagactgtgtagcatttggcaaaggagaaaatgccaagaagtatcttcgaacagatgacagagtagaacgtgtacgcagagcccacctgaatgaccttgaaaatattattccatttcttggaattggcctcctgtattccttgagtggtcccgacccctctacagccatcctgcacttcagactatttgtcggagcacggatctaccacaccattgcatatttgacaccccttccccagccaaatagagctttgagtttttttgttggatatggagttactctttccatggcttacaggttgctgaaaagtaaattgtacctgtaaagttataatgaatactttcttagattttaggtaggaggggagcagaggaattatgaactggggtaaacccattttgaatattagcattgccaatatcctgtattcttgttttacatttggattagaaatttaacatagtaattcttaagtcttttgtctgatttttaaagtactttcttataaatttggatcatgttatgatttgtaacattcacacaacacctcacttttgaatctataaaagaattgcacgtatgagaaacctatatttcaatactgctgaaacagacatgaaataaagaatttaaagaatga

SEQ ID NO: 454293 - DNA, 1056 bp, Homo sapiens
  misc_feature (113)..(113): n is a, c, g, or t
  misc_feature (117)..(117): n is a, c, g, or t
  misc_feature (128)..(130): n is a, c, g, or t
tcgtcgtcgtcgtcatccatcgtcctcatcatcctcttcttcatcttcatcctcagccacagttcttggctttcacaggaacaacttttgcagctttctttcctttggctggngtantctccatagcnnnttcttcagagtcatcttcctcatcgtcatcgtcatcctcatcatcttcgtcatcctcatcgtcctcatcctctgaggcaggggcagcagctgctgctttcatcgctgctggttcaatttcatcttcatcctcatcctcgtcctcgtcatcctcctcggcctcaccattccagaccaaaattgaaaaaatggttgacctcacccaggtaatggatgatgaagtattcatggcttttgcatcctatgcaacaattattctttcaaaaatgatgcttatgagtactgcaactgcattctatagattgacaagaaaggtttttgccaatccagaagactgtgtagcatttggcaaaggagaaaatgccaagaagtatcttcgaacagatgacagagtagaacgtgtacgcagaatcaaacaaaccctgagcatttatcttgcctcttctatataaagtttaactcggcataaccaattgctgatgaagaagaaatgtttccttgtagaagcaaaccagtgaataattgaagaaaaaatttatcttttcaacatctaatgagttaatggattcaagcaaagattatccacggctgttaacaacacaaaaagacaatcggaaattagctattactgcgggaagtacccaataccatctatgaaactgtgtggacaaaaacactgacaaaaatctccacgaatctctaattttgaatacaaatttaaagaaaatgcaaaggattaaaatagaccatgatgaagtcagaaaaattcagacagagaaaaatgctccaggaccagaaacccatttcttccgcaaaagcttccaggtagagattgactgaccgagagaacagagacatagagagaacctagagattaaaagaaacttgagcgatttgtcagcattcagttgcaacgtatggatgtga

SEQ ID NO: 454294 - DNA, 2830 bp, Homo sapiens
cgaagcacattttaatcatttattttaaaagggggagtaaagcatttaaactgccaatcctatagactaggacttgaacatcaaaggaaaaatagacaaagactagatgataaagtcattcaaaagcacagaagcacatcacatacaccagcaaggtttccaactactgcactgattaactagatactctcaatagcttttctatagctcgtcctagaaaaaaaaattaaattttcattttcttacaagttccaggcttaaacaaaggcaaaaattacatgcaacaactgatacactcataagttgcacatatgctccaaggtctttattagataacaataaatgctagcactttgtcactgccatcagattttcttatagtcttagagtcatgtaaataaaagttcataatgaaattaaagaaaattaatttttctaatcttagatcagttccatagaaaactattaatttttttaaagtaggcagtagaagggggttggtggggggtggaattggttagtaagtctggttctaatcttctgagctgcctttggaaggaagttatgaggtagaagattctactgacttttagtaaggtggacaatgagagaaaagaaaaagcaggtgcctcatctacagatccttctgggatttatttgccatgtacaatttaatgcataaaaaggcctctctccataaaactcagcactttacagatgtagaatatataagcatgccaaatttacttatctgccacatacaaagcatcattccaggtgctagtgaggggaaaaaaaagttggagatttggtccctcgaggagctccagatattaatctacctaactaagtccccaggtttcttccaggcatggaagaattagtggtgctacatggatgaggactagtcattgggcaatatttcctgtacaaagaatccctatacgccaaacagaagagattttttactattatgacacaaacacagggaaagagggcaaactagacattgtaatgcataagatgcaggaaaaagtgcagagcattaactataacccttttgaccagaaactttatgtctataacgatggttaccttctgaattatgatctttctgtcttgcagaagccccagtaagctgtttaggagttagggtgaaagagaaaatgtttgttgaaaaaatagtcttctccacttacttagatatctgcagatatctaagtaagtggagaagactattttttcaacaaacattttctctttcaccctaactcctaaacagcttactggggcttctgcaagacagaaagatcataattcagaaggtaaccatcgttatagacataaagtttctggtcaaaagggttatagttaatgctctgcactttttcctgcatcttatgcattacaatgtctagtttgccctctttccctgtgtttgtgtcataatagtaaaaaatctcttctgttctggtgttcatagtacgggtggcatacagaaccccacataccatgaaggcgttagaagcagatggtttatactgcttggtataccaagtgtttagcacctgaagtgtggtgtcattgagtttactaatcaccatgttaaccagtgctggcttcagttgaataaataacccacaatccattctcatccacagcaaagtcaatatgcttgccaagcaacattagcatatgaaaagcggttattataggcagcattagggagagtttgagtcacagcaatcgtgttggtggtcaggttaactctggcaatattcccggtgtgtacatgttgacgtacatgttgttgttgtaaactgctgtaccactaccttggccataggtgatccgcaactctcgagcatttatatacaatagcaaatcatccagtgtgttgtacagtatataatactccaacagtctcccatctgtattcaatggcgccacccaatacagtcctttgtttggatgctggggagagtaatccctaccccaagcaccatatagataagaaaaccctctccagttgagctgaaccacagacggtttgctgatgttcaccacaccaccatgaccacagctccctggagtgggaggagggtggacgacaggggtgttttgatctttagaggcctcacactctttcagcttggtcttcagagccacgatttctcggcgaatggcaaggacattgtttttgtctagtgtctcaagcttctctaccaagagagtcatatttcttatctccacctccagctggtcaacaatttctgagcttccaccaaaactctccttcagctgtatgaccagtttttccatctccttcacttctaccttatcagctcgaagtccagttcagtgtaagaaatgtatccttctcccatgatgtcaattcggacagttaggtttaacagtttcttttcatacaaactaattaattggacatattccctcactttggaaagttctttctcaaacttctgagaaagaacatgagctgtgaattccaagcgttccactctgtccacgggaaaggtggtgtctggcagggaaacagagcactggcaggtcccacggtcatccacggagccggtgaaattggaaaacaactgggacacagaacctccgctgcctaagctgcggctggagctggagcccgacctggagctggagctgaagctggagctggagtcaacacctgggaaagagctgaagccggggctgggaattggaggtcccacatcccccaaatcccctgcagcttggccaaggaagaacagaagggctaggagaaatgagaggccgacctgcccgggcggccgctcga

SEQ ID NO: 454295 - DNA, 2825 bp, Homo sapiens
aggcccggcctctcatttctcctagcccttctgttcttccttggccaagctgcaggggatttgggggatgtgggacctccaattcccagccccggcttcagctctttcccaggtgttgactccagctccagcttcagctccagctccaggtcgggctccagctccagccgcagcttaggcagcggaggttctgtgtcccagttgttttccaatttcaccggctccgtggatgaccgtgggacctgccagtgctctgtttccctgccagacaccacctttcccgtggacagagtggaacgcttggaattcacagctcatgttctttctcagaagtttgagaaagaactttccaaagtgagggaatatgtccaattaattagtgtgtatgaaaagaaactgttaaacctaactgtccgaattgacatcatggagaaggataccatttcttacactgaactggacttcgagctgatcaaggtagaagtgaaggagatggaaaaactggtcatacagctgaaggagagttttggtggaagctcagaaattgttgaccagctggaggtggagataagaaatatgactctcttggtagagaagcttgagacactagacaaaaacaatgtccttgccattcgccgagaaatcgtggctctgaagaccaagctgaaagagtgtgaggcctctaaagatcaaaacacccctgtcgtccaccctcctcccactccagggagctgtggtcatggtggtgtggtgaacatcagcaaaccgtctgtggttcagctcaactggagagggttttcttatctatatggtgcttggggtagggattactctccccagcatccaaacaaaggactgtattgggtggcgccattgaatacagatgggagactgttggagtattatagactgtacaacacactggatgatttgctattgtatataaatgctcgagagttgcggatcacctatggccaaggtagtggtacagcagtttacaacaacaacatgtacgtcaacatgtacaacaccgggaatattgccagagttaacctgaccaccaacacgattgctgtgactcaaactctccctaatgctgcctataataaccgcttttcatatgctaatgttgcttggcaagatattgactttgctgtggatgagaatggattgtgggttatttattcaactgaagccagcactggtaacatggtgattagtaaactcaatgacaccacacttcaggtgctaaacacttggtataccaagcagtataaaccatctgcttctaacgccttcatggtatgtggggttctgtatgccacccgtactatgaacaccagaacagaagagattttttactattatgacacaaacacagggaaagagggcaaactagacattgtaatgcataagatgcaggaaaaagtgcagagcattaactataacccttttgaccagaaactttatgtctataacgatggttaccttctgaattatgatctttctgtcttgcagaagccccagtaagctgtttaggagttagggtgaaagagaaaatgtttgttgaaaaaatagtcttctccacttacttagatatctgcaggggtgtctaaaagtgtgttcattttgcagcaatgtttaggtgcatagttctaccacactagagatctaggacatttgtcttgatttggtgagttctcttgggaatcatctgcctcttcaggcgcattttgcaataaagtctgtctagggtgggattgtcagaggtctaggggcactgtgggcctagtgaagcctactgtgaggaggcttcactagaagccttaaattaggaattaaggaacttaaaactcagtatggcgtctagggattctttgtacaggaaatattgcccaatgactagtcctcatccatgtagcaccactaattcttccatgcctggaagaaacctggggacttagttaggtagattaatatctggagctcctcgagggaccaaatctccaacttttttttcccctcactagcacctggaatgatgctttgtatgtggcagataagtaaatttggcatgcttatatattctacatctgtaaagtgctgagttttatggagagaggcctttttatgcattaaattgtacatggcaaataaatcccagaaggatctgtagatgaggcacctgctttttcttttctctcattgtccaccttactaaaagtcagtagaatcttctacctcataacttccttccaaaggcagctcagaagattagaaccagacttactaaccaattccaccccccaccaacccccttctactgcctactttaaaaaaattaatagttttctatggaactgatctaagattagaaaaattaattttctttaatttcattatggacttttatttacatgactctaagactataagaaaatctgatggcagtgacaaagtgctagcatttattgttatctaataaagaccttggagcatatgtgcaacttatgagtgtatcagttgttgcatgtaatttttgcctttgtttaagcctggaacttgtaagaaaatgaaaatttaatttttttttctaggacgagctatagaaaagctattgagagtatctagttaatcagtgcagtagttggaaaccttgctggtgtatgtgatgtgcttctgtgcttttgaatgactttatcatctagtctttgtctatttttcctttgatgttcaagtcctagtctataggattggcagtttaaatgctttactcccccttttaaaataaatgattaaaatgtgctttgaaaaaagtcaaaaat

SEQ ID NO: 454296 - DNA, 1074 bp, Homo sapiens
  misc_feature (64)..(64): n is a, c, g, or t
cgcgccaattaggtgcatgagtaggtggctgcagtaatgttagcggttaggcgtacggccaggncatatggttgaatgagtaggctgatggtttcgttaaaactcagtatggcgtctagggattctttgtacaggaaatattgcccaatgactagtcctcatccatgtagcaccactaattcttccatgcctggaagaaacctggggacttagttaggtagattaatatctggagctcctcgagggaccaaatctccaacttttttttcccctcactagcacctggaatgatgctttgtatgtggcagataagtaaatttggcatgcttatatattctacatctgtaaagtgctgagttttatggagagaggcctttttatgcattaaattgtacatggcaaataaatcccagaaggatctgtagatgaggcacctgctttttcttttctctcattgtccaccttactaaaagtcagtagaatcttctacctcataacttccttccaaaggcagctcagaagattagaaccagacttactaaccaattccaccccccaccaacccccttctactgcctactttaaaaaaattaatagttttctatggaactgatctaagattagaaaaattaattttctttaatttcattatggacttttatttacatgactctaagactataagaaaatctgatggcagtgacaaagtgctagcatttattgttatctaataaagaccttggagcatatgtgcaacttatgagtgtatcagttgttgcatgtaatttttgcctttgtttaagcctggaacttgtaagaaaatgaaaatttaatttttttttctaggacgagctatagaaaagctattgagagtatctagttaatcagtgcagtagttggaaaccttgctggtgtatgtgatgtgcttctgtgcttttgaatgactttatcatctagtctttgtctatttttcctttgatgttcaagtcctagtctataggattggcagtttaaatgctttactcccccttttaaaataaatgattaaaatgtgctttgaaaaaagtcaaaaat

SEQ ID NO: 454297 - DNA, 864 bp, Homo sapiens
tccctctagtatgatccccatggatagcggatgaggaccaaatctccaacttttttttcccctcactagcacctggaatgatgctttgtatgtggcagataagtaaatttggcatgcttatatattctacatctgtaaagtgctgagttttatggagagaggcctttttatgcattaaattgtacatggcaaataaatcccagaaggatctgtagatgaggcacctgctttttcttttctctcattgtccaccttactaaaagtcagtagaatcttctacctcataacttccttccaaaggcagctcagaagattagaaccagacttactaaccaattccaccccccaccaacccccttctactgcctactttaaaaaaattaatagttttctatggaactgatctaagattagaaaaattaattttctttaatttcattatggacttttatttacatgactctaagactataagaaaatctgatggcagtgacaaagtgctagcatttattgttatctaataaagaccttggagcatatgtgcaacttatgagtgtatcagttgttgcatgtaatttttgcctttgtttaagcctggaacttgtaagaaaatgaaaatttaatttttttttctaggacgagctatagaaaagctattgagagtatctagttaatcagtgcagtagttggaaaccttgctggtgtatgtgatgtgcttctgtgcttttgaatgactttatcatctagtctttgtctatttttcctttgatgttcaagtcctagtctataggattggcagtttaaatgctttactcccccttttaaaataaatgattaaaatgtgctttgaaaaaagtcaaaaat

SEQ ID NO: 454298 - DNA, 1674 bp, Homo sapiens
cgaagcacattttaatcatttattttaaaagggggagtaaagcatttaaactgccaatcctatagactaggacttgaacatcaaaggaaaaatagacaaagactagatgataaagtcattcaaaagcacagaagcacatcacatacaccagcaaggtttccaactactgcactgattaactagatactctcaatagcttttctatagctcgtcctagaaaaaaaaattaaattttcattttcttacaagttccaggcttaaacaaaggcaaaaattacatgcaacaactgatacactcataagttgcacatatgctccaaggtctttattagataacaataaatgctagcactttgtcactgccatcagattttcttatagtcttagagtcatgtaaataaaagttcataatgaaattaaagaaaattaatttttctaatcttagatcagttccatagaaaactattaatttttttaaagtaggcagtagaagggggttggtggggggtggaattggttagtaagtctggttctaatcttctgagctgcctttggaaggaagttatgaggtagaagattctactgacttttagtaaggtggacaatgagagaaaagaaaaagcaggtgcctcatctacagatccttctgggatttatttgccatgtacaatttaatgcataaaaaggcctctctccataaaactcagcactttacagatgtagaatatataagcatgccaaatttacttatctgccacatacaaagcatcattccaggtgctagtgaggggaaaaaaaagttggagatttggtccctcgaggagctccagatattaatctacctaactaagtccccaggtttcttccaggcatggaagaattagtggtgctacatggatgaggactagtcattgggcaatatttcctgtacaaagaatccctatacgccatgctgagttttatggagagaggcctttttatgcattaaattgtacatggcaaataaatcccagaaggatctgtagatgaggcacctgctttttcttttctctcattgtccaccttactaaaagtcagtagaatcttctacctcataacttccttccaaaggcagctcagaagattagaaccagacttactaaccaattccaccccccaccaacccccttctactgcctactttaaaaaaattaatagttttctatggaactgatctaagattagaaaaattaattttctttaatttcattatggacttttatttacatgactctaagactataagaaaatctgatggcagtgacaaagtgctagcatttattgttatctaataaagaccttggagcatatgtgcaacttatgagtgtatcagttgttgcatgtaatttttgcctttgtttaagcctggaacttgtaagaaaatgaaaatttaatttttttttctaggacgagctatagaaaagctattgagagtatctagttaatcagtgcagtagttggaaaccttgctggtgtatgtgatgtgcttctgtgcttttgaatgactttatcatctagtctttgtctatttttcctttgatgttcaagtcctagtctataggattggcagtttaaatgctttactcccccttttaaaataaatgattaaaatgtgctttgaaaaaagtcaaaaat

SEQ ID NO: 454299 - DNA, 741 bp, Homo sapiens
acacagcgtacgaccatgactggcgaacttcgagcatcacaacccatagctaggatcatgatttcctatcaaagatcaggaattctcccaagaagaagcacctgctttttcttttctctcattgtccaccttactaaaagtcagtagaatcttctacctcataacttccttccaaaggcagctcagaagattagaaccagacttactaaccaattccaccccccaccaacccccttctactgcctactttaaaaaaattaatagttttctatggaactgatctaagattagaaaaattaattttctttaatttcattatggacttttatttacatgactctaagactataagaaaatctgatggcagtgacaaagtgctagcatttattgttatctaataaagaccttggagcatatgtgcaacttatgagtgtatcagttgttgcatgtaatttttgcctttgtttaagcctggaacttgtaagaaaatgaaaatttaatttttttttctaggacgagctatagaaaagctattgagagtatctagttaatcagtgcagtagttggaaaccttgctggtgtatgtgatgtgcttctgtgcttttgaatgactttatcatctagtctttgtctatttttcctttgatgttcaagtcctagtctataggattggcagtttaaatgctttactcccccttttaaaataaatgattaaaatgtgctttgaaaaaagtcaaaaat

SEQ ID NO: 454300 - DNA, 2320 bp, Homo sapiens
tcctgaacctcctggggcagttcacacgttccctggccactccctcttttcctacatgctggccatggggaaatcaccactgggcactataagaagcccctgggctctctgcagagccagcgctccagcttcagctccagctccaggtcgggctccagctccagccgcagcttaggcagcggaggttctgtgtcccagttgttttccaatttcaccggctccgtggatgaccgtgggacctgccagtgctctgtttccctgccagacaccacctttcccgtggacagagtggaacgcttggaattcacagctcatgttctttctcagaagtttgagaaagaactttccaaagtgagggaatatgtccaattaattagtgtgtatgaaaagaaactgttaaacctaactgtccgaattgacatcatggagaaggataccatttcttacactgaactggacttcgagctgatcaaggtagtggtacagcagtttacaacaacaacatgtacgtcaacatgtacaacaccgggaatattgccagagttaacctgaccaccaacacgattgctgtgactcaaactctccctaatgctgcctataataaccgcttttcatatgctaatgttgcttggcaagatattgactttgctgtggatgagaatggattgtgggttatttattcaactgaagccagcactggtaacatggtgattagtaaactcaatgacaccacacttcaggtgctaaacacttggtataccaagcagtataaaccatctgcttctaacgccttcatggtatgtggggttctgtatgccacccgtactatgaacaccagaacagaagagattttttactattatgacacaaacacagggaaagagggcaaactagacattgtaatgcataagatgcaggaaaaagtgcagagcattaactataacccttttgaccagaaactttatgtctataacgatggttaccttctgaattatgatctttctgtcttgcagaagccccagtaagctgtttaggagttagggtgaaagagaaaatgtttgttgaaaaaatagtcttctccacttacttagatatctgcaggggtgtctaaaagtgtgttcattttgcagcaatgtttaggtgcatagttctaccacactagagatctaggacatttgtcttgatttggtgagttctcttgggaatcatctgcctcttcaggcgcattttgcaataaagtctgtctagggtgggattgtcagaggtctaggggcactgtgggcctagtgaagcctactgtgaggaggcttcactagaagccttaaattaggaattaaggaacttaaaactcagtatggcgtctagggattctttgtacaggaaatattgcccaatgactagtcctcatccatgtagcaccactaattcttccatgcctggaagaaacctggggacttagttaggtagattaatatctggagctcctcgagggaccaaatctccaacttttttttcccctcactagcacctggaatgatgctttgtatgtggcagataagtaaatttggcatgcttatatattctacatctgtaaagtgctgagttttatggagagaggcctttttatgcattaaattgtacatggcaaataaatcccagaaggatctgtagatgaggcacctgctttttcttttctctcattgtccaccttactaaaagtcagtagaatcttctacctcataacttccttccaaaggcagctcagaagattagaaccagacttactaaccaattccaccccccaccaacccccttctactgcctactttaaaaaaattaatagttttctatggaactgatctaagattagaaaaattaattttctttaatttcattatggacttttatttacatgactctaagactataagaaaatctgatggcagtgacaaagtgctagcatttattgttatctaataaagaccttggagcatatgtgcaacttatgagtgtatcagttgttgcatgtaatttttgcctttgtttaagcctggaacttgtaagaaaatgaaaatttaatttttttttctaggacgagctatagaaaagctattgagagtatctagttaatcagtgcagtagttggaaaccttgctggtgtatgtgatgtgcttctgtgcttttgaatgactttatcatctagtctttgtctatttttcctttgatgttcaagtcctagtctataggattggcagtttaaatgctttactcccccttttaaaataaatgattaaaatgtgctttgaaaaaagtcaaaaat

SEQ ID NO: 454301 - DNA, 2745 bp, Homo sapiens
aggcccggcctctcatttctcctagcccttctgttcttccttggccaagctgcaggggatttgggggatgtgggacctccaattcccagccccggcttcagctctttcccaggtgttgactccagctccagcttcagctccagctccaggtcgggctccagctccagccgcagcttaggcagcggaggttctgtgtcccagttgttttccaatttcaccggctccgtggatgaccgtgggacctgccagtgctctgtttccctgccagacaccacctttcccgtggacagagtggaacgcttggaattcacagctcatgttctttctcagaagtttgagaaagaactttccaaagtgagggaatatgtccaattaattagtgtgtatgaaaagaaactgttaaacctaactgtccgaattgacatcatggagaaggataccatttcttacactgaactggacttcgagctgatcaaggtagaagtgaaggagatggaaaaactggtcatacagctgaaggagagttttggtggaagctcagaaattgttgaccagctggaggtggagataagaaatatgactctcttggtagagaagcttgagacactagacaaaaacaatgtccttgccattcgccgagaaatcgtggctctgaagaccaagctgaaagagtgtgaggcctctaaagatcaaaacacccctgtcgtccaccctcctcccactccagggagctgtggtcatggtggtgtggtgaacatcacatccaaacaaaggactgtattgggtggcgccattgaatacagatgggagactgttggagtattatagactgtacaacacactggatgatttgctattgtatataaatgctcgagagttgcggatcacctatggccaaggtagtggtacagcagtttacaacaacaacatgtacgtcaacatgtacaacaccgggaatattgccagagttaacctgaccaccaacacgattgctgtgactcaaactctccctaatgctgcctataataaccgcttttcatatgctaatgttgcttggcaagatattgactttgctgtggatgagaatggattgtgggttatttattcaactgaagccagcactggtaacatggtgattagtaaactcaatgacaccacacttcaggtgctaaacacttggtataccaagcagtataaaccatctgcttctaacgccttcatggtatgtggggttctgtatgccacccgtactatgaacaccagaacagaagagattttttactattatgacacaaacacagggaaagagggcaaactagacattgtaatgcataagatgcaggaaaaagtgcagagcattaactataacccttttgaccagaaactttatgtctataacgatggttaccttctgaattatgatctttctgtcttgcagaagccccagtaagctgtttaggagttagggtgaaagagaaaatgtttgttgaaaaaatagtcttctccacttacttagatatctgcaggggtgtctaaaagtgtgttcattttgcagcaatgtttaggtgcatagttctaccacactagagatctaggacatttgtcttgatttggtgagttctcttgggaatcatctgcctcttcaggcgcattttgcaataaagtctgtctagggtgggattgtcagaggtctaggggcactgtgggcctagtgaagcctactgtgaggaggcttcactagaagccttaaattaggaattaaggaacttaaaactcagtatggcgtctagggattctttgtacaggaaatattgcccaatgactagtcctcatccatgtagcaccactaattcttccatgcctggaagaaacctggggacttagttaggtagattaatatctggagctcctcgagggaccaaatctccaacttttttttcccctcactagcacctggaatgatgctttgtatgtggcagataagtaaatttggcatgcttatatattctacatctgtaaagtgctgagttttatggagagaggcctttttatgcattaaattgtacatggcaaataaatcccagaaggatctgtagatgaggcacctgctttttcttttctctcattgtccaccttactaaaagtcagtagaatcttctacctcataacttccttccaaaggcagctcagaagattagaaccagacttactaaccaattccaccccccaccaacccccttctactgcctactttaaaaaaattaatagttttctatggaactgatctaagattagaaaaattaattttctttaatttcattatggacttttatttacatgactctaagactataagaaaatctgatggcagtgacaaagtgctagcatttattgttatctaataaagaccttggagcatatgtgcaacttatgagtgtatcagttgttgcatgtaatttttgcctttgtttaagcctggaacttgtaagaaaatgaaaatttaatttttttttctaggacgagctatagaaaagctattgagagtatctagttaatcagtgcagtagttggaaaccttgctggtgtatgtgatgtgcttctgtgcttttgaatgactttatcatctagtctttgtctatttttcctttgatgttcaagtcctagtctataggattggcagtttaaatgctttactcccccttttaaaataaatgattaaaatgtgctttgaaaaaagtcaaaaat

SEQ ID NO: 454302 - DNA, 1236 bp, Homo sapiens
  misc_feature (282)..(282): n is a, c, g, or t
  misc_feature (537)..(537): n is a, c, g, or t
  misc_feature (558)..(558): n is a, c, g, or t
  misc_feature (586)..(586): n is a, c, g, or t
  misc_feature (637)..(637): n is a, c, g, or t
  misc_feature (647)..(647): n is a, c, g, or t
  misc_feature (658)..(658): n is a, c, g, or t
  misc_feature (665)..(665): n is a, c, g, or t
  misc_feature (667)..(667): n is a, c, g, or t
  misc_feature (676)..(676): n is a, c, g, or t
  misc_feature (740)..(740): n is a, c, g, or t
  misc_feature (769)..(769): n is a, c, g, or t
  misc_feature (1095)..(1095): n is a, c, g, or t
tttaataataattctgtgttgcttctgagattaataattgattaattcatagtcaggaatctttgtaaaaaggaaaccaattacttttggctaccacttttacatggtcacctacaggagagaggaggtgctgcaagactctctggtagaaaaatgaagagggtcctggtactactgcttgctgtggcagttctgggacgactgcgtttagtacgcagagtgccgcggaagtatatgagaagagcaagtaacagctcgtgctcagagacacttcgtgcccantcgtgaggatagacggaggagctctcaagcatcatctgctctacgttagtccctagtactaggtgacgaacaagtattccacaagctgcgtcggacgtctgtagacaccagagtcacgcctaatcttttgctgacacggaacgtctgtcatcacgttgagcggaatgccctgcgtgatgcgggacaggtggcatgacgccatggacatgcatattggagcgaccagagaaccgtgcagacagctggtacatagcncacaggtgcgctagtagcaanatgtaagattacatgcccaattgcgccncggatgtacaactctcagggggcactctgggcgtggtatgttggcttgggncacaccaganatgtacggcgnccctagngnagagctganacatgactactaggcatattggactttgtctacatgcagatacgaacacaagtcacaagcgagngtacagtatctcacatgagcgcataacgnatgcgcatacgcactagtcgagaaactggactcgcatacacttcgtagtcgcaagcgtcagtttccacggcgaagacgcactcaccaaatagtgcacactcatcgccttacaattcgaactgtggactagatgcgagccagttatttgcgcacggtacatgtgactgtgagcgaatggctctcatactggtgcgcactttagaagatacatcgtttgaccatccagacggaggtctaatcattgtggctgagtggtgtcacgcgagtaccccatgactcgcttaatcatacttgacggaaggcaccgagacttgtcattgacattntctgcacaacgcgaagcacgacctgccaagtccttcacaaccattcttactccacatgtcttacacccactacttttacgacatcacgcagtcctacggctgcaaccaagtcattggctagactatattggagcgaaggac

SEQ ID NO: 454303 - DNA, 323 bp, Homo sapiens
  misc_feature (11)..(11): n is a, c, g, or t
  misc_feature (24)..(24): n is a, c, g, or t
acgtccatggntgttttttcttgncaacagtcttcaaacttagaattctttgtggataaattgtcacagagttttactgtgtgttcagggattgatgctgaattgaagaatatcctgtagtcctgaagcatgtttattaactttgaccagagttggagccacccaggggaatgatctctgatgacctaacctaagcaaaaccactgagcttctgggaagacaactaggatactttctactttttctagctacaatatcttcatacaatgacaagtatgatgatttgctatcaaaataaattgaaatataatgcaaaccataaa

SEQ ID NO: 454304 - DNA, 1714 bp, Homo sapiens
tttaataataattctgtgttgcttctgagattaataattgattaattcatagtcaggaatctttgtaaaaaggaaaccaattacttttggctaccacttttacatggtcacctacaggagagaggaggtgctgcaagactctctggtagaaaaatgaagagggtcctggtactactgcttgctgtggcatttggacatgctttagagagaggccgggattatgaaaagaataaagtctgcaaggaattctcccatctgggaaaggaggacttcacatctctgaagttgtctccttgaccgaagcctgctgtgcggaaggggctgaccctgactgctatgacaccaggacctcagcactgtctgccaagtcctgtgaaagtaattctccattccccgttcacccaggcactgctgagtgctgcaccaaagagggcctggaacgaaagctctgcatggctgctctgaaacaccagccacaggaattccctacctacgtggaacccacaaatgatgaaatctgtgaggcgttcaggaaagatccaaaggaatatgctaatcaatttatgtgggaatattccactaattacggacaagctcctctgtcacttttagtcagttacaccaagagttatctttctatggtagggtcctgctgtacctctgcaagcccaactgtatgctttttgaaagagagactccagcttaaacatttatcacttctcaccactctgtcaaatagagtctgctcacaatatgctgcttatggggagaagaaatcaaggctcagcaatctcataaagttagcccaaaaagtgcctactgctgatctggaggatgttttgccactagctgaagatattactaacatcctctccaaatgctgtgagtctgcctctgaagattgcatggccaaagagctgcctgaacacacagtaaaactctgtgacaatttatccacaaagaattctaagtttgaagactgttgtcaagaaaaaacagccatggacgtttttgtgtgcacttacttcatgccagctgcccaactccccgagcttccagatgtagagttgcccacaaacaaagatgtgtgtgatccaggaaacaccaaagtcatggataagtatacatttgaactaagcagaaggactcatcttccggaagtattcctcagtaaggtacttgagccaaccctaaaaagccttggtgaatgctgtgatgttgaagactcaactacctgttttaatgctaagggccctctactaaagaaggaactatcttctttcattgacaagggacaagaactatgtgcagattattcagaaaatacatttactgagtacaagaaaaaactggcagagcgactaaaagcaaaattgcctgatgccacacccacggaactggcaaagctggttaacaagcgctcagactttgcctccaactgctgttccataaactcacctcctctttactgtgattcagagattgatgctgaattgaagaatatcctgtagtcctgaagcatgtttattaactttgaccagagttggagccacccaggggaatgatctctgatgacctaacctaagcaaaaccactgagcttctgggaagacaactaggatactttctactttttctagctacaatatcttcatacaatgacaagtatgatgatttgctatcaaaataaattgaaatataatgcaaaccataaa

SEQ ID NO: 454305 - DNA, 2088 bp, Homo sapiens
tttaataataattctgtgttgcttctgagattaataattgattaattcatagtcaggaatctttgtaaaaaggaaaccaattacttttggctaccacttttacatggtcacctacaggagagaggaggtgctgcaagactctctggtagaaaaatgaagagggtcctggtactactgcttgctgtggcatttggacatgctttagagagaggccgggattatgaaaagaataaagtctgcaaggaattctcccatctgggaaaggaggacttcacatctctgtcactagtcctgtacagtagaaaatttcccagtggcacgtttgaacaggtcagccaacttgtgaaggaagttgtctccttgaccgaagcctgctgtgcggaaggggctgaccctgactgctatgacaccaggacctcagcactgtctgccaagtcctgtgaaagtaattctccattccccgttcacccaggcactgctgagtgctgcaccaaagagggcctggaacgaaagctctgcatggctgctctgaaacaccagccacaggaattccctacctacgtggaacccacaaatgatgaaatctgtgaggcgttcaggaaagatccaaaggaatatgctaatcaatttatgtgggaatattccactaattacggacaagctcctctgtcacttttagtcagttacaccaagagttatctttctatggtagggtcctgctgtacctctgcaagcccaactgtatgctttttgaaagagagactccagcttaaacatttatcacttctcaccactctgtcaaatagagtctgctcacaatatgctgcttatggggagaagaaatcaaggctcagcaatctcataaagttagcccaaaaagtgcctactgctgatctggaggatgttttgccactagctgaagatattactaacatcctctccaaatgctgtgagtctgcctctgaagattgcatggccaaagagctgcctgaacacacagtaaaactctgtgacaatttatccacaaagaattctaagtttgaagactgttgtcaagaaaaaacagccatggacgtttttgtgtgcacttacttcatgccagctgcccaactccccgagcttccagatgtagagttgcccacaaacaaagatgtgtgtgatccaggaaacaccaaagtcatggataagtatacatttgaactaagcagaaggactcatcttccggaagtattcctcagtaaggtacttgagccaaccctaaaaagccttggtgaatgctgtgatgttgaagactcaactacctgttttaatgctaagggccctctactaaagaaggaactatcttctttcattgacaagggacaagaactatgtgcagattattcagaaaatacatttactgagtacaagaaaaaactggcagagcgactaaaagcaaaattgcctgatgccacacccacggaactggcaaagctggttaacaagcgctcagactttgcctccaactgctgttccataaactcacctcctctttactgtgattcagagattgatgctgaattgaagaatatcctgtagtcctgaagcatgtttattaactttgaccagagttggagccacccaggggaatgatctctgatgacctaacctaagcaaaaccactgagcttctgggaagacaactaggatactttctactttttctagctacaatatcttcatacaatgacaagtatgatgatttgctatcaaaataaattgaaatataatgcaaaccataaaaaaaaaaacaaaacaaacaaacaaaactgtgtgggcgcactagggacccagaaaaagcttccgaagaacacacgggaggagacacagggcccaaaagatacgcgaaccgtggcacaacagcaggctcccaagagaaaacaccggggcacaagacagaggcgcctgggatctccccgccaagataaaagagccccgcggggacaacacagacggttcctgtaacaacatcacgaagggcacgtggcgaagaccacacaggggaccgtaacacaccaaggcgaccccagcgagagacagaatcacaaac

SEQ ID NO: 454306 - DNA, 1752 bp, Homo sapiens
tataaatcattcgtgttggcgctctggcacagaaggtgtgtgaacatggtcttagctgtatcctaggacgatcctgcgttgcatgcatcatcatgtcgtctgtgtggatgtgctactatccgaaataatagacatatcgaccacgagcagggaagccgatcgtgactgagacataaatcgcagtagtgagaggtatctgcatgcgtcatctagcgtggatctagtcactcacggattctctggtcgagcatctcactgtcacaagttagcagccatcgcccctgatggcacgtttgaacaggtcagccaacttgtgaaggaagttgtctccttgaccgaagcctgctgtgcggaaggggctgaccctgactgctatgacaccaggacctcagcactgtctgccaagtcctgtgaaagtaattctccattccccgttcacccaggcactgctgagtgctgcaccaaagagggcctggaacgaaagctctgcatggctgctctgaaacaccagccacaggaattccctacctacgtggaacccacaaatgatgaaatctgtgaggcgttcaggaaagatccaaaggaatatgctaatcaatttatgtgggaatattccactaattacggacaagctcctctgtcacttttagtcagttacaccaagagttatctttctatggtagggtcctgctgtacctctgcaagcccaactgtatgctttttgaaagagagactccagcttaaacatttatcacttctcaccactctgtcaaatagagtctgctcacaatatgctgcttatggggagaagaaatcaaggctcagcaatctcataaagttagcccaaaaagtgcctactgctgatctggaggatgttttgccactagctgaagatattactaacatcctctccaaatgctgtgagtctgcctctgaagattgcatggccaaagagctgcctgaacacacagtaaaactctgtgacaatttatccacaaagaattctaagtttgaagactgttgtcaagaaaaaacagccatggacgtttttgtgtgcacttacttcatgccagctgcccaactccccgagcttccagatgtagagttgcccacaaacaaagatgtgtgtgatccaggaaacaccaaagtcatggataagtatacatttgaactaagcagaaggactcatcttccggaagtattcctcagtaaggtacttgagccaaccctaaaaagccttggtgaatgctgtgatgttgaagactcaactacctgttttaatgctaagggccctctactaaagaaggaactatcttctttcattgacaagggacaagaactatgtgcagattattcagaaaatacatttactgagtacaagaaaaaactggcagagcgactaaaagcaaaattgcctgatgccacacccacggaactggcaaagctggttaacaagcgctcagactttgcctccaactgctgttccataaactcacctcctctttactgtgattcagagattgatgctgaattgaagaatatcctgtagtcctgaagcatgtttattaactttgaccagagttggagccacccaggggaatgatctctgatgacctaacctaagcaaaaccactgagcttctgggaagacaactaggatactttctactttttctagctacaatatcttcatacaatgacaagtatgatgatttgctatcaaaataaattgaaatataatgcaaaccataaa

SEQ ID NO: 454307 - DNA, 1212 bp, Homo sapiens
aagaagaccgaccccagcggccccgccgccccccccgcccccccccccaggactactatttatgtgggaatattccactaattacggacaagctcctctgtcacttttagtcagttacaccaagagttatctttctatggtagggtcctgctgtacctctgcaagcccaactgtatgctttttgaaagagagactccagcttaaacatttatcacttctcaccactctgtcaaatagagtctgctcacaatatgctgcttatggggagaagaaatcaaggctcagcaatctcataaagttagcccaaaaagtgcctactgctgatctggaggatgttttgccactagctgaagatattactaacatcctctccaaatgctgtgagtctgcctctgaagattgcatggccaaagagctgcctgaacacacagtaaaactctgtgacaatttatccacaaagaattctaagtttgaagactgttgtcaagaaaaaacagccatggacgtttttgtgtgcacttacttcatgccagctgcccaactccccgagcttccagatgtagagttgcccacaaacaaagatgtgtgtgatccaggaaacaccaaagtcatggataagtatacatttgaactaagcagaaggactcatcttccggaagtattcctcagtaaggtacttgagccaaccctaaaaagccttggtgaatgctgtgatgttgaagactcaactacctgttttaatgctaagggccctctactaaagaaggaactatcttctttcattgacaagggacaagaactatgtgcagattattcagaaaatacatttactgagtacaagaaaaaactggcagagcgactaaaagcaaaattgcctgatgccacacccacggaactggcaaagctggttaacaagcgctcagactttgcctccaactgctgttccataaactcacctcctctttactgtgattcagagattgatgctgaattgaagaatatcctgtagtcctgaagcatgtttattaactttgaccagagttggagccacccaggggaatgatctctgatgacctaacctaagcaaaaccactgagcttctgggaagacaactaggatactttctactttttctagctacaatatcttcatacaatgacaagtatgatgatttgctatcaaaataaattgaaatataatgcaaaccataaa

SEQ ID NO: 454308 - DNA, 1728 bp, Homo sapiens
tttaataataattctgtgttgcttctgagattaataattgattaattcatagtcaggaatctttgtaaaaaggaaaccaattacttttggctaccacttttacatggtcacctacaggagagaggaggtgctgcaagactctctggtagaaaaatgaagagggtcctggtactactgcttgctgtggcatttggacatgctttagagagaggccgggattatgaaaagaataaagtctgcaaggaattctcccatctgggaaaggaggacttcacatctctgtcactagtcctgtacagtagaaaatttcccagtggcacgtttgaacaggtcagccaacttgtgaaggaagttgtctccttgaccgaagcctgctgtgcggaaggggctgaccctgactgctatgacaccaggacctcagcactgtctgccaagtcctgtgaaagtaattctccattccccgttcacccaggcactgctgagtgctgcaccaaagagggcctggaacgaaagctctgcatggctgctctgaaacaccagccacaggaattccctacctacgtggaacccacaaatgatgaaatctgtgaggcgttcaggaaagatccaaaggaatatgctaatcatcagttacaccaagagttatctttctatggtagggtcctgctgtacctctgcaagcccaactgtatgctttttgaaagagagactccagcttaaacatttatcacttctcaccactctgtcaaatagagtctgctcacaatatgctgcttatggggagaagaaatcaaggctcagcaatctcataaagttagcccaaaaagtgcctactgctgatctggaggatgttttgccactagctgaagatattactaacatcctctccaaatgctgtgagtctgcctctgaagattgcatggccaaagagctgcctgaacacacagtaaaactctgtgacaatttatccacaaagaattctaagtttgaagactgttgtcaagaaaaaacagccatggacgtttttgtgtgcacttacttcatgccagctgcccaactccccgagcttccagatgtagagttgcccacaaacaaagatgtgtgtgatccaggaaacaccaaagtcatggataagtatacatttgaactaagcagaaggactcatcttccggaagtattcctcagtaaggtacttgagccaaccctaaaaagccttggtgaatgctgtgatgttgaagactcaactacctgttttaatgctaagggccctctactaaagaaggaactatcttctttcattgacaagggacaagaactatgtgcagattattcagaaaatacatttactgagtacaagaaaaaactggcagagcgactaaaagcaaaattgcctgatgccacacccacggaactggcaaagctggttaacaagcgctcagactttgcctccaactgctgttccataaactcacctcctctttactgtgattcagagattgatgctgaattgaagaatatcctgtagtcctgaagcatgtttattaactttgaccagagttggagccacccaggggaatgatctctgatgacctaacctaagcaaaaccactgagcttctgggaagacaactaggatactttctactttttctagctacaatatcttcatacaatgacaagtatgatgatttgctatcaaaataaattgaaatataatgcaaaccataaa

SEQ ID NO: 454309 - DNA, 1727 bp, Homo sapiens
tttaataataattctgtgttgcttctgagattaataattgattaattcatagtcaggaatctttgtaaaaaggaaaccaattacttttggctaccacttttacatggtcacctacaggagagaggaggtgctgcaagactctctggtagaaaaatgaagagggtcctggtactactgcttgctgtggcatttggacatgctttagagagaggccgggattatgaaaagaataaagtctgcaaggaattctcccatctgggaaaggaggacttcacatctctgtcactagtcctgtacagtagaaaatttcccagtggcacgtttgaacaggtcagccaacttgtgaaggaagttgtctccttgaccgaagcctgctgtgcggaaggggctgaccctgactgctatgacaccaggacctcagcactgtctgccaagtcctgtgaaagtaattctccattccccgttcacccaggcactgctgagtgctgcaccaaagagggcctggaacgaaagctctgcatggctgctctgaaacaccagccacaggaattccctacctacgtggaacccacaaatgatgaaatctgtgaggcgttcaggaaagatccaaaggaatatgctaatcaatttatgtgggaatattccactaattacggacaagctcctctgtcacttttagtcagttacaccaagagttatctttctatggtagggtcctgctgtacctctgcaagcccaactgtatgctttttgaaagagagactccagcttaaacatttatcacttctcaccactctgtcaaatagagtctgctcacaatatgctgcttatggggagaagaaatcaaggctcagcaatctcataaagttagcccaaaaagtgcctactgctgatctggaggatgttttgccactagctgaagatattactaacatcctctccaaatgctgtgagtctgcctctgaagattgcatggccaaagagctgcctgaacacacagtaaaactctgtgacaatttatccacaaagaattctaagtttgaagactgttgtcaagaacccgagcttccagatgtagagttgcccacaaacaaagatgtgtgtgatccaggaaacaccaaagtcatggataagtatacatttgaactaagcagaaggactcatcttccggaagtattcctcagtaaggtacttgagccaaccctaaaaagccttggtgaatgctgtgatgttgaagactcaactacctgttttaatgctaagggccctctactaaagaaggaactatcttctttcattgacaagggacaagaactatgtgcagattattcagaaaatacatttactgagtacaagaaaaaactggcagagcgactaaaagcaaaattgcctgatgccacacccacggaactggcaaagctggttaacaagcgctcagactttgcctccaactgctgttccataaactcacctcctctttactgtgattcagagattgatgctgaattgaagaatatcctgtagtcctgaagcatgtttattaactttgaccagagttggagccacccaggggaatgatctctgatgacctaacctaagcaaaaccactgagcttctgggaagacaactaggatactttctactttttctagctacaatatcttcatacaatgacaagtatgatgatttgctatcaaaataaattgaaatataatgcaaaccataaa

SEQ ID NO: 454310 - DNA, 1735 bp, Homo sapiens
tttaataataattctgtgttgcttctgagattaataattgattaattcatagtcaggaatctttgtaaaaaggaaaccaattacttttggctaccacttttacatggtcacctacaggagagaggaggtgctgcaagactctctggtagaaaaatgaagagggtcctggtactactgcttgctgtggcatttggacatgctttagagagaggccgggattatgaaaagaataaagtctgcaaggaattctcccatctgggaaaggaggacttcacatctctgtcactagtcctgtacagtagaaaatttcccagtggcacgtttgaacaggtcagccaacttgtgaaggaagttgtctccttgaccgaagcctgctgtgcggaaggggctgaccctgactgctatgacaccaggacctcagcactgtctgccaagtcctgtgaaagtaattctccattccccgttcacccaggcactgctgagtgctgcaccaaagagggcctggaacgaaagctctgcatggctgctctgaaacaccagccacaggaattccctacctacgtggaacccacaaatgatgaaatctgtgaggcgttcaggaaagatccaaaggaatatgctaatcaatttatgtgggaatattccactaattacggacaagctcctctgtcacttttagtcagttacaccaagagttatctttctatggtagggtcctgctgtacctctgcaagcccaactgtatgctttttgaaagagagactccagcttaaacatttatcacttctcaccactctgtcaaatagagtctgctcacaatatgctgcttatggggagaagaaatcaaggctcagcaatctcataaagttagcccaaaaagtgcctactgctgatctggaggatgttttgccactagctgaagatattactaacatcctctccaaatgctgtgagtctgcctctgaagattgcatggccaaagagctgcctgaacacacagtaaaactctgtgacaatttatccacaaagaattctaagtttgaagactgttgtcaagaaaaaacagccatggacgtttttgtgtgcacttacttcatgccagctgcccaactccccgagcttccagatgtagagttgcccacaaacaaagatgtgtgtgatccaggaaacaccaaagtcatggataagtatacatttgaactaagcagaaggactcatcttccggaagtattcctcagtaaggtacttgagccaaccctaaaaagccttggtgaatgctgtgatgttgaagactcaactacctgttttaatgctaagggccctctactaaagaaggaactatcttctttcattgacaagggacaagaactatgtgcagattattcagaaaatacatttactgagtacaagaaaaagaactggcaaagctggttaacaagcgctcagactttgcctccaactgctgttccataaactcacctcctctttactgtgattcagagattgatgctgaattgaagaatatcctgtagtcctgaagcatgtttattaactttgaccagagttggagccacccaggggaatgatctctgatgacctaacctaagcaaaaccactgagcttctgggaagacaactaggatactttctactttttctagctacaatatcttcatacaatgacaagtatgatgatttgctatcaaaataaattgaaatataatgcaaaccataaa

SEQ ID NO: 454311 - DNA, 1648 bp, Homo sapiens
tttaataataattctgtgttgcttctgagattaataattgattaattcatagtcaggaatctttgtaaaaaggaaaccaattacttttggctaccacttttacatggtcacctacaggagagaggaggtgctgcaagactctctggtagaaaaatgaagagggtcctggtactactgcttgctgtggcatttggacatgctttagagagaggccgggattatgaaaagaataaagtctgcaaggaattctcccatctgggaaaggaggacttcacatctctgtcactagtcctgtacagtagaaaatttcccagtggcacgtttgaacaggtcagccaacttgtgaaggaagttgtctccttgaccgaagcctgctgtgcggaaggggctgaccctgactgctatgacaccaggacctcagcactgtctgccaagtcctgtgaaagtaattctccattccccgttcacccaggcactgctgagtgctgcaccaaagagggcctggaacgaaagctctgcatggctgctctgaaacaccagccacaggaattccctacctacgtggaacccacaaatgatgaaatctgtgaggcgttcaggaaagatccaaaggaatatgctaatcaatttatgtgggaatattccactaattacggacaagctcctctgtcacttttagtcagttacaccaagagttatctttctatggtagggtcctgctgtacctctgcaagcccaactgtatgctttttgaaagagagactccagcttaaacatttatcacttctcaccactctgtcaaatagagtctgctcacaatatgctgcttatggggagaagaaatcaaggctcagcaatctcataaagttagcccaaaaagtgcctactgctgatctggaggatgttttgccactagctgaagatattactaacatcctctccaaatgctgtgagtctgcctctgaagattgcatggccaaagagctgcctgaacacacagtaaaactctgtgacaatttatccacaaagaattctaagtttgaagactgttgtcaagaaaaaacagccatggacgtttttgtgtgcacttacttcatgccagctgcccaactccccgagcttccagatgtagagttgcccacaaacaaagatgtgtgtgatccaggaaacaccaaagtcatggataagtatacatttgaactaagcagaaggactcatcttccggaagtattcctcagtaaggtacttgagccaaccctaaaaagccttggtgaatgctgtgatgttgaagactcaactacctgttttaatgctaagggccctctactaaagaaggaactatcttctttcattgacaagggacaagaactatgtgcagattattcagaaaatacatttactgagtacaagaaaaaattgatgctgaattgaagaatatcctgtagtcctgaagcatgtttattaactttgaccagagttggagccacccaggggaatgatctctgatgacctaacctaagcaaaaccactgagcttctgggaagacaactaggatactttctactttttctagctacaatatcttcatacaatgacaagtatgatgatttgctatcaaaataaattgaaatataatgcaaaccataaa

SEQ ID NO: 454312 - DNA, 1239 bp, Homo sapiens
tttaataataattctgtgttgcttctgagattaataattgattaattcatagtcaggaatctttgtaaaaaggaaaccaattacttttggctaccacttttacatggtcacctacaggagagaggaggtgctgcaagactctctggtagaaaaatgaagagggtcctggtactactgcttgctgtggcatttggacatgctttagagagaggccgggattatgaaaagaataaagtctgcaaggaattctcccatctgggaaaggaggacttcacatctctgtcactagtcctgtacagtagaaaatttcccagtggcacgtttgaacaggtcagccaacttgtgaaggaagttgtctccttgaccgaagcctgctgtgcggaaggggctgaccctgactgctatgacaccaggacctcagcactgtctgccaagtcctgtgaaagtaattctccattccccgttcacccaggcactgctgagtgctgcaccaaagagggcctggaacgaaagctctgcatggctgctctgaaacaccagccacaggaattccctacctacgtggaacccacaaatgatgaaatctgtgaggcgttcaggaaagatccaaaggaatatgctaatcaatttatgtgggaatattccactaattacggacaagctcctctgtcacttttagtcagttacaccaagagttatctttctatggtagggtcctgctgtacctctgcaagcccaactgtatgctttttgaaagagagactccagcttaaacatttatcacttctcaccactctgtcaaatagagtctgctcacaatatgctgcttatggggagaagaaatcaaggctcagcaatctcataaagttagcccaaaaagtgcctactgctgatctggaggatgttttgccactagctgaagatattactaacatcctctccaaatgctgtgagtctgcctctgaagattgcatggccaaagagctgcctgaacacacagtaaaactctgtgacaatttatccacaaagaattctaagtttgaagactgttgtcaagaaaaaacagccatggacgtttttgtgtgcacttacttcatgccagctgcccaactccccgagcttccagatgtagagttgcccacaaacaaagatgtgtgtgatccaggaaacaccaaagtcatggataagtatacatttgaactataagcaggggggggggccccccttttttcccccccc

SEQ ID NO: 454313 - DNA, 1184 bp, Homo sapiens
tttaataataattctgtgttgcttctgagattaataattgattaattcatagtcaggaatctttgtaaaaaggaaaccaattacttttggctaccacttttacatggtcacctacaggagagaggaggtgctgcaagactctctggtagaaaaatgaagagggtcctggtactactgcttgctgtggcatttggacatgctttagagagaggccgggattatgaaaagaataaagtctgcaaggaattctcccatctgggaaaggaggacttcacatctctgtcactagtcctgtacagtagaaaatttcccagtggcacgtttgaacaggtcagccaacttgtgaaggaagttgtctccttgaccgaagcctgctgtgcggaaggggctgaccctgactgctatgacaccaggacctcagcactgtctgccaagtcctgtgaaagtaattctccattccccgttcacccaggcactgctgagtgctgcaccaaagagggcctggaacgaaagctctgcatggctgctctgaaacaccagccacaggaattccctacctacgtggaacccacaaatgatgaaatctgtgaggcgttcaggaaagatccaaaggaatatgctaatcaatttatgtgggaatattccactaattacggacaagctcctctgtcacttttagtcagttacaccaagagttatctttctatggtagggtcctgctgtacctctgcaagcccaactgtatgctttttgaaagagagactccagcttaaacatttatcacttctcaccactctgtcaaatagagtctgctcacaatatgctgcttatggggagaagaaatcaaggctcaggtaaagattaagtgctattgtcatatttagatgtttggttctgcactgtctatccataatattagggtttttttaagaagctgtctatattgaaagatataaaatagacttttcagctccaataatctccaaaaatctggccaaattctcgttttcttttctctatacagattatgaaaaataaggaaaaagtttatgtcataaaacatgagatttgcttttaatcaatcttttccatatagttgaccactagaaaatattttttcagtgttcatattagcatatgttacaaacaaaaaagcaaaacaagaacaaaaacaaaccaaaaaa

SEQ ID NO: 454314 - DNA, 410 bp, Homo sapiens
aaaaaggcattaagctggtatgaggtcctgtaaaggaaatattctttaaggaatttgaaatttaaaactgaagagaaggtgaaaggttaggataaaatagaagaggtactcttccattttgaaataatgagcaaatgaaagaagactggacttccaattcagcagcgatttgtatgtttatttttatgatctcgaagaggcatgtttcactttctgatctcaaattgactattctataccacaggtatagaattttcttgagacaggcaagtatttctattttcatttttattgtaaaagatctgaaatggctattattttgcattagaaatttgtataaaataaatacatgtagtaagaccttacatttaaatggtttttcagactggcagagcgactaaaagcaaaat

SEQ ID NO: 454315 - DNA, 398 bp, Homo sapiens
tggcaaagctggttaacaagcgctcagactttgcctccaactgctgttccataaactcacctcctctttactgtgattcagaggtaggaaaatgtaaccctccacttaacatggcagaatcttttaagaacgtatgcactccaatctactcatttctttcctgttattgagatgccattatgtgacaggcttttcctggtgttattgtaacttggctgtctttgcaatgaaagtaagaaacataactgatttcatgctatgctcatttaaaagcaagttgaggtagttgtaaaacttaggaaattttatactttttttaagaaacaaaagagtctgtgaacacaggcaacaaagtatgtgtagtgttttacaaattgtgagttgtaacctagtaacag

SEQ ID NO: 454316 - DNA, 683 bp, Homo sapiens
ttcaagattttgtataccttctgcatgatctagtagcctacaaatgaaatacttcataagttatataacattcttttttcattatcagattgatgctgaattgaagaatatcctgtagtcctgaagcatgtttattaactttggtaagtatattttataaatgcaggaccaacggatccagcattgtaggatgtattttaaatatcaaagaatgggaaggagactttaataaatttattcttatctgttcaaactcattttacagatgagaatattaagcaccgagaaaagttaaagagcttacacttatacaagagcagccaatttctgatatatgtaagactagaatccaggtttactggtcccctgccttgtgcttcatccatcataatctcacatgtaacataatgataccgtaaagaacatttaaaggattctgatgcacttcaataggaagaactctgagtttaaagacagggctcatcaagtcttaaaaataacacagcaaggaccttaggaggaaagggacattcttattcaaatgaaaacaatactgttgaaatattattacttgcttttttcagtcactatattttcacctattaaaaaatgccagatgaagatattaagaacataaaatagtttattccaacgtaagttcacatcttaaactgaagagcacc

SEQ ID NO: 454317 - DNA, 1781 bp, Homo sapiens
tttaataataattctgtgttgcttctgagattaataattgattaattcatagtcaggaatctttgtaaaaaggaaaccaattacttttggctaccacttttacatggtcacctacaggagagaggaggtgctgcaagactctctggtagaaaaatgaagagggtcctggtactactgcttgctgtggcatttggacatgctttagagagaggccgggattatgaaaagaataaagtctgcaaggaattctcccatctgggaaaggaggacttcacatctctgtcactagtcctgtacagtagaaaatttcccagtggcacgtttgaacaggtcagccaacttgtgaaggaagttgtctccttgaccgaagcctgctgtgcggaaggggctgaccctgactgctatgacaccaggacctcagcactgtctgccaagtcctgtgaaagtaattctccattccccgttcacccaggcactgctgagtgctgcaccaaagagggcctggaacgaaagctctgcatggctgctctgaaacaccagccacaggaattccctacctacgtggaacccacaaatgatgaaatctgtgaggcgttcaggaaagatccaaaggaatatgctaatcaatttatgtgggaatattccactaattacggacaagctcctctgtcacttttagtcagttacaccaagagttatctttctatggtagggtcctgctgtacctctgcaagcccaactgtatgctttttgaaagagagactccagcttaaacatttatcacttctcaccactctgtcaaatagagtctgctcacaatatgctgcttatggggagaagaaatcaaggctcagcaatctcataaagttagcccaaaaagtgcctactgctgatctggaggatgttttgccactagctgaagatattactaacatcctctccaaatgctgtgagtctgcctctgaagattgcatggccaaagagctgcctgaacacacagtaaaactctgtgacaatttatccacaaagaattctaagtttgaagactgttgtcaagaaaaaacagccatggacgtttttgtgtgcacttacttcatgccagctgcccaactccccgagcttccagatgtagagttgcccacaaacaaagatgtgtgtgatccaggaaacaccaaagtcatggataagtatacatttgaactaagcagaaggactcatcttccggaagtattcctcagtaaggtacttgagccaaccctaaaaagccttggtgaatgctgtgatgttgaagactcaactacctgttttaatgctaagggccctctactaaagaaggaactatcttctttcattgacaagggacaagaactatgtgcagattattcagaaaatacatttactgagtacaagaaaaaactggcagagcgactaaaagcaaaattgcctgatgccacacccacggaactggcaaagctggttaacaagcgctcagactttgcctccaactgctgttccataaactcacctcctctttactgtgattcagagattgatgctgaattgaagaatatcctgtagtcctgaagcatgtttattaactttgaccagagttggagccacccaggggaatgatctctgatgacctaacctaagcaaaaccactgagcttctgggaagacaactaggatactttctactttttctagctacaatatcttcatacaatgacaagtatgatgatttgctatcaaaataaattgaaatataatgcaaaccataaa

SEQ ID NO: 454318 - DNA, 1771 bp, Homo sapiens
aaatataacagaatgtcataaaattgtggcctgttatgagagaagagctagaaaggcccccaaaatatgaaattgcatatagacattgagaaaatacgactttcattgtaggccacgtggaagatcactttatacatgtacatgtaacataatattcatcaaaaggggacacatacaaatttttctatttctgcctcctaggccgggattatgaaaagaataaagtctgcaaggaattctcccatctgggaaaggaggacttcacatctctgtcactagtcctgtacagtagaaaatttcccagtggcacgtttgaacaggtcagccaacttgtgaaggaagttgtctccttgaccgaagcctgctgtgcggaaggggctgaccctgactgctatgacaccaggacctcagcactgtctgccaagtcctgtgaaagtaattctccattccccgttcacccaggcactgctgagtgctgcaccaaagagggcctggaacgaaagctctgcatggctgctctgaaacaccagccacaggaattccctacctacgtggaacccacaaatgatgaaatctgtgaggcgttcaggaaagatccaaaggaatatgctaatcaatttatgtgggaatattccactaattacggacaagctcctctgtcacttttagtcagttacaccaagagttatctttctatggtagggtcctgctgtacctctgcaagcccaactgtatgctttttgaaagagagactccagcttaaacatttatcacttctcaccactctgtcaaatagagtctgctcacaatatgctgcttatggggagaagaaatcaaggctcagcaatctcataaagttagcccaaaaagtgcctactgctgatctggaggatgttttgccactagctgaagatattactaacatcctctccaaatgctgtgagtctgcctctgaagattgcatggccaaagagctgcctgaacacacagtaaaactctgtgacaatttatccacaaagaattctaagtttgaagactgttgtcaagaaaaaacagccatggacgtttttgtgtgcacttacttcatgccagctgcccaactccccgagcttccagatgtagagttgcccacaaacaaagatgtgtgtgatccaggaaacaccaaagtcatggataagtatacatttgaactaagcagaaggactcatcttccggaagtattcctcagtaaggtacttgagccaaccctaaaaagccttggtgaatgctgtgatgttgaagactcaactacctgttttaatgctaagggccctctactaaagaaggaactatcttctttcattgacaagggacaagaactatgtgcagattattcagaaaatacatttactgagtacaagaaaaaactggcagagcgactaaaagcaaaattgcctgatgccacacccacggaactggcaaagctggttaacaagcgctcagactttgcctccaactgctgttccataaactcacctcctctttactgtgattcagagattgatgctgaattgaagaatatcctgtagtcctgaagcatgtttattaactttgaccagagttggagccacccaggggaatgatctctgatgacctaacctaagcaaaaccactgagcttctgggaagacaactaggatactttctactttttctagctacaatatcttcatacaatgacaagtatgatgatttgctatcaaaataaattgaaatataatgcaaaccataaa

SEQ ID NO: 454319 - DNA, 1723 bp, Homo sapiens
tttaataataattctgtgttgcttctgagattaataattgattaattcatagtcaggaatctttgtaaaaaggaaaccaattacttttggctaccacttttacatggtcacctacaggagagaggaggtgctgcaagactctctggtagaaaaatgaagagggtcctggtactactgcttgctgtggcatttggacatgctttagagagaggccgggattatgaaaagaataaagtctgcaaggaattctcccatctgggaaaggaggacttcacatctctgtcactagtcctgtacagtagaaaatttcccagtggcacgtttgaacaggtcagccaacttgtgaaggaagttgtctccttgaccgaagcctgctgtgcggaaggggctgaccctgactgctatgacaccagggcactgctgagtgctgcaccaaagagggcctggaacgaaagctctgcatggctgctctgaaacaccagccacaggaattccctacctacgtggaacccacaaatgatgaaatctgtgaggcgttcaggaaagatccaaaggaatatgctaatcaatttatgtgggaatattccactaattacggacaagctcctctgtcacttttagtcagttacaccaagagttatctttctatggtagggtcctgctgtacctctgcaagcccaactgtatgctttttgaaagagagactccagcttaaacatttatcacttctcaccactctgtcaaatagagtctgctcacaatatgctgcttatggggagaagaaatcaaggctcagcaatctcataaagttagcccaaaaagtgcctactgctgatctggaggatgttttgccactagctgaagatattactaacatcctctccaaatgctgtgagtctgcctctgaagattgcatggccaaagagctgcctgaacacacagtaaaactctgtgacaatttatccacaaagaattctaagtttgaagactgttgtcaagaaaaaacagccatggacgtttttgtgtgcacttacttcatgccagctgcccaactccccgagcttccagatgtagagttgcccacaaacaaagatgtgtgtgatccaggaaacaccaaagtcatggataagtatacatttgaactaagcagaaggactcatcttccggaagtattcctcagtaaggtacttgagccaaccctaaaaagccttggtgaatgctgtgatgttgaagactcaactacctgttttaatgctaagggccctctactaaagaaggaactatcttctttcattgacaagggacaagaactatgtgcagattattcagaaaatacatttactgagtacaagaaaaaactggcagagcgactaaaagcaaaattgcctgatgccacacccacggaactggcaaagctggttaacaagcgctcagactttgcctccaactgctgttccataaactcacctcctctttactgtgattcagagattgatgctgaattgaagaatatcctgtagtcctgaagcatgtttattaactttgaccagagttggagccacccaggggaatgatctctgatgacctaacctaagcaaaaccactgagcttctgggaagacaactaggatactttctactttttctagctacaatatcttcatacaatgacaagtatgatgatttgctatcaaaataaattgaaatataatgcaaaccataaa

SEQ ID NO: 454320 - DNA, 1213 bp, Homo sapiens
tctctacataatttatcatctataacacatacgctctcccaaccacaaaactttcactatttatgtgggaatattccactaattacggacaagctcctctgtcacttttagtcagttacaccaagagttatctttctatggtagggtcctgctgtacctctgcaagcccaactgtatgctttttgaaagagagactccagcttaaacatttatcacttctcaccactctgtcaaatagagtctgctcacaatatgctgcttatggggagaagaaatcaaggctcagcaatctcataaagttagcccaaaaagtgcctactgctgatctggaggatgttttgccactagctgaagatattactaacatcctctccaaatgctgtgagtctgcctctgaagattgcatggccaaagagctgcctgaacacacagtaaaactctgtgacaatttatccacaaagaattctaagtttgaagactgttgtcaagaaaaaacagccatggacgtttttgtgtgcacttacttcatgccagctgcccaactccccgagcttccagatgtagagttgcccacaaacaaagatgtgtgtgatccaggaaacaccaaagtcatggataagtatacatttgaactaagcagaaggactcatcttccggaagtattcctcagtaaggtacttgagccaaccctaaaaagccttggtgaatgctgtgatgttgaagactcaactacctgttttaatgctaagggccctctactaaagaaggaactatcttctttcattgacaagggacaagaactatgtgcagattattcagaaaatacatttactgagtacaagaaaaaactggcagagcgactaaaagcaaaattgcctgatgccacacccacggaactggcaaagctggttaacaagcgctcagactttgcctccaactgctgttccataaactcacctcctctttactgtgattcagagattgatgctgaattgaagaatatcctgtagtcctgaagcatgtttattaactttgaccagagttggagccacccaggggaatgatctctgatgacctaacctaagcaaaaccactgagcttctgggaagacaactaggatactttctactttttctagctacaatatcttcatacaatgacaagtatgatgatttgctatcaaaataaattgaaatataatgcaaaccataaa

SEQ ID NO: 454321 - DNA, 1728 bp, Homo sapiens
tttaataataattctgtgttgcttctgagattaataattgattaattcatagtcaggaatctttgtaaaaaggaaaccaattacttttggctaccacttttacatggtcacctacaggagagaggaggtgctgcaagactctctggtagaaaaatgaagagggtcctggtactactgcttgctgtggcatttggacatgctttagagagaggccgggattatgaaaagaataaagtctgcaaggaattctcccatctgggaaaggaggacttcacatctctgtcactagtcctgtacagtagaaaatttcccagtggcacgtttgaacaggtcagccaacttgtgaaggaagttgtctccttgaccgaagcctgctgtgcggaaggggctgaccctgactgctatgacaccaggacctcagcactgtctgccaagtcctgtgaaagtaattctccattccccgttcacccaggcactgctgagtgctgcaccaaagagggcctggaacgaaagctctgcatggctgctctgaaacaccagccacaggaattccctacctacgtggaacccacaaatgatgaaatctgtgaggcgttcaggaaagatccaaaggaatatgctaatcaatttatgtgggaatattccactaattacggacaagctcctctgtcacttttagtcagttacaccaagagttatctttctatggtagggtcctgctgtacctctgcaagcccaactgtatgctttttgaaagagagactccagcttaaacatttatcacttctcaccactctgtcaaatagagtctgctcacaatatgctgcttatggggagaagaaatcaaggctcagcaatctcataaagttagcccaaaaagtgcctactgctgatctggaggatgttttgccactagctgaagatattactaacatcctctccaaatgctgtgagtctgcctctgaagattgcatggccaaagagctgcctgaacacacagtaaaactctgtgacaatttatccacaaagaattctaagtttgaagactgttgtcaagaaaaaacagccatggacgtttttgtgtgcacttacttcatgccagctgcccaactccccgagcttccagatgtagagttgcccacaaacaaagatgtgtgtgatccaggaaacaccaaagtcatggataagtatacatttgaactaagcagaaggactcatcttccggaagtattcctcagtaaggtacttgagccaaccctaaaaagccttggtgaatgctgtgatgttgaagactcaactacctgttttaatgctaagggccctctactaaagaaggaactatcttctttcattgacaagggacaagaactatgtgcagattattcagaaaatacatttactgagtacaagaaaaaactggcagagcgactaaaagcaaaattgcctgatgccacacccacggaactggcaaagctggttaacaagcgctcagactttgcctccaactgctgttccataaactcacctcctctttactgtgattcagagattgatgctgaattgaagaatatcctgtagtcctgaagcatgtttattaactttgaccagagttggagccacccaggggaatgatctctgatgacctaactctagctacaatatcttcatacaatgacaagtatgatgatttgctatcaaaataaattgaaatataatgcaaaccataaa

SEQ ID NO: 454322 - DNA, 1727 bp, Homo sapiens
tttaataataattctgtgttgcttctgagattaataattgattaattcatagtcaggaatctttgtaaaaaggaaaccaattacttttggctaccacttttacatggtcacctacaggagagaggaggtgctgcaagactctctggtagaaaaatgaagagggtcctggtactactgcttgctgtggcatttggacatgctttagagagaggccgggattatgaaaagaataaagtctgcaaggaattctcccatctgggaaaggaggacttcacatctctgtcactagtcctgtacagtagaaaatttcccagtggcacgtttgaacaggtcagccaacttgtgaaggaagttgtctccttgaccgaagcctgctgtgcggaaggggctgaccctgactgctatgacaccaggacctcagcactgtctgccaagtcctgtgaaagtaattctccattccccgttcacccaggcactgctgagtgctgcaccaaagagggcctggaacgaaagctctgcatggctgctctgaaacaccagccacaggaattccctacctacgtggaacccacaaatgatgaaatctgtgaggcgttcaggaaagatccaaaggaatatgctaatcaatttatgtgggaatattccactaattacggacaagctcctctgtcacttttagtcagttacaccaagagttatctttctatggtagggtcctgctgtacctctgcaagcccaactgtatgctttttgaaagagagactccagcttaaacatttatcacttctcaccactctgtcaaatagagtctgctcacaatatgctgcttatggggagaagaaatcaaggctcagcaatctcataaagttagcccaaaaagtgcctactgctgatctggaggatgttttgccactagctgaagatattactaacatcctctccaaatgctgtgagtctgcctctgaagattgcatggccaaagagctgcctgaacacacagtaaaactctgtgacaatttatccacaaagaattctaagtttgaagactgttgtcaagaaaaaacagccatggacgtttttgtgtgcacttacttcatgccagctgcccaactccccgagcttccagatgtagagttgcccacaaacaaagatgtgtgtgatccaggaaacaccaaagtcatggataagtatacatttgaactaagcagaaggactcatcttccggaagtattcctcagtaaggtacttgagccaaccctaaaaggccctctactaaagaaggaactatcttctttcattgacaagggacaagaactatgtgcagattattcagaaaatacatttactgagtacaagaaaaaactggcagagcgactaaaagcaaaattgcctgatgccacacccacggaactggcaaagctggttaacaagcgctcagactttgcctccaactgctgttccataaactcacctcctctttactgtgattcagagattgatgctgaattgaagaatatcctgtagtcctgaagcatgtttattaactttgaccagagttggagccacccaggggaatgatctctgatgacctaacctaagcaaaaccactgagcttctgggaagacaactaggatactttctactttttctagctacaatatcttcatacaatgacaagtatgatgatttgctatcaaaataaattgaaatataatgcaaaccataaa

SEQ ID NO: 454323 - DNA, 1676 bp, Homo sapiens
tttaataataattctgtgttgcttctgagattaataattgattaattcatagtcaggaatctttgtaaaaaggaaaccaattacttttggctaccacttttacatggtcacctacaggagagaggaggtgctgcaagactctctggtagaaaaatgaagagggtcctggtactactgcttgctgtggcatttggacatgctttagagagaggccgggattatgaaaagaataaagtctgcaaggaattctcccatctgggaaaggaggacttcacatctctgtcactagtcctgtacagtagaaaatttcccagtggcacgtttgaacaggtcagccaacttgtgaaggaagttgtctccttgaccgaagcctgctgtgcggaaggggctgaccctgactgctatgacaccaggacctcagcactgtctgccaagtcctgtgaaagtaattctccattccccgttcacccaggcactgctgagtgctgcaccaaagagggcctggaacgaaagctctgcatggctgctctgaaacaccagccacaggaattccctacctacgtggaacccacaaatgatgaaatctgtgaggcgttcaggaaagatccaaaggaatatgctaatcaatttatgtgggaatattccactaattacggacaagctcctctgtcacttttagtcagttacaccaagagttatctttctatggtagggtcctgctgtacctctgcaagcccaactgtatgctttttgaaagagagactccagcttaaacatttatcacttctcaccactctgtcaaatagagtctgctcacaatatgctgcttatggggagaagaaatcaaggctcagcaatctcataaagttagcccaaaaagtgcctactgctgatctggaggatgttttgccactagctgaagatattactaacatcctctccaaatgctgtgagtctgcctctgaagattgcatggccaaagagctgcctgaacacacagtaaaactctgtgacaatttatccacaaagaattctaagtttgaagactgttgtcaagaaaaaacagccatggacgtttttgtgtgcacttacttcatgccagctgcccaactccccgagcttccagatgtagagttgcccacaaacaaagatgtgtgtgatccaggaaacaccaaagtcatggataagtatacatttgaactaagcagaaggactcatcttccggaagtattcctcagtaaggtacttgagccaaccctaaaaagccttggtgaatgctgtgatgttgaagactcaactacctgttttaatgctaagggccctctactaaagaaggaactatcttctttcattgacaagggacaagaactatgtgcagattattcagactttgcctccaactgctgttccataaactcacctcctctttactgtgattcagagattgatgctgaattgaagaatatcctgtagtcctgaagcatgtttattaactttgaccagagttggagccacccaggggaatgatctctgatgacctaacctaagcaaaaccactgagcttctgggaagacaactaggatactttctactttttctagctacaatatcttcatacaatgacaagtatgatgatttgctatcaaaataaattgaaatataatgcaaaccataaa

SEQ ID NO: 454324 - DNA, 716 bp, Homo sapiens
ttccggcctttggcgctctatgacgtcaccgaagtgacggagcggaaaagcgcgagaagcggcttggttccttgtacgcagaggcggtagtgacacaggcacaactgacagtggcagaagctcagctgacaaggactggggacggcggtgtccttgtcttgcctttgtcgcccccgcccctctcttccctggctggacttgcggagtccccgccgaagaacccgaggagccatatattgaagaccatgtctggaagcttctactttgtaattgttggtcaccatgataatccagtttttgaaatggagtttttgccagctgggaaggcagaatccaaagacgaccatcgtcatctgaaccagttcatagctcatgctgctctcgacctcgtagatgagaacatgtggctgtcgaacaacatgtacttgaaaactgtggacaagttcaacgagtggtttgtgtcagcatttgtcaccgcggggcatatgaggtttattatgcttcatgacataagacaagaagatggaataaagaacttctttactgatgtttatgatttatatataaaattttcaatgaatccattttatgaacccaattctcctattcgatcaagtgcatttgacagaaaagttcagtttcttgggaagaaacaccttttaagctgaatggagaaaattccaaaataaattatatcaccacaatggtgtatactc

SEQ ID NO: 454325 - DNA, 851 bp, Homo sapiens
ttccggcctttggcgctctatgacgtcaccgaagtgacggagcggaaaagcgcgagaagcggcttggttccttgtacgcagaggcggtagtgacacaggcacaactgacagtggcagaagctcagctgacaaggactggggacggcggtgtccttgtcttgcctttgtcgcccccgcccctctcttccctggctggacttgcggagtccccgccgaagaacccgaggagccatatattgaagaccatgtctggaagcttctactttgtaattgttggtcaccatgataatccagtttttgaaatggagtttttgccagctgggaaggcagaatccaaagacgaccatcgtcatctgaaccagttcatagctcatgctgctctcgacctcgtagatgagaacatgtggctgtcgaacaacatgtacttgaaaactgtggacaagttcaacgagtggtttgtgtcagcatttgtcaccgcggggcatatgaggtttattatgcttcatgacataagacaagaagatggaataaagaacttctttactgatgtttatgatttatatataaaattttcaatgaatccattttatgaacccaattctcctattcgatcaagtgcatttgacagaaaagttcagtttcttgggaagaaacaccttttaagctgaatggagaaatcccaattatttttcaccccatgggtttctcgaaaaaaaaaacaacaaaaaaattgtgggccgggccgaaagtttaacatgttgggggccgggaggaagtgcggtgccggaacgggcgaggggttccaaaacgggcgggtggacaaggcgggtgggtcggcggagcccgcgggg

SEQ ID NO: 454326 - DNA, 911 bp, Homo sapiens
ttccggcctttggcgctctatgacgtcaccgaagtgacggagcggaaaagcgcgagaagcggcttggttccttgtacgcagaggcggtagtgacacaggcacaactgacagtggcagaagctcagctgacaaggactggggacggcggtgtccttgtcttgcctttgtcgcccccgcccctctcttccctggctggacttgcggagtccccgccgaagaacccgaggagccatatattgaagaccatgtctggaagcttctactttgtaattgttggtcaccatgataatccagtttttgaaatggagtttttgccagctgggaaggcagaatccaaagacgaccatcgtcatctgaaccagttcatagctcatgctgctctcgacctcgtagatgagaacatgtggctgtcgaacaacatgtacttgaaaactgtggacaagttcaacgagtggtttgtgtcagcatttgtcaccgcggggcatatgaggtttattatgcttcatgacataagacaagaagatggaataaagaacttctttactgatgtttatgatttatatataaaattttcaatgaatccattttatgaacccaattctcctattcgatcaagtgcatttgacagaaaagttcagtttcttgggaagaaacaccttttaagctgaatggagaaaattccaaaataaattatatcaccacaatggtgtatactcaggaatgtgtacattgtaaattacttgattaaatagcctggaaatcttttgtgtattctcagcttatctaaacttaatgaaatttcttttatatttaaaaatagtacattctgtctcatgtcacatatcagtagatcaattagtatttccttgtgaacaatgttatttataaagaactcattatcaataataatt

SEQ ID NO: 454327 - DNA, 762 bp, Homo sapiens
ttccggcctttggcgctctatgacgtcaccgaagtgacggagcggaaaagcgcgagaagcggcttggttccttgtacgcagaggcggtagtgacacaggcacaactgacagtggcagaagctcagctgacaaggactggggacggcggtgtccttgtcttgcctttgtcgcccccgcccctctcttccctggctggacttgcggagtccccgccgaagaacccgaggagccatatattgaagaccatgtctggaagcttctactttgtaattgttggtcaccatgataatccagtttttgaaatggagtttttgccagctgggaaggcagaatccaaagacgaccatcgtcatctgaaccagttcatagctcatgctgctctcgacctcgtagatgagaacatgtggctgtcgaacaacatgtacttgaaaactgtggacaagttcaacgagtggtttgtgtcagcatttgtcaccgcggggcatatgaggtttattatgcttcatgacataagacaagaagatggaataaagaacttctttactgatgtttatgatttatatataaaattttcaatgaatccattttatgaacccaattctcctattcgatcaagtgcatttgacagaaaagttcagtttcttgggaagaaacaccttttaagctgaatggagaaaattccaaaataaattatatcaccacaatggtgtatactcaggaatgtgtacattgtaaattacttgattaaatagcctggaaatc

SEQ ID NO: 454328 - DNA, 348 bp, Homo sapiens
ttccggcctttggcgctctatgacgtcaccgaagtgacggagcggaaaagcgcgagaagcggcttggttccttgtacgcagaggcggtagtgacacaggcacaactgacagtggcagaagctcagctgacaaggactggggacggcggtgtccttgtcttgcctttgtcgcccccgcccctctcttccctggctggacttgcggagtccccgccgaagaacccgagggtcccctggcgatggcagaaatgaaccctgcacagatggagtcttgctgtgttgtcacccaggctggagtgcagtggcatgatcttggctcactgcaacctgcacctcctggattcaagca

SEQ ID NO: 454329 - DNA, 2118 bp, Homo sapiens
ttccggcctttggcgctctatgacgtcaccgaagtgacggagcggaaaagcgcgagaagcggcttggttccttgtacgcagaggcggtagtgacacaggcacaactgacagtggcagaagctcagctgacaaggactggggacggcggtgtccttgtcttgcctttgtcgcccccgcccctctcttccctggctggacttgcggagtccccgccgaagaacccgagggtcccctggcgatggcagaaatgaaccctgcacagggtcatgtggtttttgaagacgtggccatatatttctcccaggaggagtgggggcatctcgatgaggctcagagattgctgtaccgtgatgtgatgctggagaatttggcccttttgtcctcactaggttgttgccatggagctgaggatgaggaggcacctttagagccaggtgtttctgtaggagtgtcacaggtcatggctccaaagccctgtctatctacccagaatacccagccctgtgagacatgtagctcacttctgaaggacattctgcgtctggctgagcatgacggaacacaccccgagcagggactgtacacgtgtccagcacatcttcaccagcaccaaaaggagcagattagagagaaactttctagaggggatggaggaagaccgacatttgtgaagaaccacagagttcacatggcagggaagaccttcttgtgcagtgaatgtgggaaagcctttagccacaaacataaactttctgaccatcagaaaatccacactggagaaagaacttataagtgcagcaaatgtgggatattgtttatggaaaggtccacactcaatagacatcagagaactcacactggagaaaggccttatgagtgcaatgaatgtgggaaagcctttctttgtaagtctcaccttgttcgtcaccagacaatccactctggagaaaggccttatgagtgcagtgaatgtgggaaattgtttatgtggagttccacactcattacacatcagagggttcacactggaaagaggccttatggttgcagtgaatgtgggaagttctttaagtgcaactcaaacctctttaggcattacagaattcatacaggaaaaaggtcttatggttgcagtgaatgtgggaaattctttatggaaaggtctacactcagtagacatcagagagttcacactggagaaaggccttatgagtgcaatgaatgtgggaaattcttcagcttgaaatccgtcctcattcaacaccaaagagttcacactggagaacggccttatgaatgcagtgagtgtgggaaggccttccttacaaagtcccacctcatttgtcatcagacagttcacactgcagcaaagcagtgcagtgaatgtgggaaattctttaggtataactctacacttctcagacatcagaaagtccacactggataaggcccttatgaatgcagtggatatgggaaagccttcagtcaccaacatattgtggctggacagcaggcagtacacactggagaaagactgaatgccgtgaacgtgggtaattatgtaggtacagctctccagtcgctatgtatcagagaattcacactgcagaaatgtgtgttcagcaaactcgggacattattttggtttgactctcatctcattagacattggagagtttacactgaagaagagtcttttcaataaagtagaaagtggtaaagattcaacatgcaagattgtacttattgggcttcagaatatccacactagtgaaagtcttctgagtacagcaaatgtgtgacattattttgctactactccacactacttagacatcatgtagttcacactggaaaaaggccacgtatgtgccttgaatgtagccaaaatgatgaacaacacccagaaatctgtgatttagcactgagaactagtattatatggtttttaaaaaacaatggtgaagtacatgccacataaaatttgccatcttaactattgtaatgtcttgtttaatacttgaagtacattaacattgttgagcaaagaatatcctgaactctttatcttgtaaaatgaaactctataaccaccattaaaaaaacaactcattccca

SEQ ID NO: 454330 - DNA, 1028 bp, Homo sapiens
ctgacgtttctataaagtaggtcataagaaccttcattccagaagtaccctcaaagacagagacaccaagaagaatcggaacatacaggctttgatatcaaaggtttataaagccaatatctgggaaagagaaaaccgtgagacttccagatcttctctggtgaagtgtgtttcctgcaacgatcacgaacatgaacatcaaaggatcgccatggaaagggtccctcctgctgctgctggtgtcaaacctgctcctgtgccagagcgtggcccccttgcccatctgtcccggcggggctgcccgatgccaggtgacccttcgagacctgtttgaccgcgccgtcgtcctgtcccactacatccataacctctcctcagaaatgttcagcgaattcgataaacggtatacccatggccgggggttcattaccaaggccatcaacagctgccacacttcttcccttgccacccccgaagacaaggagcaagcccaacagatgaatcaaaaagactttctgagcctgatagtcagcatattgcgatcctggaatgagcctctgtatcatctggtcacggaagtacgtggtatgcaagaagccccggaggctatcctatccaaagctgtagagattgaggagcaaaccaaacggcttctagagggcatggagctgatagtcagccaggttcatcctgaaaccaaagaaaatgagatctaccctgtctggtcgggacttccatccctgcagatggctgatgaagagtctcgcctttctgcttattataacctgctccactgcctacgcagggattcacataaaatcgacaattatctcaagctcctgaagtgccgaatcatccacaacaacaactgctaagcccacatccatttcatctatttctgagaaggtccttaatgatccgttccattgcaagcttcttttagttgtatctcttttgaatccatgcttgggtgtaacaggtctcctcttaaaaaataaaaactgactccttagagacatcaaaataaa

SEQ ID NO: 454331 - DNA, 617 bp, Homo sapiens
gcgatggtcccgcctggccgggcattccagcctgtaccggtgcccccttctccttgccaccccggtgtcctggatcatcctctcaggtgggtcaaaaagactttctgagcctgatagtcagcatattgcgatcctggaatgagcctctgtatcatctggtcacggaagtacgtggtatgcaagaagccccggaggctatcctatccaaagctgtagagattgaggagcaaaccaaacggcttctagagggcatggagctgatagtcagccaggttcatcctgaaaccaaagaaaatgagatctaccctgtctggtcgggacttccatccctgcagatggctgatgaagagtctcgcctttctgcttattataacctgctccactgcctacgcagggattcacataaaatcgacaattatctcaagctcctgaagtgccgaatcatccacaacaacaactgctaagcccacatccatttcatctatttctgagaaggtccttaatgatccgttccattgcaagcttcttttagttgtatctcttttgaatccatgcttgggtgtaacaggtctcctcttaaaaaataaaaactgactccttagagacatcaaaataaa

SEQ ID NO: 454332 - DNA, 614 bp, Homo sapiens
  misc_feature (537)..(537): n is a, c, g, or t
  misc_feature (610)..(610): n is a, c, g, or t
ggaataaatcatctcagagtggctcgcgttcttatttaagcagggtccctcctgctgctgctggtgtcaaacctgctcctgtgccagagcgtggcccccttgcccatctgtcccggcggggctgcccgatgccaggtgacccttcgagacctgtttgaccgcgccgtcgtcctgtcccactacatccataacctctcctcagaaatgttcagcgaattcgataaacggtatacccatggccgggggttcattaccaaggccatcaacagctgccacacttcttcccttgccacccccgaagacaaggagcaagcccaacagatgaatcaaaaagactttctgagcctgatagtcagcatattgcgatcctggaatgagcctctgtatcatctggtcacggaagtacgtggtatgcaagaagccccggaggctatcctatccaaagctgtagagattgaggagcaaaccaaacggcttctagagggcatggagctgatagtcagccaggtcatctgaaccgtgagactacctgctggncggacttcatcctgagatggtgatggctcgctttggtatatactgtcaatgtaccaggatactaatgcatttntctg

SEQ ID NO: 454333 - DNA, 773 bp, Homo sapiens
ctgacgtttctataaagtaggtcataagaaccttcattccagaagtaccctcaaagacagagacaccaagaagaatcggaacatacaggctttgaggaaatgtggggctatggagcagcaaggagacacacaataaattttacagagaaacctgtacctctttgcagtcaaataaatcgactgacagaccctgaataaacacagcttaggttttcttagattgctcttatcctggctatccaagaatgttgcaacacctttaaattttaagattaagttgtcattgtcagttcttataacagattttcttactcttaagtttatgggagaggaggagaatataggataatgttaatttctctgccacacagctctgctttcttaataattcagactctctccatccagggaaaaaatgaatacctaatgtgagtatatggaatcctgacccagctttcagattgagagagtctatgaatcatcacatttgatgtttatgattcaaaatgtaggattgccttaaactaaggcaattaggaagatagtttttcagagacgttagtctttgttaagatttctaggtccccataagagcacttagtcagataattgctaaagcacatatgtggctctaggaactaaggaaaaagtaaatgccataggaagactattttttaaattacctcattcatcagtctattgtaagagacagcaaatttgaaactaaaggtcacaggctgctttagatgcatggacttaaaaattagagaaag

SEQ ID NO: 454334 - DNA, 1356 bp, Homo sapiens
atccttattctatatctcttggtatttagtgtaaaaattttaaaatctttacctagcaatcttgaggaagaaacttgataactgataatacatgagattgttacctaagtgaaatataatcctatatattcaacaaactttagagaaataagataaattttaaagtaaatgacttctgtagttttatagatcctccaaaccaatctagtctcagatctcaccttcatcatttctctcatttccttttggcctaattaatcaaaatccttcctagaatgttcatttctggccagtatgtcttcctgaatatgaataagaaataaaataccatttgatgtttgaaattatgggggtaatctcaatgacggaaatagatgaccaggaaaagggaaacgaatgcctgattcattatattcatgaagatatcaaaggtttataaagccaatatctgggaaagagaaaaccgtgagacttccagatcttctctggtgaagtgtgtttcctgcaacgatcacgaacatgaacatcaaaggatcgccatggaaagggtccctcctgctgctgctggtgtcaaacctgctcctgtgccagagcgtggcccccttgcccatctgtcccggcggggctgcccgatgccaggtgacccttcgagacctgtttgaccgcgccgtcgtcctgtcccactacatccataacctctcctcagaaatgttcagcgaattcgataaacggtatacccatggccgggggttcattaccaaggccatcaacagctgccacacttcttcccttgccacccccgaagacaaggagcaagcccaacagatgaatcaaaaagactttctgagcctgatagtcagcatattgcgatcctggaatgagcctctgtatcatctggtcacggaagtacgtggtatgcaagaagccccggaggctatcctatccaaagctgtagagattgaggagcaaaccaaacggcttctagagggcatggagctgatagtcagccaggttcatcctgaaaccaaagaaaatgagatctaccctgtctggtcgggacttccatccctgcagatggctgatgaagagtctcgcctttctgcttattataacctgctccactgcctacgcagggattcacataaaatcgacaattatctcaagctcctgaagtgccgaatcatccacaacaacaactgctaagcccacatccatttcatctatttctgagaaggtccttaatgatccgttccattgcaagcttcttttagttgtatctcttttgaatccatgcttgggtgtaacaggtctcctcttaaaaaataaaaactgactccttagagacatcaaaataaa

SEQ ID NO: 454335 - DNA, 1118 bp, Homo sapiens
  misc_feature (1067)..(1067): n is a, c, g, or t
ctgacgtttctataaagtaggtcataagaaccttcattccagaagtaccctcaaagacagagacaccaagaagaatcggaacatacaggctttgatatcaaaggtttataaagccaatatctgggaaagagaaaaccgtgagacttccagatcttctctggtgaagtgtgtttcctgcaacgatcacgaacatgaacatcaaaggatcgccatggaaagggtccctcctgctgctgctggtgtcaaacctgctcctgtgccagagcgtggcccccttgcccatctgtcccggcggggctgcccgatgccaggtgacccttcgagacctgtttgaccgcgccgtcgtcctgtcccactacatccataacctctcctcagaaatgttcagcgaattcgataaacggtatacccatggccgggggttcattaccaaggccatcaacagctgccacacttcttcccttgccacccccgaagacaaggagcaagcccaacagatgaatcaaaaagactttctgagcctgatagtcagcatattgcgatcctggaatgagcctctgtatcatctggtcacggaagtacgtggtatgcaagaagccccggaggctatcctatccaaagctgtagagattgaggagcaaaccaaacggcttctagagggcatggagctgatagtcagccaggttcatcctgaaaccaaagaaaatgagatctaccctgtctggtcgggacttccatccctgcagatggctgatgaagagtctcgcctttctgcttattataacctgctccactgcctacgcagggattcacataaaatcgacaattatctcaagctcctgaagtgccgaatcatccacaacaacaactgctaagcccacatccatttcatctatttctgagaaggtccttaatgatccgttccattgcaagcttcttttagttgtatctcttttgaatccatgcttgggtgtaacaggtctcctcttaaaaaataaaaactgactccttagagacatcaaaataaaaaagacttcacttaatgggccgggcgcagtggctcatgnctgtggtcccggcactttgggaggccgaggcaggcggatcaggaggtcagg

SEQ ID NO: 454336 - DNA, 1279 bp, Homo sapiens
ctgacgtttctataaagtaggtcataagaaccttcattccagaagtaccctcaaagacagagacaccaagaagaatcggaacatacaggctttgatatcaaaggtttataaagccaatatctgggaaagagaaaaccgtgagacttccagatcttctctggtgaagtgtgtttcctgcaacgatcacgaacatgaacatcaaaggatcgccatggaaagggtccctcctgctgctgctggtgtcaaacctgctcctgtgccagagcgtggcccccttgcccatctgtcccggcggggctgcccgatgccaggtgacccttcgagacctgtttgaccgcgccgtcgtcctgtcccactacatccataacctctcctcagaaatgttcagcgaattcgataaacggtatacccatggccgggggttcattaccaaggccatcaacagctgccacacttcttcccttgccacccccgaagacaaggagcaagcccaacagatgaatcaaaaagactttctgagcctgatagtcagcatattgcgatcctggaatgagcctctgtatcatctggtcacggaagtacgtggtatgcaagaagccccggaggctatcctatccaaagctgtagagattgaggagcaaaccaaacggcttctagagggcatggagctgatagtcagccaggttcatcctgaaaccaaagaaaatgagatctaccctgtctggtcgggacttccatccctgcagatggctgatgaagagtctcgcctttctgcttattataacctgctccactgcctacgcagggattcacataaaatcgacaattatctcaagctcctgaagtgccgaatcatccacaacaacaactgctaagcccacatccatttcatctatttctgagaaggtccttaatgatccgttccattgcaagcttcttttagttgtatctcttttgaatccatgcttgggtgtaacaggtctcctcttaaaaaataaaaactgactccttagagacatcaaaataaaacaacaggggggcgcggtacccattggctaaatggattgttaacatcatggcggcgtaacacgtctgacggagaccgggtaccactaatgctgagaatccctttgagcgggatacaaaggggcgaatgcactaaattggcagaggatggaggaagaaatgtaaagctattggaagaatataaaagaggaccttatgaaggggggtggacggatgcgtcttttgtcttagatggggtgttggttgtgggggg

SEQ ID NO: 454337 - DNA, 1217 bp, Homo sapiens
ctgacgtttctataaagtaggtcataagaaccttcattccagaagtaccctcaaagacagagacaccaagaagaatcggaacatacaggctttgatatcaaaggtttataaagccaatatctgggaaagagaaaaccgtgagacttccagatcttctctggtgaagtgtgtttcctgcaacgatcacgaacatgaacatcaaaggatcgccatggaaagggtccctcctgctgctgctggtgtcaaacctgctcctgtgccagagcgtggcccccttgcccatctgtcccggcggggctgcccgatgccaggtgacccttcgagacctgtttgaccgcgccgtcgtcctgtcccactacatccataacctctcctcagaaatgttcagcgaattcgataaacggtatacccatggccgggggttcattaccaaggccatcaacagctgccacacttcttcccttgccacccccgaagacaaggagcaagcccaacagatgaatcaaaaagactttctgagcctgatagtcagcatattgcgatcctggaatgagcctctgtatcatctggtcacggaagtacgtggtatgcaagaagccccggaggctatcctatccaaagctgtagagattgaggagcaaaccaaacggcttctagagggcatggagctgatagtcagccaggttcatcctgaaaccaaagaaaatgagatctaccctgtctggtcgggacttccatccctgcagatggctgatgaagagtctcgcctttctgcttattataacctgctccactgcctacgcagggattcacataaaatcgacaattatctcaagctcctgaagtgccgaatcatccacaacaacaactgctaagcccacatccatttcatctatttctgagaaggtccttaatgatccgttccattgcaagcttcttttagttgtatctcttttgaatccatgcttgggtgtaacaggtctcctcttaaaaaataaaaactgactccttagagacatcaaaataaaaagagaaaaatgaaggggggcggaaccaatgcgcatatgagcgataaaaaagggacgctaaaaacggaggggaaccgggtgcacaaaagcgggacacccaagagagggaaaacaggaggataatcacaagagacgaggagatgagaaattaacgcatggctacaacggccaacaggggcgccacccgct

SEQ ID NO: 454338 - DNA, 1281 bp, Homo sapiens
ctgacgtttctataaagtaggtcataagaaccttcattccagaagtaccctcaaagacagagacaccaagaagaatcggaacatacaggctttgatatcaaaggtttataaagccaatatctgggaaagagaaaaccgtgagacttccagatcttctctggtgaagtgtgtttcctgcaacgatcacgaacatgaacatcaaaggatcgccatggaaagggtccctcctgctgctgctggtgtcaaacctgctcctgtgccagagcgtggcccccttgcccatctgtcccggcggggctgcccgatgccaggtgacccttcgagacctgtttgaccgcgccgtcgtcctgtcccactacatccataacctctcctcagaaatgttcagcgaattcgataaacggtatacccatggccgggggttcattaccaaggccatcaacagctgccacacttcttcccttgccacccccgaagacaaggagcaagcccaacagatgaatcaaaaagactttctgagcctgatagtcagcatattgcgatcctggaatgagcctctgtatcatctggtcacggaagtacgtggtatgcaagaagccccggaggctatcctatccaaagctgtagagattgaggagcaaaccaaacggcttctagagggcatggagctgatagtcagccaggttcatcctgaaaccaaagaaaatgagatctaccctgtctggtcgggacttccatccctgcagatggctgatgaagagtctcgcctttctgcttattataacctgctccactgcctacgcagggattcacataaaatcgacaattatctcaagctcctgaagtgccgaatcatccacaacaacaactgctaagcccacatccatttcatctatttctgagaaggtccttaatgatccgttccattgcaagcttcttttagttgtatctcttttgaatccatgcttgggtgtaacaggtctcctcttaaaaaataaaaactgactccttagagacatcaaaataaaggggaagagtcataattctttggaaaataaccatgaatacacttacagttaggatttgtggtaaggtagctctcaacattaccaaaatcatttctttacaggggaagggatatcattcgaatgaacttttaagaaggaaatttcaggcgcggagttaactggggttatttctaataccaaaggggattatatgaaacattaatgggagagctcagggttcaataccacaggtactccctggttgcggggtgtt

SEQ ID NO: 454339 - DNA, 1098 bp, Homo sapiens
  misc_feature (1067)..(1067): n is a, c, g, or t
  misc_feature (1097)..(1097): n is a, c, g, or t
ctgacgtttctataaagtaggtcataagaaccttcattccagaagtaccctcaaagacagagacaccaagaagaatcggaacatacaggctttgatatcaaaggtttataaagccaatatctgggaaagagaaaaccgtgagacttccagatcttctctggtgaagtgtgtttcctgcaacgatcacgaacatgaacatcaaaggatcgccatggaaagggtccctcctgctgctgctggtgtcaaacctgctcctgtgccagagcgtggcccccttgcccatctgtcccggcggggctgcccgatgccaggtgacccttcgagacctgtttgaccgcgccgtcgtcctgtcccactacatccataacctctcctcagaaatgttcagcgaattcgataaacggtatacccatggccgggggttcattaccaaggccatcaacagctgccacacttcttcccttgccacccccgaagacaaggagcaagcccaacagatgaatcaaaaagactttctgagcctgatagtcagcatattgcgatcctggaatgagcctctgtatcatctggtcacggaagtacgtggtatgcaagaagccccggaggctatcctatccaaagctgtagagattgaggagcaaaccaaacggcttctagagggcatggagctgatagtcagccaggttcatcctgaaaccaaagaaaatgagatctaccctgtctggtcgggacttccatccctgcagatggctgatgaagagtctcgcctttctgcttattataacctgctccactgcctacgcagggattcacataaaatcgacaattatctcaagctcctgaagtgccgaatcatccacaacaacaactgctaagcccacatccatttcatctatttctgagaaggtccttaatgatccgttccattgcaagcttcttttagttgtatctcttttgaatccatgcttgggtgtaacaggtctcctcttaaaaaataaaaactgactccttagagacatcaaaataaagctatagctgcatccgaggtgctggtggacaacgcgganggggtccctcgcttgcggcggcggcttggnc

SEQ ID NO: 454340 - DNA, 1096 bp, Homo sapiens
ctgacgtttctataaagtaggtcataagaaccttcattccagaagtaccctcaaagacagagacaccaagaagaatcggaacatacaggctttgatatcaaaggtttataaagccaatatctgggaaagagaaaaccgtgagacttccagatcttctctggtgaagtgtgtttcctgcaacgatcacgaacatgaacatcaaaggatcgccatggaaagggtccctcctgctgctgctggtgtcaaacctgctcctgtgccagagcgtggcccccttgcccatctgtcccggcggggctgcccgatgccaggtgacccttcgagacctgtttgaccgcgccgtcgtcctgtcccactacatccataacctctcctcagaaatgttcagcgaattcgataaacggtatacccatggccgggggttcattaccaaggccatcaacagctgccacacttcttcccttgccacccccgaagacaaggagcaagcccaacagatgaatcaaaaagactttctgagcctgatagtcagcatattgcgatcctggaatgagcctctgtatcatctggtcacggaagtacgtggtatgcaagaagccccggaggctatcctatccaaagctgtagagattgaggagcaaaccaaacggcttctagagggcatggagctgatagtcagccaggttcatcctgaaaccaaagaaaatgagatctaccctgtctggtcgggacttccatccctgcagatggctgatgaagagtctcgcctttctgcttattataacctgctccactgcctacgcagggattcacataaaatcgacaattatctcaagctcctgaagtgccgaatcatccacaacaacaactgctaagcccacatccatttcatctatttctgagaaggtccttaatgatccgttccattgcaagcttcttttagttgtatctcttttgaatccatgcttgggtgtaacaggtctcctctaagataagacgggtcctgagactctaagcgaaccggaggggaacgcgcgcaatatgcgggatacccgcagagggagcgcagcccacgcgacacgagggatgcctgtac

SEQ ID NO: 454341 - DNA, 1158 bp, Homo sapiens
ctgacgtttctataaagtaggtcataagaaccttcattccagaagtaccctcaaagacagagacaccaagaagaatcggaacatacaggctttgatatcaaaggtttataaagccaatatctgggaaagagaaaaccgtgagacttccagatcttctctggtgaagtgtgtttcctgcaacgatcacgaacatgaacatcaaaggatcgccatggaaagggtccctcctgctgctgctggtgtcaaacctgctcctgtgccagagcgtggcccccttgcccatctgtcccggcggggctgcccgatgccaggtgacccttcgagacctgtttgaccgcgccgtcgtcctgtcccactacatccataacctctcctcagaaatgttcagcgaattcgataaacggtatacccatggccgggggttcattaccaaggccatcaacagctgccacacttcttcccttgccacccccgaagacaaggagcaagcccaacagatgaatcaaaaagactttctgagcctgatagtcagcatattgcgatcctggaatgagcctctgtatcatctggtcacggaagtacgtggtatgcaagaagccccggaggctatcctatccaaagctgtagagattgaggagcaaaccaaacggcttctagagggcatggagctgatagtcagccaggttcatcctgaaaccaaagaaaatgagatctaccctgtctggtcgggacttccatccctgcagatggctgatgaagagtctcgcctttctgcttattataacctgctccactgcctacgcagggattcacataaaatcgacaattatctcaagctcctgaagtgccgaatcatccacaacaacaactgctaagcccacatccatttcatctatttctgagaaggtccttaatgatccgttttggcacctctttaggggttcctttgaacccacgtgggttaacggctccctcttaattaaactccctctgaccaactcgaccaagcaccggcacacacccgagggcgacatgccatgggtacacaaggcggatacagccggaaactgtacacaacggacaccctcagtgacgcacgccgcgcggactgccagcatacagcggccattcgcatagctggagagcgcctacaccccg

SEQ ID NO: 454342 - DNA, 873 bp, Homo sapiens
  misc_feature (45)..(45): n is a, c, g, or t
ttttttttttttcccatggccggaatcacgaacatgaacatcaanagggattcgccatggaaagggtccctcctgctgctgctggtgtcaaacctgctcctgtgccagagcgtggcccccttgcccatctgtcccggcggggctgcccgatgccaggtgacccttcgagacctgtttgaccgcgccgtcgtcctgtcccactacatccataacctctcctcagaaatgttcagcgaattcgataaacggtatacccatggccgggggttcattaccaaggccatcaacagctgccacacttcttcccttgccacccccgaagacaaggagcaagcccaacagatgaatcaaaaagactttctgagcctgatagtcagcatattgcgatcctggaatgagcctctgtatcatctggtcacggaagtacgtggtatgcaagaagccccggaggctatcctatccaaagctgtagagattgaggagcaaaccaaacggcttctagagggcatggagctgatagtcagccaggttcatcctgaaaccaaagaaaatgagatctaccctgtctggtcgggacttccatccctgcagatggctgatgaagagtctcgcctttctgcttattataacctgctccactgcctacgcagggattcacataaaatcgacaattatctcaagctcctgaagtgccgaatcatccacaacaacaactgctaagcccacatccatttcatctatttctgagaaggtccttaatgatccgttccattgcaagcttcttttagttgtatctcttttgaatccatgcttgggtgtaacaggtctcctcttaaaaaataaaaactgactccttagagacatcaaaataaa

SEQ ID NO: 454343 - DNA, 852 bp, Homo sapiens
ggaataaatcatctcagagtggctcgcgttcttatttaagcagggtccctcctgctgctgctggtgtcaaacctgctcctgtgccagagcgtggcccccttgcccatctgtcccggcggggctgcccgatgccaggtgacccttcgagacctgtttgaccgcgccgtcgtcctgtcccactacatccataacctctcctcagaaatgttcagcgaattcgataaacggtatacccatggccgggggttcattaccaaggccatcaacagctgccacacttcttcccttgccacccccgaagacaaggagcaagcccaacagatgaatcaaaaagactttctgagcctgatagtcagcatattgcgatcctggaatgagcctctgtatcatctggtcacggaagtacgtggtatgcaagaagccccggaggctatcctatccaaagctgtagagattgaggagcaaaccaaacggcttctagagggcatggagctgatagtcagccaggttcatcctgaaaccaaagaaaatgagatctaccctgtctggtcgggacttccatccctgcagatggctgatgaagagtctcgcctttctgcttattataacctgctccactgcctacgcagggattcacataaaatcgacaattatctcaagctcctgaagtgccgaatcatccacaacaacaactgctaagcccacatccatttcatctatttctgagaaggtccttaatgatccgttccattgcaagcttcttttagttgtatctcttttgaatccatgcttgggtgtaacaggtctcctcttaaaaaataaaaactgactccttagagacatcaaaataaa

SEQ ID NO: 454344 - DNA, 1039 bp, Homo sapiens
  misc_feature (1012)..(1012): n is a, c, g, or t
ctgacgtttctataaagtaggtcataagaaccttcattccagaagtaccctcaaagacagagacaccaagaagaatcggaacatacaggctttgatatcaaaggtttataaagccaatatctgggaaagagaaaaccgtgagacttccagatcttctctggtgaagtgtgtttcctgcaacgatcacgaacatgaacatcaaaggatcgccatggaaagggtccctcctgctgctgctggtgtcaaacctgctcctgtgccagagcgtggcccccttgcccatctgtcccggcggggctgcccgatgccaggtgacccttcgagacctgtttgaccgcgccgtcgtcctgtcccactacatccataacctctcctcagaaatgttcagcgaattcgataaacggtatacccatggccgggggttcattaccaaggccatcaacagctgccacacttcttcccttgccacccccgaagacaaggagcaagcccaacagatgaatcaaaaagactttctgagcctgatagtcagcatattgcgatcctggaatgagcctctgtatcatctggtcacggaagtacgtggtatgcaagaagccccggaggctatcctatccaaagctgtagagattgaggagcaaaccaaacggcttctagagggcatggagctgatagtcagccaggttcatcctgaaaccaaagaaaatgagatctaccctgtctggtcgggacttccatccctgcagatggctgatgaagagtctcgcctttctgcttattataacctgctccactgcctacgcagggattcacataaaatcgacaattatctcaagctcacacaaggtaagccactcattctcattcggaagcctaagacgtcctggagtcttagtgttcttgccagcgggtacggttcttaaatacgtttagctaagactggtgggcaacgattaggtaaaggggacgtggacgggtattacccggatcgcctgtgttttattttttttangtgattactagtatatatgtatgtgtt

SEQ ID NO: 454345 - DNA, 1018 bp, Homo sapiens
ctgacgtttctataaagtaggtcataagaaccttcattccagaagtaccctcaaagacagagacaccaagaagaatcggaacatacaggctttgatatcaaaggtttataaagccaatatctgggaaagagaaaaccgtgagacttccagatcttctctggtgaagtgtgtttcctgcaacgatcacgaacatgaacatcaaaggatcgccatggaaagggtccctcctgctgctgctggtgtcaaacctgctcctgtgccagagcgtggcccccttgcccatctgtcccggcggggctgcccgatgccaggtgacccttcgagacctgtttgaccgcgccgtcgtcctgtcccactacatccataacctctcctcagaaatgttcagcgaattcgataaacggtatacccatggccgggggttcattaccaaggccatcaacagctgccacacttcttcccttgccacccccgaagacaaggagcaagcccaacagatgaatcaaaaagactttctgagcctgatagtcagcatattgcgatcctggaatgagcctctgtatcatctggtcacggaagtacgtggtatgcaagaagccccggaggctatcctatccaaagctgtagagattgaggagcaaaccaaacggcttctagagggcatggagctgatagtcagccaggttcatcctgaaaccaaagaaaatgagatctaccctgtctggtcgggacttccatccctgcagatggctgatgaagagtctcgcctttctgcttattataacctgctccactgcctacgcagggattcacataaaatcgacaattatctcaagctccaccccaaacaacggtagccccatccagtaacaatcggaaaggctaaggacggcatgcagccaaacggaccctggacccgggggaaaggccccaaacaaaaaggcccgagacaactaaacacccggggcggcccgccagaggcggcgacaaggaagcccagcgcccaagtgacaccccc

SEQ ID NO: 454346 - DNA, 982 bp, Homo sapiens
ctgacgtttctataaagtaggtcataagaaccttcattccagaagtaccctcaaagacagagacaccaagaagaatcggaacatacaggctttgatatcaaaggtttataaagccaatatctgggaaagagaaaaccgtgagacttccagatcttctctggtgaagtgtgtttcctgcaacgatcacgaacatgaacatcaaaggatcgccatggaaagggtccctcctgctgctgctggtgtcaaacctgctcctgtgccagagcgtggcccccttgcccatctgtcccggcggggctgcccgatgccaggtgacccttcgagacctgtttgaccgcgccgtcgtcctgtcccactacatccataacctctcctcagaaatgttcagcgaattcgataaacggtatacccatggccgggggttcattaccaaggccatcaacagctgccacacttcttcccttgccacccccgaagacaaggagcaagcccaacagatgaatcaaaaagactttctgagcctgatagtcagcatattgcgatcctggaatgagcctctgtatcatctggtcacggaagtacgtggtatgcaagaagccccggaggctatcctatccaaagctgtagagattgaggagcaaaccaaacggcttctagagggcatggagctgatagtcagccaggttcatcctgaaaccaaagaaaatgagatctaccctgtctggtcgggacttccatccctgcagatggctgatgaagagtctcgcctttctgcttattataacctgctccactgcctacgcagggattcacataaaatcgacaattatctcaagctacgcggggttcgttaatcgcggtatttcaggcctgaagggggatctcccaacgcacgggtacgccatccttcttttccggagggccaaagccgccggacgcttaggcagcctggcacgctggcgaaggcccttggactgtgcgg

SEQ ID NO: 454347 - DNA, 986 bp, Homo sapiens
ctgacgtttctataaagtaggtcataagaaccttcattccagaagtaccctcaaagacagagacaccaagaagaatcggaacatacaggctttgatatcaaaggtttataaagccaatatctgggaaagagaaaaccgtgagacttccagatcttctctggtgaagtgtgtttcctgcaacgatcacgaacatgaacatcaaaggatcgccatggaaagggtccctcctgctgctgctggtgtcaaacctgctcctgtgccagagcgtggcccccttgcccatctgtcccggcggggctgcccgatgccaggtgacccttcgagacctgtttgaccgcgccgtcgtcctgtcccactacatccataacctctcctcagaaatgttcagcgaattcgataaacggtatacccatggccgggggttcattaccaaggccatcaacagctgccacacttcttcccttgccacccccgaagacaaggagcaagcccaacagatgaatcaaaaagactttctgagcctgatagtcagcatattgcgatcctggaatgagcctctgtatcatctggtcacggaagtacgtggtatgcaagaagccccggaggctatcctatccaaagctgtagagattgaggagcaaaccaaacggcttctagagggcatggagctgatagtcagccaggttcatcctgaaaccaaagaaaatgagatctaccctgtctggtcgggacttccatccctgcagatggctgatgaagagtctcgcctttctgcttattataacctgctccactgcctacgcagggattcacataaaatcgacaattatctcaagctcacaatctgggaggcgtaggccggcatggagccttagtgacccttgacacgggggaaggcccctcaaaaaaggccctgacacagatcaaacaaaaaacacacggacaacaaaaacaggcgggcgccaatagggggaccccccatgccg

SEQ ID NO: 454348 - DNA, 976 bp, Homo sapiens
ctgacgtttctataaagtaggtcataagaaccttcattccagaagtaccctcaaagacagagacaccaagaagaatcggaacatacaggctttgatatcaaaggtttataaagccaatatctgggaaagagaaaaccgtgagacttccagatcttctctggtgaagtgtgtttcctgcaacgatcacgaacatgaacatcaaaggatcgccatggaaagggtccctcctgctgctgctggtgtcaaacctgctcctgtgccagagcgtggcccccttgcccatctgtcccggcggggctgcccgatgccaggtgacccttcgagacctgtttgaccgcgccgtcgtcctgtcccactacatccataacctctcctcagaaatgttcagcgaattcgataaacggtatacccatggccgggggttcattaccaaggccatcaacagctgccacacttcttcccttgccacccccgaagacaaggagcaagcccaacagatgaatcaaaaagactttctgagcctgatagtcagcatattgcgatcctggaatgagcctctgtatcatctggtcacggaagtacgtggtatgcaagaagccccggaggctatcctatccaaagctgtagagattgaggagcaaaccaaacggcttctagagggcatggagctgatagtcagccaggttcatcctgaaaccaaagaaaatgagatctaccctgtctggtcgggacttccatccctgcagatggctgatgaagagtctcgcctttctgcttattataacctgctccactgcctacgcagggattcacataaaatcgacaattatctcaagcttagtagcccaatcccttcaccattccgggaagggctacaggacggtccatggagctctttagtggtatctttgaagccgcatcgggtgaagggccccttacagagacagggccctgaagttgtcttcccctctggggg

SEQ ID NO: 454349 - DNA, 980 bp, Homo sapiens
ctgacgtttctataaagtaggtcataagaaccttcattccagaagtaccctcaaagacagagacaccaagaagaatcggaacatacaggctttgatatcaaaggtttataaagccaatatctgggaaagagaaaaccgtgagacttccagatcttctctggtgaagtgtgtttcctgcaacgatcacgaacatgaacatcaaaggatcgccatggaaagggtccctcctgctgctgctggtgtcaaacctgctcctgtgccagagcgtggcccccttgcccatctgtcccggcggggctgcccgatgccaggtgacccttcgagacctgtttgaccgcgccgtcgtcctgtcccactacatccataacctctcctcagaaatgttcagcgaattcgataaacggtatacccatggccgggggttcattaccaaggccatcaacagctgccacacttcttcccttgccacccccgaagacaaggagcaagcccaacagatgaatcaaaaagactttctgagcctgatagtcagcatattgcgatcctggaatgagcctctgtatcatctggtcacggaagtacgtggtatgcaagaagccccggaggctatcctatccaaagctgtagagattgaggagcaaaccaaacggcttctagagggcatggagctgatagtcagccaggttcatcctgaaaccaaagaaaatgagatctaccctgtctggtcgggacttccatccctgcagatggctgatgaagagtctcgcctttctgcttattataacctgctccactgcctacgcagggattcacataaaatcgacaattatctcaagctgaatgcgaatctccaaaaaaatggtagccaatcattcacattcgaaagtctatatcgtcctgaaaacttcaagtacacttgaccgctgggtagggcccctaatggtcctaatatccttacccgggggggcccacctggttct

SEQ ID NO: 454350 - DNA, 951 bp, Homo sapiens
ctgacgtttctataaagtaggtcataagaaccttcattccagaagtaccctcaaagacagagacaccaagaagaatcggaacatacaggctttgatatcaaaggtttataaagccaatatctgggaaagagaaaaccgtgagacttccagatcttctctggtgaagtgtgtttcctgcaacgatcacgaacatgaacatcaaaggatcgccatggaaagggtccctcctgctgctgctggtgtcaaacctgctcctgtgccagagcgtggcccccttgcccatctgtcccggcggggctgcccgatgccaggtgacccttcgagacctgtttgaccgcgccgtcgtcctgtcccactacatccataacctctcctcagaaatgttcagcgaattcgataaacggtatacccatggccgggggttcattaccaaggccatcaacagctgccacacttcttcccttgccacccccgaagacaaggagcaagcccaacagatgaatcaaaaagactttctgagcctgatagtcagcatattgcgatcctggaatgagcctctgtatcatctggtcacggaagtacgtggtatgcaagaagccccggaggctatcctatccaaagctgtagagattgaggagcaaaccaaacggcttctagagggcatggagctgatagtcagccaggttcatcctgaaaccaaagaaaatgagatctaccctgtctggtcgggacttccatccctgcagatggctgatgaagagtctcgcctttctgcttattataacctgctccactgcctacgcagggattcacataaaatcgacaattatctcaagctcccttattgcccattctccagtcttaaggccgatcatccacaacatggtagccactccttatccttctggcgggcttatcggcataggaccgtgttctcacacacagcgtgac

SEQ ID NO: 454351 - DNA, 831 bp, Homo sapiens
  misc_feature (18)..(18): n is a, c, g, or t
ggtataagaagaggacanaaacattgtgcgacacttttatttccaccgctcagggtccctgtcaaacctgctcctgtgccagagcgtggcccccttgcccatctgtcccggcggggctgcccgatgccaggtgacccttccgccgtcgtcctgtcccactacatccataacctctcctcagaaatgttcagcgaattcgataaacggtatacccatggccgggggttcattaccaaggccatcaacagctgccacacttcttcccttgccacccccgaagacaaggagcaagcccaacagatgaatcaaaaagactttctgagcctgatagtcagcatattgcgatcctggaatgagcctctgtatcatctggtcacggaagtacgtggtatgcaagaagccccggaggctatcctatccaaagctgtagagattgaggagcaaaccaaacggcttctagagggcatggagctgatagtcagccaggttcatcctgaaaccaaagaaaatgagatctaccctgtctggtcgggacttccatccctgcagatggctgatgaagagtctcgcctttctgcttattataacctgctccactgcctacgcagggattcacataaaatcgacaattatctcaagctcctgaagtgccgaatcatccacaacaacaactgctaagcccacatccatttcatctatttctgagaaggtccttaatgatccgttccattgcaagcttcttttagttgtatctcttttgaatccatgcttgggtgtaacaggtctcctcttaaaaaataaaaactgactccttagagacatcaaaataaa

SEQ ID NO: 454352 - DNA, 743 bp, Homo sapiens
ggcactctgctgagtgtcccccccgggttcccgggccggcccctggggcccttttccgcccgtgtcttcccatcatcctacctctcctcagaatgtcacgaattcgatacgataaacggtatacccatggccgggggttcattaccaaggccatcaacagctgccacacttcttcccttgccacccccgaagacaaggagcaagcccaacagatgaatcaaaaagactttctgagcctgatagtcagcatattgcgatcctggaatgagcctctgtatcatctggtcacggaagtacgtggtatgcaagaagccccggaggctatcctatccaaagctgtagagattgaggagcaaaccaaacggcttctagagggcatggagctgatagtcagccaggttcatcctgaaaccaaagaaaatgagatctaccctgtctggtcgggacttccatccctgcagatggctgatgaagagtctcgcctttctgcttattataacctgctccactgcctacgcagggattcacataaaatcgacaattatctcaagctcctgaagtgccgaatcatccacaacaacaactgctaagcccacatccatttcatctatttctgagaaggtccttaatgatccgttccattgcaagcttcttttagttgtatctcttttgaatccatgcttgggtgtaacaggtctcctcttaaaaaataaaaactgactccttagagacatcaaaataaa

SEQ ID NO: 454353 - DNA, 770 bp, Homo sapiens
  misc_feature (576)..(576): n is a, c, g, or t
  misc_feature (579)..(579): n is a, c, g, or t
  misc_feature (598)..(598): n is a, c, g, or t
  misc_feature (634)..(634): n is a, c, g, or t
  misc_feature (675)..(675): n is a, c, g, or t
  misc_feature (695)..(695): n is a, c, g, or t
  misc_feature (710)..(710): n is a, c, g, or t
ctgacgtttctataaagtaggtcataagaaccttcattccagaagtaccctcaaagacagagacaccaagaagaatcggaacatacaggctttgatatcaaaggtttataaagccaatatctgggaaagagaaaaccgtgagacttccagatcttctctggtgaagtgtgtttcctgcaacgatcacgaacatgaacatcaaaggatcgccatggaaagggtccctcctgctgctgctggtgtcaaacctgctcctgtgccagagcgtggcccccttgcccatctgtcccggcggggctgcccgatgccaggtgacccttcgagacctgtttgaccgcgccgtcgtcctgtcccactacatccataacctctcctcagaaatgttcagcgaattcgataaacggtatacccatggccgggggttcattaccaaggccatcaacagctgccacacttcttcccttgccacccccgaagacaaggagcaagcccaacagatgaatcagctttctgagctgatagtagcatattggatcctgaatgacctctgatatctggcacggagtcgtggatganaancccgaggtatctatcaaantgagaattgagagaaaccaacggtctaaggcatgantatagcagcaggtatctgaccaagaaataactacctgctgncggattcatcctgaatggtntgagctcgcttctgnatatacctgtcatgctccaggattacattcgcattatctagctctgagtgcgatatccac

SEQ ID NO: 454354 - DNA, 988 bp, Homo sapiens
ggtgccgccccgctggctggatctctgtgggtgtcgcgtgctcgtcccgtgggttgtgggtttgctcgtgtgttggtctgtgcttcggctgcgtgcgcgcgccgttgtggggtctgctttggtgtggcgtgtctgtgctcccggcggcttgtccgtcgtacaacttgtgctaccctagagagaaagaagtccaactgggtaccctcaaccggtgtgtcccgccaaaccaggcccgaggcccggcggtgcaacgtctgcaaaggccgcatttcggggtgcaagcaggacctggagcggtggcgcccctggtcggcccggacaccagactccccagaatgtcaccgatttcgtagccgataaacggtatacccatggccgggggttcattaccaaggccatcaacagctgccacacttcttcccttgccacccccgaagacaaggagcaagcccaacagatgaatcaaaaagactttctgagcctgatagtcagcatattgcgatcctggaatgagcctctgtatcatctggtcacggaagtacgtggtatgcaagaagccccggaggctatcctatccaaagctgtagagattgaggagcaaaccaaacggcttctagagggcatggagctgatagtcagccaggttcatcctgaaaccaaagaaaatgagatctaccctgtctggtcgggacttccatccctgcagatggctgatgaagagtctcgcctttctgcttattataacctgctccactgcctacgcagggattcacataaaatcgacaattatctcaagctcctgaagtgccgaatcatccacaacaacaactgctaagcccacatccatttcatctatttctgagaaggtccttaatgatccgttccattgcaagcttcttttagttgtatctcttttgaatccatgcttgggtgtaacaggtctcctcttaaaaaataaaaactgactccttagagacatcaaaataaa

SEQ ID NO: 454355 - DNA, 586 bp, Homo sapiens
gatctcggaagctaagcaggtcgggcctggttagtacaaggagcaagcccaacagatgaatcaaaaagactttctgagcctgatagtcagcatattgcgatcctggaatgagcctctgtatcatctggtcacggaagtacgtggtatgcaagaagccccggaggctatcctatccaaagctgtagagattgaggagcaaaccaaacggcttctagagggcatggagctgatagtcagccaggttcatcctgaaaccaaagaaaatgagatctaccctgtctggtcgggacttccatccctgcagatggctgatgaagagtctcgcctttctgcttattataacctgctccactgcctacgcagggattcacataaaatcgacaattatctcaagctcctgaagtgccgaatcatccacaacaacaactgctaagcccacatccatttcatctatttctgagaaggtccttaatgatccgttccattgcaagcttcttttagttgtatctcttttgaatccatgcttgggtgtaacaggtctcctcttaaaaaataaaaactgactccttagagacatcaaaataaa

SEQ ID NO: 454356 - DNA, 752 bp, Homo sapiens
gatctcggaagctaagcaggtcgggcctggttagtacaaggagcaagcccaacagatgaatcaaaaagactttctgagcctgatagtcagcatattgcgatcctggaatgagcctctgtatcatctggtcacggaagtacgtggtatgcaagaagccccggaggctatcctatccaaagctgtagagattgaggagcaaaccaaacggcttctagagggcatggagctgatagtcagccaggttcatcctgaaaccaaagaaaatgagatctaccctgtctggtcgggacttccatccctgcagatggctgatgaagagtctcgcctttctgcttattataacctgctccactgcctacgcagggattcacataaaatcgacaattatctcaagctcctgaagtgccgaatcatccacaacaacaactgctaagcccacatccatttcatctatttctgagaaggtccttaatgatccgttccattgcaagcttcttttagttgtatctcttttgaatccatgcttgggtgtaacaggtctcctcttaaaaaataaaaactgactccttagagacatcaaaataaacacaaaaacgaaacagaaccaacaacgcgacaagaaccacgaagaaaaaaccggggggggcgggaccaatggccaagaggggggaaaatacggcgcggttaacgcgggagggaaccgggagcaataagcccgggacctgccggggaggcgcaggccggagcaggag

SEQ ID NO: 454357 - DNA, 1203 bp, Homo sapiens
ctgacgtttctataaagtaggtcataagaaccttcattccagaagtaccctcaaagacagagacaccaagaagaatcggaacatacaggctttgatatcaaaggtttataaagccaatatctgggaaagagaaaaccgtgagacttccagatcttctctggtgaagtgtgtttcctgcaacgatcacgaacatgaacatcaaaggatcgccatggaaagggtccctcctgctgctgctggtgtcaaacctgctcctgtgccagagcgtggcccccttgcccatctgtcccggcggggctgcccgatgccaggtgacccttcgagacctgtttgaccgcgccgtcgtcctgtcccactacatccataacctctcctcagaaatgttcagcgaattcgataaacggtatacccatggccgggggttcattaccaaggccatcaacagctgccacacttcttcccttgccacccccgaagacaaggagcaagcccaacagatgaatcaaaaagactttctgagcctgatagtcagcatattgcgatcctggaatgagcctctgtatcatctggtcacggaagtacgtggtatgcaagaagccccggaggctatcctatccaaagctgtagagattgaggagcaaaccaaacggcttctagagggcatggagctgatagtcagccaggttcatcctgaaaccaaagaaaatgagatctaccctgtctggtcgggacttccatccctgcagatggctgatgaagagtctcgcctttctgcttattataacctgctccactgcctacgcagggattcacataaaatcgacaattatctcaagctcctgaagtgccgaatcatccacaacaacaactgctaagcccacatccatttcatctatttctgagaaggtccttaatgatccgttccattgcaagcttcttttagttgtatctcttttgaatccatgcttgggtgtaacaggtctcctcttaaaaaataaaaactgactccttagagacatcaaaataaagaactccaaccttcacaacagcaacaacccggggggggcggtcccaacgccaaaggagcgataaacacggcgcgttaaaccgcgggaaccggggtccactatcctgagagaccccgccagggatcgccgcgtccgccaatgaggagaccatgaagacggctcagaggctccacgg

SEQ ID NO: 454358 - DNA, 1260 bp, Homo sapiens
  misc_feature (1257)..(1257): n is a, c, g, or t
  misc_feature (1260)..(1260): n is a, c, g, or t
ctgacgtttctataaagtaggtcataagaaccttcattccagaagtaccctcaaagacagagacaccaagaagaatcggaacatacaggctttgatatcaaaggtttataaagccaatatctgggaaagagaaaaccgtgagacttccagatcttctctggtgaagtgtgtttcctgcaacgatcacgaacatgaacatcaaaggatcgccatggaaagggtccctcctgctgctgctggtgtcaaacctgctcctgtgccagagcgtggcccccttgcccatctgtcccggcggggctgcccgatgccaggtgacccttcgagacctgtttgaccgcgccgtcgtcctgtcccactacatccataacctctcctcagaaatgttcagcgaattcgataaacggtatacccatggccgggggttcattaccaaggccatcaacagctgccacacttcttcccttgccacccccgaagacaaggagcaagcccaacagatgaatcaaaaagactttctgagcctgatagtcagcatattgcgatcctggaatgagcctctgtatcatctggtcacggaagtacgtggtatgcaagaagccccggaggctatcctatccaaagctgtagagattgaggagcaaaccaaacggcttctagagggcatggagctgatagtcagccaggttcatcctgaaaccaaagaaaatgagatctaccctgtctggtcgggacttccatccctgcagatggctgatgaagagtctcgcctttctgcttattataacctgctccactgcctacgcagggattcacataaaatcgacaattatctcaagctcctgaagtgccgaatcatccacaacaacaactgctaagcccacatccatttcatctatttctgagaaggtccttaatgatccgttccattgcaagcttcttttagttgtatctcttttgaatccatgcttgggtgtaacaggtctcctcttaaaaaataaaaactgactccttagagacatcaaaataaacacaaaaagaccaacacaacaaaacaaaaacacaccccgccgggaacggcacgcccgcccacaaccaatccccaccagacagaaacgcagccgaaacacaagaggctgaaacagaccgccacgtgcgtgccaagagagggtgttccaccaccgacacagccaaccacaccacacacaaccacgacgaacccagaccccgcaccacccacacacacagcacaccgcgggnttn

SEQ ID NO: 454359 - DNA, 1086 bp, Homo sapiens
ctgacgtttctataaagtaggtcataagaaccttcattccagaagtaccctcaaagacagagacaccaagaagaatcggaacatacaggctttgatatcaaaggtttataaagccaatatctgggaaagagaaaaccgtgagacttccagatcttctctggtgaagtgtgtttcctgcaacgatcacgaacatgaacatcaaaggatcgccatggaaagggtccctcctgctgctgctggtgtcaaacctgctcctgtgccagagcgtggcccccttgcccatctgtcccggcggggctgcccgatgccaggtgacccttcgagacctgtttgaccgcgccgtcgtcctgtcccactacatccataacctctcctcagaaatgttcagcgaattcgataaacggtatacccatggccgggggttcattaccaaggccatcaacagctgccacacttcttcccttgccacccccgaagacaaggagcaagcccaacagatgaatcaaaaagactttctgagcctgatagtcagcatattgcgatcctggaatgagcctctgtatcatctggtcacggaagtacgtggtatgcaagaagccccggaggctatcctatccaaagctgtagagattgaggagcaaaccaaacggcttctagagggcatggagctgatagtcagccaggttcatcctgaaaccaaagaaaatgagatctaccctgtctggtcgggacttccatccctgcagatggctgatgaagagtctcgcctttctgcttattataacctgctccactgcctacgcagggattcacataaaatcgacaattatctcaagctcctgaagtgccgaatcatccacaacaacaactgctaagcccacatccatttcatctatttctgagaaggtccttaatgatccgttccattgcaagcttcttttagttgtatctcttttgaatccatgcttgggtgtaacaggtctcctcttaaaaaataaaaactgactccttagagacatcaaaataaacacaaaaaaactcccttcggggggggccggtccaattggcctataagagtctttctcc

SEQ ID NO: 454360 - DNA, 1221 bp, Homo sapiens
ctgacgtttctataaagtaggtcataagaaccttcattccagaagtaccctcaaagacagagacaccaagaagaatcggaacatacaggctttgatatcaaaggtttataaagccaatatctgggaaagagaaaaccgtgagacttccagatcttctctggtgaagtgtgtttcctgcaacgatcacgaacatgaacatcaaaggatcgccatggaaagggtccctcctgctgctgctggtgtcaaacctgctcctgtgccagagcgtggcccccttgcccatctgtcccggcggggctgcccgatgccaggtgacccttcgagacctgtttgaccgcgccgtcgtcctgtcccactacatccataacctctcctcagaaatgttcagcgaattcgataaacggtatacccatggccgggggttcattaccaaggccatcaacagctgccacacttcttcccttgccacccccgaagacaaggagcaagcccaacagatgaatcaaaaagactttctgagcctgatagtcagcatattgcgatcctggaatgagcctctgtatcatctggtcacggaagtacgtggtatgcaagaagccccggaggctatcctatccaaagctgtagagattgaggagcaaaccaaacggcttctagagggcatggagctgatagtcagccaggttcatcctgaaaccaaagaaaatgagatctaccctgtctggtcgggacttccatccctgcagatggctgatgaagagtctcgcctttctgcttattataacctgctccactgcctacgcagggattcacataaaatcgacaattatctcaagctcctgaagtgccgaatcatccacaacaacaactgctaagcccacatccatttcatctatttctgagaaggtccttaatgatccgttccattgcaagcttcttttagttgtatctcttttgaatccatgcttgggtgtaacaggtctcctctggtaacctggcccttagaaactagtctacaagacaaacaaagaacacaccaccaacacacaacaacccgcgcggggccccgcaccatcgccgcagagcataaacagacggcgccaaacgccgtgaagacgcgcgccacccacggaccagcaacccagggacaagaacacccgcacacagcgcgcaaagcgcgcgctgacccagcccacgctgattctcgtccgccgcccctcg

SEQ ID NO: 454361 - DNA, 1229 bp, Homo sapiens
  misc_feature (1107)..(1107): n is a, c, g, or t
  misc_feature (1229)..(1229): n is a, c, g, or t
ctgacgtttctataaagtaggtcataagaaccttcattccagaagtaccctcaaagacagagacaccaagaagaatcggaacatacaggctttgatatcaaaggtttataaagccaatatctgggaaagagaaaaccgtgagacttccagatcttctctggtgaagtgtgtttcctgcaacgatcacgaacatgaacatcaaaggatcgccatggaaagggtccctcctgctgctgctggtgtcaaacctgctcctgtgccagagcgtggcccccttgcccatctgtcccggcggggctgcccgatgccaggtgacccttcgagacctgtttgaccgcgccgtcgtcctgtcccactacatccataacctctcctcagaaatgttcagcgaattcgataaacggtatacccatggccgggggttcattaccaaggccatcaacagctgccacacttcttcccttgccacccccgaagacaaggagcaagcccaacagatgaatcaaaaagactttctgagcctgatagtcagcatattgcgatcctggaatgagcctctgtatcatctggtcacggaagtacgtggtatgcaagaagccccggaggctatcctatccaaagctgtagagattgaggagcaaaccaaacggcttctagagggcatggagctgatagtcagccaggttcatcctgaaaccaaagaaaatgagatctaccctgtctggtcgggacttccatccctgcagatggctgatgaagagtctcgcctttctgcttattataacctgctccactgcctacgcagggattcacataaaatcgacaattatctcaagctcctgaagtgccgaatcatccacaacaacaactgctaagcccacatccatttcatctatttctgagaaggtccttaatgatccgttatgaccggccatggaggcttctaagggactccttgaccccgcggtgtaaggttcctacaataacggcccttgaacaacttaaacacaacgggggcggccaccgcatgagataaagggggctcagcggaaccgtcaaagagacactgggtaaggccctcggggcctattagccaacacaccttantgctacaacgctccacacaacacaacaccacccaccaacacaccacacgacaccaacaaacacaaagcaacaccagcagagcggcaacacaccacacagcggacgcaaacccgcaccagccn

SEQ ID NO: 454362 - DNA, 1090 bp, Homo sapiens
ctgacgtttctataaagtaggtcataagaaccttcattccagaagtaccctcaaagacagagacaccaagaagaatcggaacatacaggctttgatatcaaaggtttataaagccaatatctgggaaagagaaaaccgtgagacttccagatcttctctggtgaagtgtgtttcctgcaacgatcacgaacatgaacatcaaaggatcgccatggaaagggtccctcctgctgctgctggtgtcaaacctgctcctgtgccagagcgtggcccccttgcccatctgtcccggcggggctgcccgatgccaggtgacccttcgagacctgtttgaccgcgccgtcgtcctgtcccactacatccataacctctcctcagaaatgttcagcgaattcgataaacggtatacccatggccgggggttcattaccaaggccatcaacagctgccacacttcttcccttgccacccccgaagacaaggagcaagcccaacagatgaatcaaaaagactttctgagcctgatagtcagcatattgcgatcctggaatgagcctctgtatcatctggtcacggaagtacgtggtatgcaagaagccccggaggctatcctatccaaagctgtagagattgaggagcaaaccaaacggcttctagagggcatggagctgatagtcagccaggttcatcctgaaaccaaagaaaatgagatctaccctgtctggtcgggacttccatccctgcagatggctgatgaagagtctcgcctttctgcttattataacctgctccactgcctacgcagggattcacataaaatcgacaattatctcaagctcctgaagtgccgaatcatccacaacaacaactgctaagcccacatccatttcatctatttctgagaaggtccttaatgatccgttcattaagaggaacacatccgcacgcctggggggacacgggccctcctcaaggggggagcaacacaccaaggaggtgacaacacaggggccgcacgctggaggcgcgcagaacgcaggcacccccgcggagcaagacgcgccaacaccaccgactcgtagcgcacagg

SEQ ID NO: 454363 - DNA, 1044 bp, Homo sapiens
  misc_feature (1005)..(1006): n is a, c, g, or t
ctgacgtttctataaagtaggtcataagaaccttcattccagaagtaccctcaaagacagagacaccaagaagaatcggaacatacaggctttgatatcaaaggtttataaagccaatatctgggaaagagaaaaccgtgagacttccagatcttctctggtgaagtgtgtttcctgcaacgatcacgaacatgaacatcaaaggatcgccatggaaagggtccctcctgctgctgctggtgtcaaacctgctcctgtgccagagcgtggcccccttgcccatctgtcccggcggggctgcccgatgccaggtgacccttcgagacctgtttgaccgcgccgtcgtcctgtcccactacatccataacctctcctcagaaatgttcagcgaattcgataaacggtatacccatggccgggggttcattaccaaggccatcaacagctgccacacttcttcccttgccacccccgaagacaaggagcaagcccaacagatgaatcaaaaagactttctgagcctgatagtcagcatattgcgatcctggaatgagcctctgtatcatctggtcacggaagtacgtggtatgcaagaagccccggaggctatcctatccaaagctgtagagattgaggagcaaaccaaacggcttctagagggcatggagctgatagtcagccaggttcatcctgaaaccaaagaaaatgagatctaccctgtctggtcgggacttccatccctgcagatggctgatgaagagtctcgcctttctgcttattataacctgctccactgcctacgcagggattcacataaaatcgacaattatctcaagcttcattcactatctgcaggtctaatatcgtcatgcagctcttagtgaccctcacccggtggtgtacggccctcactggctagaccacaacaacagggcgcccaccaaagcagggcaacctgaaccccaagtacctggtgaaccacctgggttctatgccaagataggnnggacagacacacccgggccagcgtacacgatggcgacg

SEQ ID NO: 454364 - DNA, 1041 bp, Homo sapiens
ctgacgtttctataaagtaggtcataagaaccttcattccagaagtaccctcaaagacagagacaccaagaagaatcggaacatacaggctttgatatcaaaggtttataaagccaatatctgggaaagagaaaaccgtgagacttccagatcttctctggtgaagtgtgtttcctgcaacgatcacgaacatgaacatcaaaggatcgccatggaaagggtccctcctgctgctgctggtgtcaaacctgctcctgtgccagagcgtggcccccttgcccatctgtcccggcggggctgcccgatgccaggtgacccttcgagacctgtttgaccgcgccgtcgtcctgtcccactacatccataacctctcctcagaaatgttcagcgaattcgataaacggtatacccatggccgggggttcattaccaaggccatcaacagctgccacacttcttcccttgccacccccgaagacaaggagcaagcccaacagatgaatcaaaaagactttctgagcctgatagtcagcatattgcgatcctggaatgagcctctgtatcatctggtcacggaagtacgtggtatgcaagaagccccggaggctatcctatccaaagctgtagagattgaggagcaaaccaaacggcttctagagggcatggagctgatagtcagccaggttcatcctgaaaccaaagaaaatgagatctaccctgtctggtcgggacttccatccctgcagatggctgatgaagagtctcgcctttctgcttattataacctgctccactgcctacgcagggattcacataaaatcgacaattatctcaagcttgcttagccggattcctatacttgcgctttctcagtcctaagttcgaattccacacacaatggtagcccatccattccattctgcaggctttttccgccctgcagtcttatgatctttagaccctggtgcagcccttaaacactgctttcctgaaacacacctgtgggccccccaagtagcgctgagtacggttcaccctgtc

SEQ ID NO: 454365 - DNA, 1006 bp, Homo sapiens
ctgacgtttctataaagtaggtcataagaaccttcattccagaagtaccctcaaagacagagacaccaagaagaatcggaacatacaggctttgatatcaaaggtttataaagccaatatctgggaaagagaaaaccgtgagacttccagatcttctctggtgaagtgtgtttcctgcaacgatcacgaacatgaacatcaaaggatcgccatggaaagggtccctcctgctgctgctggtgtcaaacctgctcctgtgccagagcgtggcccccttgcccatctgtcccggcggggctgcccgatgccaggtgacccttcgagacctgtttgaccgcgccgtcgtcctgtcccactacatccataacctctcctcagaaatgttcagcgaattcgataaacggtatacccatggccgggggttcattaccaaggccatcaacagctgccacacttcttcccttgccacccccgaagacaaggagcaagcccaacagatgaatcaaaaagactttctgagcctgatagtcagcatattgcgatcctggaatgagcctctgtatcatctggtcacggaagtacgtggtatgcaagaagccccggaggctatcctatccaaagctgtagagattgaggagcaaaccaaacggcttctagagggcatggagctgatagtcagccaggttcatcctgaaaccaaagaaaatgagatctaccctgtctggtcgggacttccatccctgcagatggctgatgaagagtctcgcctttctgcttattataacctgctccactgcctacgcagggattcacataaaatcgacaattatctcaagctctttaatcggcatttttcaagatctgaatgcgaatctccaaaaaaatggtagccaatcattcacattcgaaagtctatatcgtcctgaggtctaaggattttgacagggggtggaagggttcttaaaaaaggcctctaaatattacaacaggggggggacacttatgg

SEQ ID NO: 454366 - DNA, 1007 bp, Homo sapiens
ctgacgtttctataaagtaggtcataagaaccttcattccagaagtaccctcaaagacagagacaccaagaagaatcggaacatacaggctttgatatcaaaggtttataaagccaatatctgggaaagagaaaaccgtgagacttccagatcttctctggtgaagtgtgtttcctgcaacgatcacgaacatgaacatcaaaggatcgccatggaaagggtccctcctgctgctgctggtgtcaaacctgctcctgtgccagagcgtggcccccttgcccatctgtcccggcggggctgcccgatgccaggtgacccttcgagacctgtttgaccgcgccgtcgtcctgtcccactacatccataacctctcctcagaaatgttcagcgaattcgataaacggtatacccatggccgggggttcattaccaaggccatcaacagctgccacacttcttcccttgccacccccgaagacaaggagcaagcccaacagatgaatcaaaaagactttctgagcctgatagtcagcatattgcgatcctggaatgagcctctgtatcatctggtcacggaagtacgtggtatgcaagaagccccggaggctatcctatccaaagctgtagagattgaggagcaaaccaaacggcttctagagggcatggagctgatagtcagccaggttcatcctgaaaccaaagaaaatgagatctaccctgtctggtcgggacttccatccctgcagatggctgatgaagagtctcgcctttctgcttattataacctgctccactgcctacgcagggattcacataaaatcgacaattatctcaagctacccagcccggaaggcgaacatccaacaacagggagccccaccatcaccaatcgggaagccaagaacgccaggagccccacggaccctgaacgccggggacaagcccctcaaaggggccgaccactcacacaccgggcgggccaccaggatgggcggcaggggccgcac

SEQ ID NO: 454367 - DNA, 958 bp, Homo sapiens
ctgacgtttctataaagtaggtcataagaaccttcattccagaagtaccctcaaagacagagacaccaagaagaatcggaacatacaggctttgatatcaaaggtttataaagccaatatctgggaaagagaaaaccgtgagacttccagatcttctctggtgaagtgtgtttcctgcaacgatcacgaacatgaacatcaaaggatcgccatggaaagggtccctcctgctgctgctggtgtcaaacctgctcctgtgccagagcgtggcccccttgcccatctgtcccggcggggctgcccgatgccaggtgacccttcgagacctgtttgaccgcgccgtcgtcctgtcccactacatccataacctctcctcagaaatgttcagcgaattcgataaacggtatacccatggccgggggttcattaccaaggccatcaacagctgccacacttcttcccttgccacccccgaagacaaggagcaagcccaacagatgaatcaaaaagactttctgagcctgatagtcagcatattgcgatcctggaatgagcctctgtatcatctggtcacggaagtacgtggtatgcaagaagccccggaggctatcctatccaaagctgtagagattgaggagcaaaccaaacggcttctagagggcatggagctgatagtcagccaggttcatcctgaaaccaaagaaaatgagatctaccctgtctggtcgggacttccatccctgcagatggctgatgaagagtctcgcctttctgcttattataacctgctccactgcctacgcagggattcacataaaatcgacaattatctcaagctcacaattccgagaggcgtaagagcggccatgcagtccttagcgacccttgaccaggaggcgaacggcccctaaagggcgcggccaaaccagggcgaccgcgcggcggaggcgacagggcc

SEQ ID NO: 454368 - DNA, 1026 bp, Homo sapiens
ctgacgtttctataaagtaggtcataagaaccttcattccagaagtaccctcaaagacagagacaccaagaagaatcggaacatacaggctttgatatcaaaggtttataaagccaatatctgggaaagagaaaaccgtgagacttccagatcttctctggtgaagtgtgtttcctgcaacgatcacgaacatgaacatcaaaggatcgccatggaaagggtccctcctgctgctgctggtgtcaaacctgctcctgtgccagagcgtggcccccttgcccatctgtcccggcggggctgcccgatgccaggtgacccttcgagacctgtttgaccgcgccgtcgtcctgtcccactacatccataacctctcctcagaaatgttcagcgaattcgataaacggtatacccatggccgggggttcattaccaaggccatcaacagctgccacacttcttcccttgccacccccgaagacaaggagcaagcccaacagatgaatcaaaaagactttctgagcctgatagtcagcatattgcgatcctggaatgagcctctgtatcatctggtcacggaagtacgtggtatgcaagaagccccggaggctatcctatccaaagctgtagagattgaggagcaaaccaaacggcttctagagggcatggagctgatagtcagccaggttcatcctgaaaccaaagaaaatgagatctaccctgtctggtcgggacttccatccctgcagatggctgatgaagagtctcgcctttctgcttattataacctgctccactgcctacgcagggattcacataaaatcgacaattatctcaagctgcccctggctaaccagggtccctttaacgcgcattttctaggccctgaatgcgaatctccaaaaaaatggtagccaatcattcacattcgaaagtctatatcgtcctgaaaacttcaagtacacttgaccgctgggtagggcccctaatggtcctaatatccttacccgggggggcccacctggttct

SEQ ID NO: 454369 - DNA, 1001 bp, Homo sapiens
ctgacgtttctataaagtaggtcataagaaccttcattccagaagtaccctcaaagacagagacaccaagaagaatcggaacatacaggctttgatatcaaaggtttataaagccaatatctgggaaagagaaaaccgtgagacttccagatcttctctggtgaagtgtgtttcctgcaacgatcacgaacatgaacatcaaaggatcgccatggaaagggtccctcctgctgctgctggtgtcaaacctgctcctgtgccagagcgtggcccccttgcccatctgtcccggcggggctgcccgatgccaggtgacccttcgagacctgtttgaccgcgccgtcgtcctgtcccactacatccataacgataaacggtatacccatggccgggggttcattaccaaggccatcaacagctgccacacttcttcccttgccacccccgaagacaaggagcaagcccaacagatgaatcaaaaagactttctgagcctgatagtcagcatattgcgatcctggaatgagcctctgtatcatctggtcacggaagtacgtggtatgcaagaagccccggaggctatcctatccaaagctgtagagattgaggagcaaaccaaacggcttctagagggcatggagctgatagtcagccaggttcatcctgaaaccaaagaaaatgagatctaccctgtctggtcgggacttccatccctgcagatggctgatgaagagtctcgcctttctgcttattataacctgctccactgcctacgcagggattcacataaaatcgacaattatctcaagctcctgaagtgccgaatcatccacaacaacaactgctaagcccacatccatttcatctatttctgagaaggtccttaatgatccgttccattgcaagcttcttttagttgtatctcttttgaatccatgcttgggtgtaacaggtctcctcttaaaaaataaaaactgactccttagagacatcaaaataaa

SEQ ID NO: 454370 - DNA, 790 bp, Homo sapiens
  misc_feature (713)..(713): n is a, c, g, or t
  misc_feature (786)..(786): n is a, c, g, or t
ctgacgtttctataaagtaggtcataagaaccttcattccagaagtaccctcaaagacagagacaccaagaagaatcggaacatacaggctttgatatcaaaggtttataaagccaatatctgggaaagagaaaaccgtgagacttccagatcttctctggtgaagtgtgtttcctgcaacgatcacgaacatgaacatcaaaggatcgccatggaaagggtccctcctgctgctgctggtgtcaaacctgctcctgtgccagagcgtggcccccttgcccatctgtcccggcggggctgcccgatgccaggtgacccttcgagacctgtttgaccgcgccgtcgtcctgtcccactacatccataacctctcctcagaaatgttcagcgaattcgataaacggtatacccatggccgggggttcattaccaaggccatcaacagctgccacacttcttcccttgccacccccgaagacaaggagcaagcccaacagatgaatcaaaaagactttctgagcctgatagtcagcatattgcgatcctggaatgagcctctgtatcatctggtcacggaagtacgtggtatgcaagaagccccggaggctatcctatccaaagctgtagagattgaggagcaaaccaaacggcttctagagggcatggagctgatagtcagccaggtcatctgaaccgtgagactacctgctggncggacttcatcctgagatggtgatggctcgctttggtatatactgtcaatgtaccaggatactaatgcatttntctg

SEQ ID NO: 454371 - DNA, 11130 bp, Homo sapiens
agggagcgtgcgggcggtactactggcgggaggagtaaagatggcggcgcgagggtctccgccctctgctccgggctgaagcgctctgagagaggcggcagcggcaactcgagccccaacagtaatttagtgttggtagttttggcagcagctgccgaggccggagcaatggcggaactggagcacctaggagggaagcgggcagagtcggcgcgaatgcggcgggcagagcagcttcggcgctggcggggctcgctgacagagcaggagcctgcggagcgacgaggcgcggggcggcagccgctgaccaggcgcgggagccccagggtccgcttcgaggacggtgctgtctttctggccgcctgctctagcggggacaccgacgaggtgagaaagcttctggcaagaggtgctgatatcaacacggtcaacgtggacggcttgacagccctgcaccaggcatgtattgatgaaaatttggacatggtgaagtttctggtggagaacagagccaatgtaaaccagcaagacaacgagggctggacaccccttcatgcagcagcttcctgtggctatctcaacatagcagagtatttcattaatcacggagccagtgtaggtattgtcaatagtgaaggtgaagttccctctgaccttgcagaagagccagccatgaaggatcttcttctggagcaagtaaagaagcaaggaattgatctagagcagtcaagaaaagaagaagagcagcagatgttgcaggatgcccgccagtggctcaacagtgggaaaatagaggatgtgaggcaggctcgctcaggggctacagcccttcatgtggctgctgccaagggctactctgaagtcctcagacttttaattcaggctggctatgaactcaatgttcaggattatgatggctggactcccctccatgctgctgcacactggggagtgaaggaggcttgctccatcctggcagaagcactttgtgacatggatattcgaaataaactgggccagacaccatttgatgtggctgatgagggtctcgtggagcatttggagttgctccagaagaagcagaatgtgcttcgaagtgaaaaggagacacggaataaactcattgagtcagatctgaacagcaagattcagagtgggttctttaagaacaaagagaagatgctctatgaggaggagacacctaagtcccaagaaatggaggaagaaaataaagaatctagtagctccagctcagaggaggaggaaggtgaagatgaagcttctgagtcagaaactgagaaggaggcagataaaaagccagaagcctttgtcaatcattccaactctgaaagcaagagtagtatcacagagcagataccagcaccagctcaaaataccttctctgcctcttctgctaggaggttctcttctggcctttttaacaagccagaagagcccaaagatgaatctccttcttcatggagattgggactgagaaaaactggcagccacaacatgctgagtgaggtggccaattccagggaacctataagggaccgaggctcttccatctatcgctcctcttcaagccctcgaatttctgctctactggacaacaaagataaggagagagaaaacaaaagctatattagttcactagcaccccggaagctcaacagcacaagtgatattgaagaaaaggagaacagagaatcagctgttaatctagtgaggagtggctcctatacccggcagctatggagggatgaagcaaaaggaaatgaaatcccacagacaattgctccctccacctatgtatcaacttacttgaaaaggactcctcacaaatcccaggccgacacaacagcagagaaaacagcagacaatgtctcttctagcaccccgctctgtgtgatcaccaatcgccctcttcctagcactgccaatggggttacagctactcctgtgctctccattactggaacagattcctctgtggaagccagggagaagaggaggtcctatctgactcctgtacgggatgaggaagcagagtctttacggaaagcacgctccagacaagctcggcagacacgaaggtctactcaaggtgtcaccctaacagaccttcaagaagcagaaaggacattcagccggtcgagggcagagaggcaagctcaggagcagcctcgtgagaagcccacagacactgaagggcttgaggggagccctgagaagcatgagccctcagcagttccagcaacagaagctggggagggccagcagccctggggcaggagtctggatgaagagcctatctgtcatcgcctgaggtgcccagctcagccagacaaacccaccacgccagcatctccttctacgtcaagaccctcactctacaccagttcccacctgctatggacaaatagattttcagtccctgattctgagagttcagagactaccacaaacactacaactgcaaaggaaatggacaaaaatgagaatgaagaagcagatttggatgagcagtcctctaagaggctgtccatccgagagaggaggcggcccaaggaacgacgaagaggcacaggcatcaatttctggacaaaggatgaggatgaaactgatggctctgaagaggtcaaagaaacgtggcatgaaagactttctaggttggaatcgggaggtagtaatcctacaaccagtgattcttacggtgaccgggcttcagcaagagcccgtcgggaggcccgggaggcccgcctagccaccctgaccagccgtgtagaagaagacagcaacagagattataaaaaactctatgagagtgctctgactgaaaaccaaaaactgaaaacaaaacttcaggaagcccagctagagctagcagatataaagtccaagcttgagaaggtggcccagcagaaacaagaaaagacctctgaccgatcatcagtgctggagatggagaaacgggagaggcgagccttggagcgcaaaatgtcagaaatggaggaagaaatgaaggtgttaacagaactgaaatccgacaaccagaggctgaaagatgaaaatggtgccctcatcagagtcatcagcaaactgtccaagtaggctaggctccagatttatgaggaaagaaagggacagcatttgctgcccccacccctcttttccagtccttgccttccaaccaaaagaaatggatgttttggtggaaggacacttctttctatcaccctcttcagtcacctctatacactctacattttctctgcactttcaatgccctgttcttccaaacccctatcccaagttttatgacagttttaattgaagcatgattgtggtaattcgagccatctggagaatgctctggggagtacaccaggctcagctgtggacccctcaacttcctgctgctcagctactttgtccacattggatttggtccaaacatgtaagacttctaccctaatcagtatccttcagctttttacattaacccagtgtcctctgatataggtgagtcttgtggtagccactccaggatcctgattggggtgccaagagaaacagcaggatgttgaattgatcatcagatgccctctggaatggttagcatccaaggtgacagtgactgcattgaggcgctctattcttcttcacctctcaggaactgacttttattttttctatcaacacccagtaatctccctaactagttttaacccttattcctccctcatacctagccatttctccaaggcgcaaatggccctggcttcatttattcctttcctttctatccttttatatttttcccttccccaccccctcactcaatggtataaaagctaggacagagcacctgacctcagttgtctttggccattgtgggaagtcattattctggagacaagaaaatcatcactctggtgccttggtggcagcaccactgcctgctccctggaaggtagactatggcataagtgtcagctcattgttttcgtctcccacttatcttcccccttcaaagtgattttctttataagaaaatttgggctctgaatactccattctgcctcacttccttgaccttgttttcctctcttcgccctgacacctgcttctaatgagaaatgaagtcagtgcaaggaggaatgagaggtggggaggggagattgttgagagatggactaggaagtggaagcaggctggaaagacacatatggcgaaagtcaagtatctgaggccacttgcaacattgtgacaaagaagatggaagatagcagcctactgggctgtgagaatagtggtgaatttgattatttccagtggttagatttagcagagagatttactttcttagaaattaataggggaaatggcacttaatagaggtttaatggaatgaagtactttcaacccattgatgagagtcatggaagtttagagtggcaagacccagaggtcattaggtccagctttctattattgtgtcacagggacccctgctaccacagctttcacccatgggcatggtcaggtagcctctggtggctatgcatttattactcaaaagttgggcaactctaataacgagagagtttttcctcatatcagctgaagtctgcctgtggattctccttgtagtccagatctactatctgcaactctttaacggcacttgagatatgtgcagtgggtggtctccccctcagtcttactttgagctgctgttactctagtcctttaagtcattcctcatatggcatgcttttcttacctgtcacatcttggccatcctcctctagacaaaaccagcctttaaaatatcatgtccaggcctggaaagaatacaaatccagtgcaaaattaaaccattagttcttgatgataacctagcattaatacttacagtattttctttttgtaggagttttatcccttggttcacttgagtgtgcaagtcattaaatcctcatcattttagggttgccagtgatattcagtgtttagagtggttcattcccttaatatatactacctctgtctgttaattctttcctaacatgacatgtagctctccatggtcctccctctgaaacaccacatgctgtttaaactagaagctgtaattcaagatcccaattccaccaggtgcagtggctcatgcctgtaatcccagcacttcaggaggccgaggtggacagatcacgaggtcaggagttcgagaccatcctggctaacacggtgaaacccaatctctactaaaaatacaaaaaattagccaggcgtggtggcaggcgcctgtagtcccagctactcaggaggctgaggcaggagaatggcgtgaacccgggaggcggagcttgcagtgagccttgatcacgccactgcactccagcctgggtgacagagcaagactccatctcaaaaaaaataataataataaataaataaaaaatcccaattacagaacaggagatatgtttcctctgacaaaaccccatttttagagtgtataaaattctgtctttcatttccaaccatttttcaagagaagctgctactatcttgagacttcgtattatcatgggagtactgtaagttcagttctcagggaatgctaaattagagtaataagttttatatccttcattctgggagaggaaatcaacataaggtgttgactaattgattatcctggaacattttgaatattggggaaggaagatgatacttctttctcaagaaaagaaaattggattattaggaatacatcttgacccttttccactcaatagaccagggaaaggggttacagagagcctcctcagatctgtttgtgcctttcaaaagtactgggggcagattctcaaaactcttagattggtgttgcatccctgccacttcacatgacccttccatgttaaagctgacttttcttgccagaaagttttccttgtgacaagaaatttgcaagcttttcaatctcaggaatactggattctatagccaagaactcatgaaagtaagtgtaaactatcctaggtaatttcaggtactttctcttatgcaattaattttattaactgatttctggtctatctccagagataaaataccattccttcacaactgtattgtctggaagccccatgagatggtaattataggccttctactagccagcagttctctctggatactggcatcagcaggtctcctttttcttgtgctgcttggacaggtacctactgctggcctcttcagtggccacaatcctcagtcctcacctgctggtttggagactcatgagcaccccaggcagctcaagctgaataaatagctgcagacatggccaacaacatggggctcaggtctgtcacttaacttagagtctttacatgaaatatcagaatgggaaagagaatgttcctggtaaaactctgttttcattaatttgttatttttcaaaaaccgagccacacctttggaagtaatgatttggccattccagagattctggggctaaagtttgtttttccagggctgctgatccttttccagatagctccagagtatgatgaccccagccccatcccaatctctagcgaaagggttatgcaaatctcagggtgttgcctctaaagaatctaaagaatagacatgctttgggcttactcagtgtaccagattctctagtgggccattctcatttgatgttccctagaacctccctgtcttccaactgcaggatgtgtttacttctcttctgggcttcccctggtttctgtcctagttcccaccccaagtttaagaagacttagattcatttattgctatctgaggccactagtgagatttcagatctctcttttgcaacattttacccatttcccttccccaaaccatgtgcttattagatggttccactcaggaagcaaggaagctaaaactcaagttaatggtctgtggatcccacgaaagtgtgtgtaaactactgactgtttctccactagaggcatttaattgagccaaagatgatggaagaagaaactctcaaagccatgtactttgttaggtgtctggatttttggcctgtttgcagcctctcctagccacagacagacactgtctcctctcagagaaaggccagtgtttcggtccaggccactggtgagtgtcggcacccttgaggtgggcatggagtgagcagaagaagcctggagaagagagaactatttaaaagtgttgccagttattcagcttccaggcggctttgcacctccaaaggtgcaaaaaggaaaaagaaagcagaaaggattcagcatttaagcagaaagaaaagggaaattctactctaccagatgagccactggttccactggagcttatcagtgaagtaacactgcaggagccctggtatccttccctcagagatatcatcaggggccctcaaaccccattgtttatgccagcactgaccgcactttaagcacacacttaccaatcagaggtcgtgtaattggcctaaatctaggcccagttattactacaaatcttagtcaccatactctctcgcccaggctggagtgcagtggtgtgatctcagctcactgcaacctccacctcccaggctcaagggatcctctcacctcagctcccgagcagctaggactgcaggtgtgcaccaccatgcccagctaatttttgaatttttttgtagagatggggttttgccatgttgcccaggctggtctgaagctgctgggctcaagcaatccacctggctgggcctcccaaagcgataggattacaggcgtaagggcccacgcccagcctaccatactgattttcaaggcagggtctaacccttcataagatgtgagttcttccaacccaataagcaggcagctttgaggacaaaaaggcaacattaaaagataagaccctagaagtcagaacatctgtattccaaggccaccccttctccttttagtcatgtgactttgggcaggtcaccctccctgtctgtaaaatgaggttggactggataatctttatgtgccctttccttttggcttaaaattctgtgatttattcattcttaggaagatcagcatatttattgggatttctgcttcaaaaattctttctaacctcaaaaatccaagtccagaattttttgttttcttctggatttaaactgtttaatatgagcacatcaaggttgacttctcatcctttttgggaagtgaatttaatattgagggtaattgaatgatgttgcaatggctttccctcctgctggcttggtaagaatattaaagcctgcagaggtggaaattggagctcatggagaaatggatagaaagcaatttgttgcaggcagcctttggacaagttgttttaataggaaatagacctgctgcttcataggtttcctcaaccacctttcctcagctttcttaaaatgggatctacattggctcttcacacccaaatagcagactaatcgtttttctgcttagcaccgtctggttcattgtcttgaactctgccttacagcagcaagaaaattttcctcgacaagaacctcaatctttagttccattgagctccccctctggattttggacttaccagaagtaggaggttctgataccattcaagatggtctttccttcaaagcaggtctgaagaggagactaccaaagcagtgtttacaaacccagagtccacacaaccatattgcatagaacagcacttggctttcacaagcctcctacaggacctggtgtaattggagtgaaagggcagagaccctggaagtggaggtggctgtgtgctgcgatgggaagaaggcagaaggcccaggggctttggacatagagcagggtggaagctgcaagtactgggaaggaagagagtttcacagaaacaaagctttgtcacacagaaatgagttctgtctcactggtgacttcatccctcaggctccagctgagcagagattttaatcagcttccttaatgggtattgacactgctcaggaagcagtagaccctgtcagggacagctattgatcttttgtgttctgattagattggaaaatagatcaacttcattgtagtccaggaactgttggtcacagctactaggaatgaggtgatttctgagggctgagaaaaaacacagaatcttggccagcagccagcagctgcatggtgaaagatgcattcacttctcctttgagagttggggttgagggcaaacatagaacccaggtttggcttacaacccagtgtcccggaagccctccttcgggagaactgtaagtaagaggtgggtgtgtctaaagacaataccattaatgaatgttctggccttacctaaaaaggtttagcaatttggggataactcttggatctagcttatgtgcgttcacatgcacatttgctagcccagagcttttaaaatgaggtctggcatatacttgattacaaatgaaaactcagaaaccaattttatttattaaatcatatcttttgtttttccccctcccttctaatcccccaaaggacctatttgagctgttccccaattcatctgcttattttggaccatgaatctgccagagtgatattttctgttatttctcctccaaatttttccctgatgtttccaataaagatttacttgggtggccccttaaggtgacatcaggatgctcttatgtccttccagaataagcatacacttcactcctctccctttcatctccctctgcattcttaattccttgcttttctcacttggagccgagggtgctttagagaggtggttttccatgaatcagccaagattcctgtagaagttgggtataccaaccaccaccaccaccgccccctattccagtttcaaagctcctcggctatgctaatgtcccctcagagatgaggtttgacttttaggcccgtatgactcctccatagcctggccaaggagaccatgagtagccatgtctggtttactctttatcctgagactgtttgtttatagcttaaaacagaagtgtgtcttcccagcacaaacctaatcaatcagtgtatcagtgcatctggtggcaacagctcagcccattcaaagagcaaggattcaggaaaggcacactgatggtggggagcctcttaagagcctctaatgttctcccaaaaccagagttgagagtcggagtgccagtcgtcggggcccactattcctgaataagggacatgcaagggccagaagtagcttgactctcgcctaaatatctgtgcctttgcctgtcctttctcccactctactgaaacccggaacagattcccgcttgccttctgatgaagagaggttaggtaaagagagtttggaggaaaaaagacaccaggaggcaggctgcggggtaggagagggttctgagaggaggcagcaatccagaatacctccttttctagccagcatcccttgaacttttgaaaggttgtgcctaccactggctggcacaccagggcaatgatttccctgcagaaggaaggaaagaatgtttcacccttgcatccttcttggagaagctacagcctgtgctcagttgagtggttcacactcagactttggctttatggttttccttcctccttgtctttgccctgaccttgatcaacaggggtgaaaagaaccaccctgaggtttccatgcctctcccattttagtggtagcattttgtgtctttactccacccttcaccctagttccaccaaggttcacacaccagatgtaactgtttttcagctgagttgtatggattaacttcagtccactgtaaatacacctgggatggggtggggttggggttgtttagggagaagcagccagacttgctttgtgaactgaatgtatttttatgcaattttgagtggcctttcaaccctaagatgaatggttttgttttactggttgttgttatatagttttgagtattctgtgtttgaaagtttgggaataataatattcacttctatatgatgcctgtaaacacaacagtatttataaatgagtaaataaaactgtgttttaactttg

SEQ ID NO: 454372 - DNA, 11294 bp, Homo sapiens
agggagcgtgcgggcggtactactggcgggaggagtaaagatggcggcgcgagggtctccgccctctgctccgggctgaagcgctctgagagaggcggcagcggcaactcgagccccaacagtaatttagtgttggtagttttggcagcagctgccgaggccggagcaatggcggaactggagcacctaggagggaagcgggcagagtcggcgcgaatgcggcgggcagagcagcttcggcgctggcggggctcgctgacagagcaggagcctgcggagcgacgaggcgcggggcggcagccgctgaccaggcgcgggagccccagggtccgcttcgaggacggtgctgtctttctggccgcctgctctagcggggacaccgacgaggtgagaaagcttctggcaagaggtgctgatatcaacacggtcaacgtggacggcttgacagccctgcaccaggcatgtattgatgaaaatttggacatggtgaagtttctggtggagaacagagccaatgtaaaccagcaagacaacgagggctggacaccccttcatgcagcagcttcctgtggctatctcaacatagcagagtatttcattaatcacggagccagtgtaggtattgtcaatagtgaaggtgaagttccctctgaccttgcagaagagccagccatgaaggatcttcttctggagcaagtaaagaagcaaggaattgatctagagcagtcaagaaaagaagaagagcagcagatgttgcaggatgcccgccagtggctcaacagtgggaaaatagaggatgtgaggcaggctcgctcaggggctacagcccttcatgtggctgctgccaagggctactctgaagtcctcagacttttaattcaggctggctatgaactcaatgttcaggattatgatggctggactcccctccatgctgctgcacactggggagtgaaggaggcttgctccatcctggcagaagcactttgtgacatggatattcgaaataaactgggccagacaccatttgatgtggctgatgagggtctcgtggagcatttggagttgctccagaagaagcagaatgtgcttcgaagtgaaaaggagacacggaataaactcattgagtcagatctgaacagcaagattcagagtgggttctttaagaacaaagagaagatgctctatgaggaggagacacctaagtcccaagaaatggaggaagaaaataaagaatctagtagctccagctcagaggaggaggaaggtgaagatgaagcttctgagtcagaaactgagaaggaggcagataaaaagccagaagcctttgtcaatcattccaactctgaaagcaagagtagtatcacagagcagataccagcaccagctcaaaataccttctctgcctcttctgctaggaggttctcttctggcctttttaacaagccagaagagcccaaagatgaatctccttcttcatggagattgggactgagaaaaactggcagccacaacatgctgagtgaggtggccaattccagggaacctataagggaccgaggctcttccatctatcgctcctcttcaagccctcgaatttctgctctactggacaacaaagataaggagagagaaaacaaaagctatattagttcactagcaccccggaagctcaacagcacaagtgatattgaagaaaaggagaacagagaatcagctgttaatctagtgaggagtggctcctatacccggcagctatggagggatgaagcaaaaggaaatgaaatcccacagacaattgctccctccacctatgtatcaacttacttgaaaaggactcctcacaaatcccaggccgacacaacagcagagaaaacagcagacaatgtctcttctagcaccccgctctgtgtgatcaccaatcgccctcttcctagcactgccaatggggttacagctactcctgtgctctccattactggaacagattcctctgtggaagccagggagaagaggaggtcctatctgactcctgtacgggatgaggaagcagagtctttacggaaagcacgctccagacaagctcggcagacacgaaggtctactcaaggtgtcaccctaacagaccttcaagaagcagaaaggacattcagccggtcgagggcagagaggcaagctcaggagcagcctcgtgagaagcccacagacactgaagggcttgaggggagccctgagaagcatgagccctcagcagttccagcaacagaagctggggagggccagcagccctggggcaggagtctggatgaagagcctatctgtcatcgcctgaggtgcccagctcagccagacaaacccaccacgccagcatctccttctacgtcaagaccctcactctacaccagttcccacctgctatggacaaatagattttcagtccctgattctgagagttcagagactaccacaaacactacaactgcaaaggaaatggacaaaaatgagaatgaagaagcagatttggatgagcagtcctctaagaggctgtccatccgagagaggaggcggcccaaggaacgacgaagaggcacaggcatcaatttctggacaaaggatgaggatgaaactgatggctctgaagaggtcaaagaaacgtgggttggaatcgggaggtagtaatcctacaaccagtgattcttacggtgaccgggcttcagcaagagcccgtcgggaggcccgggaggcccgcctagccaccctgaccagccgtgtagaagaagacagcaacagagattataaaaaactctatgagagtgctctgactgaaaaccaaaaactgaaaacaaaacttcaggaagcccagctagagctagcagatataaagtccaagcttgagaaggtggcccagcagaaacaagaaaagacctctgaccgatcatcagtgctggagatggagaaacgggagaggcgagccttggagcgcaaaatgtcagaaatggaggaagaaatgaagaacctccaccagctaaaacagattcaaaccttgaagcagatgaacgagcaactgcaggctgagaacagggccctgacccgagtggtggccagactctcggagtccatcgagtcctcggacacccaggagctctagttcttgcccctactctccaactcacttccctcctccactactccaggtgttaacagaactgaaatccgacaaccagaggctgaaagatgaaaatggtgccctcatcagagtcatcagcaaactgtccaagtaggctaggctccagatttatgaggaaagaaagggacagcatttgctgcccccacccctcttttccagtccttgccttccaaccaaaagaaatggatgttttggtggaaggacacttctttctatcaccctcttcagtcacctctatacactctacattttctctgcactttcaatgccctgttcttccaaacccctatcccaagttttatgacagttttaattgaagcatgattgtggtaattcgagccatctggagaatgctctggggagtacaccaggctcagctgtggacccctcaacttcctgctgctcagctactttgtccacattggatttggtccaaacatgtaagacttctaccctaatcagtatccttcagctttttacattaacccagtgtcctctgatataggtgagtcttgtggtagccactccaggatcctgattggggtgccaagagaaacagcaggatgttgaattgatcatcagatgccctctggaatggttagcatccaaggtgacagtgactgcattgaggcgctctattcttcttcacctctcaggaactgacttttattttttctatcaacacccagtaatctccctaactagttttaacccttattcctccctcatacctagccatttctccaaggcgcaaatggccctggcttcatttattcctttcctttctatccttttatatttttcccttccccaccccctcactcaatggtataaaagctaggacagagcacctgacctcagttgtctttggccattgtgggaagtcattattctggagacaagaaaatcatcactctggtgccttggtggcagcaccactgcctgctccctggaaggtagactatggcataagtgtcagctcattgttttcgtctcccacttatcttcccccttcaaagtgattttctttataagaaaatttgggctctgaatactccattctgcctcacttccttgaccttgttttcctctcttcgccctgacacctgcttctaatgagaaatgaagtcagtgcaaggaggaatgagaggtggggaggggagattgttgagagatggactaggaagtggaagcaggctggaaagacacatatggcgaaagtcaagtatctgaggccacttgcaacattgtgacaaagaagatggaagatagcagcctactgggctgtgagaatagtggtgaatttgattatttccagtggttagatttagcagagagatttactttcttagaaattaataggggaaatggcacttaatagaggtttaatggaatgaagtactttcaacccattgatgagagtcatggaagtttagagtggcaagacccagaggtcattaggtccagctttctattattgtgtcacagggacccctgctaccacagctttcacccatgggcatggtcaggtagcctctggtggctatgcatttattactcaaaagttgggcaactctaataacgagagagtttttcctcatatcagctgaagtctgcctgtggattctccttgtagtccagatctactatctgcaactctttaacggcacttgagatatgtgcagtgggtggtctccccctcagtcttactttgagctgctgttactctagtcctttaagtcattcctcatatggcatgcttttcttacctgtcacatcttggccatcctcctctagacaaaaccagcctttaaaatatcatgtccaggcctggaaagaatacaaatccagtgcaaaattaaaccattagttcttgatgataacctagcattaatacttacagtattttctttttgtaggagttttatcccttggttcacttgagtgtgcaagtcattaaatcctcatcattttagggttgccagtgatattcagtgtttagagtggttcattcccttaatatatactacctctgtctgttaattctttcctaacatgacatgtagctctccatggtcctccctctgaaacaccacatgctgtttaaactagaagctgtaattcaagatcccaattccaccaggtgcagtggctcatgcctgtaatcccagcacttcaggaggccgaggtggacagatcacgaggtcaggagttcgagaccatcctggctaacacggtgaaacccaatctctactaaaaatacaaaaaattagccaggcgtggtggcaggcgcctgtagtcccagctactcaggaggctgaggcaggagaatggcgtgaacccgggaggcggagcttgcagtgagccttgatcacgccactgcactccagcctgggtgacagagcaagactccatctcaaaaaaaataataataataaataaataaaaaatcccaattacagaacaggagatatgtttcctctgacaaaaccccatttttagagtgtataaaattctgtctttcatttccaaccatttttcaagagaagctgctactatcttgagacttcgtattatcatgggagtactgtaagttcagttctcagggaatgctaaattagagtaataagttttatatccttcattctgggagaggaaatcaacataaggtgttgactaattgattatcctggaacattttgaatattggggaaggaagatgatacttctttctcaagaaaagaaaattggattattaggaatacatcttgacccttttccactcaatagaccagggaaaggggttacagagagcctcctcagatctgtttgtgcctttcaaaagtactgggggcagattctcaaaactcttagattggtgttgcatccctgccacttcacatgacccttccatgttaaagctgacttttcttgccagaaagttttccttgtgacaagaaatttgcaagcttttcaatctcaggaatactggattctatagccaagaactcatgaaagtaagtgtaaactatcctaggtaatttcaggtactttctcttatgcaattaattttattaactgatttctggtctatctccagagataaaataccattccttcacaactgtattgtctggaagccccatgagatggtaattataggccttctactagccagcagttctctctggatactggcatcagcaggtctcctttttcttgtgctgcttggacaggtacctactgctggcctcttcagtggccacaatcctcagtcctcacctgctggtttggagactcatgagcaccccaggcagctcaagctgaataaatagctgcagacatggccaacaacatggggctcaggtctgtcacttaacttagagtctttacatgaaatatcagaatgggaaagagaatgttcctggtaaaactctgttttcattaatttgttatttttcaaaaaccgagccacacctttggaagtaatgatttggccattccagagattctggggctaaagtttgtttttccagggctgctgatccttttccagatagctccagagtatgatgaccccagccccatcccaatctctagcgaaagggttatgcaaatctcagggtgttgcctctaaagaatctaaagaatagacatgctttgggcttactcagtgtaccagattctctagtgggccattctcatttgatgttccctagaacctccctgtcttccaactgcaggatgtgtttacttctcttctgggcttcccctggtttctgtcctagttcccaccccaagtttaagaagacttagattcatttattgctatctgaggccactagtgagatttcagatctctcttttgcaacattttacccatttcccttccccaaaccatgtgcttattagatggttccactcaggaagcaaggaagctaaaactcaagttaatggtctgtggatcccacgaaagtgtgtgtaaactactgactgtttctccactagaggcatttaattgagccaaagatgatggaagaagaaactctcaaagccatgtactttgttaggtgtctggatttttggcctgtttgcagcctctcctagccacagacagacactgtctcctctcagagaaaggccagtgtttcggtccaggccactggtgagtgtcggcacccttgaggtgggcatggagtgagcagaagaagcctggagaagagagaactatttaaaagtgttgccagttattcagcttccaggcggctttgcacctccaaaggtgcaaaaaggaaaaagaaagcagaaaggattcagcatttaagcagaaagaaaagggaaattctactctaccagatgagccactggttccactggagcttatcagtgaagtaacactgcaggagccctggtatccttccctcagagatatcatcaggggccctcaaaccccattgtttatgccagcactgaccgcactttaagcacacacttaccaatcagaggtcgtgtaattggcctaaatctaggcccagttattactacaaatcttagtcaccatactctctcgcccaggctggagtgcagtggtgtgatctcagctcactgcaacctccacctcccaggctcaagggatcctctcacctcagctcccgagcagctaggactgcaggtgtgcaccaccatgcccagctaatttttgaatttttttgtagagatggggttttgccatgttgcccaggctggtctgaagctgctgggctcaagcaatccacctggctgggcctcccaaagcgataggattacaggcgtaagggcccacgcccagcctaccatactgattttcaaggcagggtctaacccttcataagatgtgagttcttccaacccaataagcaggcagctttgaggacaaaaaggcaacattaaaagataagaccctagaagtcagaacatctgtattccaaggccaccccttctccttttagtcatgtgactttgggcaggtcaccctccctgtctgtaaaatgaggttggactggataatctttatgtgccctttccttttggcttaaaattctgtgatttattcattcttaggaagatcagcatatttattgggatttctgcttcaaaaattctttctaacctcaaaaatccaagtccagaattttttgttttcttctggatttaaactgtttaatatgagcacatcaaggttgacttctcatcctttttgggaagtgaatttaatattgagggtaattgaatgatgttgcaatggctttccctcctgctggcttggtaagaatattaaagcctgcagaggtggaaattggagctcatggagaaatggatagaaagcaatttgttgcaggcagcctttggacaagttgttttaataggaaatagacctgctgcttcataggtttcctcaaccacctttcctcagctttcttaaaatgggatctacattggctcttcacacccaaatagcagactaatcgtttttctgcttagcaccgtctggttcattgtcttgaactctgccttacagcagcaagaaaattttcctcgacaagaacctcaatctttagttccattgagctccccctctggattttggacttaccagaagtaggaggttctgataccattcaagatggtctttccttcaaagcaggtctgaagaggagactaccaaagcagtgtttacaaacccagagtccacacaaccatattgcatagaacagcacttggctttcacaagcctcctacaggacctggtgtaattggagtgaaagggcagagaccctggaagtggaggtggctgtgtgctgcgatgggaagaaggcagaaggcccaggggctttggacatagagcagggtggaagctgcaagtactgggaaggaagagagtttcacagaaacaaagctttgtcacacagaaatgagttctgtctcactggtgacttcatccctcaggctccagctgagcagagattttaatcagcttccttaatgggtattgacactgctcaggaagcagtagaccctgtcagggacagctattgatcttttgtgttctgattagattggaaaatagatcaacttcattgtagtccaggaactgttggtcacagctactaggaatgaggtgatttctgagggctgagaaaaaacacagaatcttggccagcagccagcagctgcatggtgaaagatgcattcacttctcctttgagagttggggttgagggcaaacatagaacccaggtttggcttacaacccagtgtcccggaagccctccttcgggagaactgtaagtaagaggtgggtgtgtctaaagacaataccattaatgaatgttctggccttacctaaaaaggtttagcaatttggggataactcttggatctagcttatgtgcgttcacatgcacatttgctagcccagagcttttaaaatgaggtctggcatatacttgattacaaatgaaaactcagaaaccaattttatttattaaatcatatcttttgtttttccccctcccttctaatcccccaaaggacctatttgagctgttccccaattcatctgcttattttggaccatgaatctgccagagtgatattttctgttatttctcctccaaatttttccctgatgtttccaataaagatttacttgggtggccccttaaggtgacatcaggatgctcttatgtccttccagaataagcatacacttcactcctctccctttcatctccctctgcattcttaattccttgcttttctcacttggagccgagggtgctttagagaggtggttttccatgaatcagccaagattcctgtagaagttgggtataccaaccaccaccaccaccgccccctattccagtttcaaagctcctcggctatgctaatgtcccctcagagatgaggtttgacttttaggcccgtatgactcctccatagcctggccaaggagaccatgagtagccatgtctggtttactctttatcctgagactgtttgtttatagcttaaaacagaagtgtgtcttcccagcacaaacctaatcaatcagtgtatcagtgcatctggtggcaacagctcagcccattcaaagagcaaggattcaggaaaggcacactgatggtggggagcctcttaagagcctctaatgttctcccaaaaccagagttgagagtcggagtgccagtcgtcggggcccactattcctgaataagggacatgcaagggccagaagtagcttgactctcgcctaaatatctgtgcctttgcctgtcctttctcccactctactgaaacccggaacagattcccgcttgccttctgatgaagagaggttaggtaaagagagtttggaggaaaaaagacaccaggaggcaggctgcggggtaggagagggttctgagaggaggcagcaatccagaatacctccttttctagccagcatcccttgaacttttgaaaggttgtgcctaccactggctggcacaccagggcaatgatttccctgcagaaggaaggaaagaatgtttcacccttgcatccttcttggagaagctacagcctgtgctcagttgagtggttcacactcagactttggctttatggttttccttcctccttgtctttgccctgaccttgatcaacaggggtgaaaagaaccaccctgaggtttccatgcctctcccattttagtggtagcattttgtgtctttactccacccttcaccctagttccaccaaggttcacacaccagatgtaactgtttttcagctgagttgtatggattaacttcagtccactgtaaatacacctgggatggggtggggttggggttgtttagggagaagcagccagacttgctttgtgaactgaatgtatttttatgcaattttgagtggcctttcaaccctaagatgaatggttttgttttactggttgttgttatatagttttgagtattctgtgtttgaaagtttgggaataataatattcacttctatatgatgcctgtaaacacaacagtatttataaatgagtaaataaaactgtgttttaactttg

SEQ ID NO: 454373 - DNA, 773 bp, Homo sapiens
agggagcgtgcgggcggtactactggcgggaggagtaaagatggcggcgcgaggggtccgcttcgaggacggtgctgtctttctggccgcctgctctagcggggacaccgacgaggtgagaaagcttctggcaagaggtgctgatatcaacacggtcaacgtggacggcttgacagccctgcaccaggtaactcctttcttggtcttagaggcgtccagtctcctacagatgcgcctttgaccctgcgagccaccccatggggagtatcagtgttgccgccgactccttctgcatggacactgcccttttgggctaatcggtttcattcttggccagcttcctccactaatcaagtctttttctgaccccagggtcttaggaatagcgtcaccccgctgcttggtcagtgtttgtatttccctccacctacttgtgttgtcatggttactggtgatttttgtccctggtcttatccctgtagattagttatcttcacttatgtctggttggcgtgcctgcacaccgcgtcactcataggcacagtgtcatttgtttgatgccctttcagaaaattcagttgttgtgtgtccccgttatagaatatcttatatcacttaaagagtaaagccctttactgggtaaagacaagcaggtctgaaaccacacctcttgttttgttgatttgtagtacttcaaaacagtttgtgttgcctctaggctacagctcctagaacacgctggacctcgttgttttaggtatcttaacttcctt

SEQ ID NO: 454374 - DNA, 689 bp, Homo sapiens
gtttaaaaaggtgctatccctaatgcctcaaatctagtgaatcatggcatgcaaagaagtgtgaactagggctaagtcacctttgtgtagtcaatttgattgcttttcttaaatggcacccccatctccagctgtgaagttcagccatctgatttgaaaagtgcatttatagatggaaataatacaaatcagtctcttgctaatgctgttttcttttcttttttctttttttgtttttgtttttgtctcctttctctagcatgaaagactttctaggttggaatcgggaggtagtaatcctacaaccagtgattcttacggtgaccgggcttcagcaagagcccgtcgggaggcccgggaggcccgcctagccaccctgaccagccgtgtagaagaagacagcaacagagattataaaaaactctatgagagtgctctgactgaaaaccaaaaactgaaaacaaaacttcaggaagcccagctagagctagcagatataaagtccaagcttgagaaggtggcccagcagaaacaagaaaagacctctgaccgatcatcagtgctggagatggagaaacgggtatgaagagattttctttctttttgtatgcctgttctctgaatgcctgccaagactggatatttgagcataggcctgccccctccagatttcactacaaactcaatat

SEQ ID NO: 454375 - DNA, 224 bp, Homo sapiens
gttgctggtacaatctcataaaatgggctccagtgtttagagaaggacagtcagaggagtggccacctgtttgttgaaaattgggcttctgggaaagttgctgcacaagtgtgtggcaaggtgtgtctgaggtagcttgacctgctttcacctggaatgatttgatctgactatgaagatccaaaccaaaccaaggaatctggaatacagggacacgaatgtag

SEQ ID NO: 454376 - DNA, 9648 bp, Homo sapiens
gttgctggtacaatctcataaaatgggctccagtgtttagagaaggacagtcagaggagtggccacctgtttgttgaaaattgggcttctgggaaagttgctgcacaagtgtgtggcaaggtgtgtctgaggtagcttgacctgctttcacctggaatgatttgatctggcaatagagttccttgccattcctggttttatggaaatcagaggcacaggaagttgatctgggtgttctggggaattgagacaagcctctgccatagtttgttagtactctgtgtttggaggctaactccagtgtgctgagttgagacatcagcaagtgctgggcctggaatgtcagaagcagcaggtcctatctgactcctgtacgggatgaggaagcagagtctttacggaaagcacgctccagacaagctcggcagacacgaaggtctactcaaggtgtcaccctaacagaccttcaagaagcagaaaggacattcagccggtcgagggcagagaggcaagctcaggagcagcctcgtgagaagcccacagacactgaagggcttgaggggagccctgagaagcatgagccctcagcagttccagcaacagaagctggggagggccagcagccctggggcaggagtctggatgaagagcctatctgtcatcgcctgaggtgcccagctcagccagacaaacccaccacgccagcatctccttctacgtcaagaccctcactctacaccagttcccacctgctatggacaaatagattttcagtccctgattctgagagttcagagactaccacaaacactacaactgcaaaggaaatggacaaaaatgagaatgaagaagcagatttggatgagcagtcctctaagaggctgtccatccgagagaggaggcggcccaaggaacgacgaagaggcacaggcatcaatttctggacaaaggatgaggatgaaactgatggctctgaagaggtcaaagaaacgtggcatgaaagactttctaggttggaatcgggaggtagtaatcctacaaccagtgattcttacggtgaccgggcttcagcaagagcccgtcgggaggcccgggaggcccgcctagccaccctgaccagccgtgtagaagaagacagcaacagagattataaaaaactctatgagagtgctctgactgaaaaccaaaaactgaaaacaaaacttcaggaagcccagctagagctagcagatataaagtccaagcttgagaaggtggcccagcagaaacaagaaaagacctctgaccgatcatcagtgctggagatggagaaacgggagaggcgagccttggagcgcaaaatgtcagaaatggaggaagaaatgaagaacctccaccagctaaaacagattcaaaccttgaagcagatgaacgagcaactgcaggctgagaacagggccctgacccgagtggtggccagactctcggagtccatcgagtcctcggacacccaggagctctagttcttgcccctactctccaactcacttccctcctccactactccaggtgttaacagaactgaaatccgacaaccagaggctgaaagatgaaaatggtgccctcatcagagtcatcagcaaactgtccaagtaggctaggctccagatttatgaggaaagaaagggacagcatttgctgcccccacccctcttttccagtccttgccttccaaccaaaagaaatggatgttttggtggaaggacacttctttctatcaccctcttcagtcacctctatacactctacattttctctgcactttcaatgccctgttcttccaaacccctatcccaagttttatgacagttttaattgaagcatgattgtggtaattcgagccatctggagaatgctctggggagtacaccaggctcagctgtggacccctcaacttcctgctgctcagctactttgtccacattggatttggtccaaacatgtaagacttctaccctaatcagtatccttcagctttttacattaacccagtgtcctctgatataggtgagtcttgtggtagccactccaggatcctgattggggtgccaagagaaacagcaggatgttgaattgatcatcagatgccctctggaatggttagcatccaaggtgacagtgactgcattgaggcgctctattcttcttcacctctcaggaactgacttttattttttctatcaacacccagtaatctccctaactagttttaacccttattcctccctcatacctagccatttctccaaggcgcaaatggccctggcttcatttattcctttcctttctatccttttatatttttcccttccccaccccctcactcaatggtataaaagctaggacagagcacctgacctcagttgtctttggccattgtgggaagtcattattctggagacaagaaaatcatcactctggtgccttggtggcagcaccactgcctgctccctggaaggtagactatggcataagtgtcagctcattgttttcgtctcccacttatcttcccccttcaaagtgattttctttataagaaaatttgggctctgaatactccattctgcctcacttccttgaccttgttttcctctcttcgccctgacacctgcttctaatgagaaatgaagtcagtgcaaggaggaatgagaggtggggaggggagattgttgagagatggactaggaagtggaagcaggctggaaagacacatatggcgaaagtcaagtatctgaggccacttgcaacattgtgacaaagaagatggaagatagcagcctactgggctgtgagaatagtggtgaatttgattatttccagtggttagatttagcagagagatttactttcttagaaattaataggggaaatggcacttaatagaggtttaatggaatgaagtactttcaacccattgatgagagtcatggaagtttagagtggcaagacccagaggtcattaggtccagctttctattattgtgtcacagggacccctgctaccacagctttcacccatgggcatggtcaggtagcctctggtggctatgcatttattactcaaaagttgggcaactctaataacgagagagtttttcctcatatcagctgaagtctgcctgtggattctccttgtagtccagatctactatctgcaactctttaacggcacttgagatatgtgcagtgggtggtctccccctcagtcttactttgagctgctgttactctagtcctttaagtcattcctcatatggcatgcttttcttacctgtcacatcttggccatcctcctctagacaaaaccagcctttaaaatatcatgtccaggcctggaaagaatacaaatccagtgcaaaattaaaccattagttcttgatgataacctagcattaatacttacagtattttctttttgtaggagttttatcccttggttcacttgagtgtgcaagtcattaaatcctcatcattttagggttgccagtgatattcagtgtttagagtggttcattcccttaatatatactacctctgtctgttaattctttcctaacatgacatgtagctctccatggtcctccctctgaaacaccacatgctgtttaaactagaagctgtaattcaagatcccaattccaccaggtgcagtggctcatgcctgtaatcccagcacttcaggaggccgaggtggacagatcacgaggtcaggagttcgagaccatcctggctaacacggtgaaacccaatctctactaaaaatacaaaaaattagccaggcgtggtggcaggcgcctgtagtcccagctactcaggaggctgaggcaggagaatggcgtgaacccgggaggcggagcttgcagtgagccttgatcacgccactgcactccagcctgggtgacagagcaagactccatctcaaaaaaaataataataataaataaataaaaaatcccaattacagaacaggagatatgtttcctctgacaaaaccccatttttagagtgtataaaattctgtctttcatttccaaccatttttcaagagaagctgctactatcttgagacttcgtattatcatgggagtactgtaagttcagttctcagggaatgctaaattagagtaataagttttatatccttcattctgggagaggaaatcaacataaggtgttgactaattgattatcctggaacattttgaatattggggaaggaagatgatacttctttctcaagaaaagaaaattggattattaggaatacatcttgacccttttccactcaatagaccagggaaaggggttacagagagcctcctcagatctgtttgtgcctttcaaaagtactgggggcagattctcaaaactcttagattggtgttgcatccctgccacttcacatgacccttccatgttaaagctgacttttcttgccagaaagttttccttgtgacaagaaatttgcaagcttttcaatctcaggaatactggattctatagccaagaactcatgaaagtaagtgtaaactatcctaggtaatttcaggtactttctcttatgcaattaattttattaactgatttctggtctatctccagagataaaataccattccttcacaactgtattgtctggaagccccatgagatggtaattataggccttctactagccagcagttctctctggatactggcatcagcaggtctcctttttcttgtgctgcttggacaggtacctactgctggcctcttcagtggccacaatcctcagtcctcacctgctggtttggagactcatgagcaccccaggcagctcaagctgaataaatagctgcagacatggccaacaacatggggctcaggtctgtcacttaacttagagtctttacatgaaatatcagaatgggaaagagaatgttcctggtaaaactctgttttcattaatttgttatttttcaaaaaccgagccacacctttggaagtaatgatttggccattccagagattctggggctaaagtttgtttttccagggctgctgatccttttccagatagctccagagtatgatgaccccagccccatcccaatctctagcgaaagggttatgcaaatctcagggtgttgcctctaaagaatctaaagaatagacatgctttgggcttactcagtgtaccagattctctagtgggccattctcatttgatgttccctagaacctccctgtcttccaactgcaggatgtgtttacttctcttctgggcttcccctggtttctgtcctagttcccaccccaagtttaagaagacttagattcatttattgctatctgaggccactagtgagatttcagatctctcttttgcaacattttacccatttcccttccccaaaccatgtgcttattagatggttccactcaggaagcaaggaagctaaaactcaagttaatggtctgtggatcccacgaaagtgtgtgtaaactactgactgtttctccactagaggcatttaattgagccaaagatgatggaagaagaaactctcaaagccatgtactttgttaggtgtctggatttttggcctgtttgcagcctctcctagccacagacagacactgtctcctctcagagaaaggccagtgtttcggtccaggccactggtgagtgtcggcacccttgaggtgggcatggagtgagcagaagaagcctggagaagagagaactatttaaaagtgttgccagttattcagcttccaggcggctttgcacctccaaaggtgcaaaaaggaaaaagaaagcagaaaggattcagcatttaagcagaaagaaaagggaaattctactctaccagatgagccactggttccactggagcttatcagtgaagtaacactgcaggagccctggtatccttccctcagagatatcatcaggggccctcaaaccccattgtttatgccagcactgaccgcactttaagcacacacttaccaatcagaggtcgtgtaattggcctaaatctaggcccagttattactacaaatcttagtcaccatactctctcgcccaggctggagtgcagtggtgtgatctcagctcactgcaacctccacctcccaggctcaagggatcctctcacctcagctcccgagcagctaggactgcaggtgtgcaccaccatgcccagctaatttttgaatttttttgtagagatggggttttgccatgttgcccaggctggtctgaagctgctgggctcaagcaatccacctggctgggcctcccaaagcgataggattacaggcgtaagggcccacgcccagcctaccatactgattttcaaggcagggtctaacccttcataagatgtgagttcttccaacccaataagcaggcagctttgaggacaaaaaggcaacattaaaagataagaccctagaagtcagaacatctgtattccaaggccaccccttctccttttagtcatgtgactttgggcaggtcaccctccctgtctgtaaaatgaggttggactggataatctttatgtgccctttccttttggcttaaaattctgtgatttattcattcttaggaagatcagcatatttattgggatttctgcttcaaaaattctttctaacctcaaaaatccaagtccagaattttttgttttcttctggatttaaactgtttaatatgagcacatcaaggttgacttctcatcctttttgggaagtgaatttaatattgagggtaattgaatgatgttgcaatggctttccctcctgctggcttggtaagaatattaaagcctgcagaggtggaaattggagctcatggagaaatggatagaaagcaatttgttgcaggcagcctttggacaagttgttttaataggaaatagacctgctgcttcataggtttcctcaaccacctttcctcagctttcttaaaatgggatctacattggctcttcacacccaaatagcagactaatcgtttttctgcttagcaccgtctggttcattgtcttgaactctgccttacagcagcaagaaaattttcctcgacaagaacctcaatctttagttccattgagctccccctctggattttggacttaccagaagtaggaggttctgataccattcaagatggtctttccttcaaagcaggtctgaagaggagactaccaaagcagtgtttacaaacccagagtccacacaaccatattgcatagaacagcacttggctttcacaagcctcctacaggacctggtgtaattggagtgaaagggcagagaccctggaagtggaggtggctgtgtgctgcgatgggaagaaggcagaaggcccaggggctttggacatagagcagggtggaagctgcaagtactgggaaggaagagagtttcacagaaacaaagctttgtcacacagaaatgagttctgtctcactggtgacttcatccctcaggctccagctgagcagagattttaatcagcttccttaatgggtattgacactgctcaggaagcagtagaccctgtcagggacagctattgatcttttgtgttctgattagattggaaaatagatcaacttcattgtagtccaggaactgttggtcacagctactaggaatgaggtgatttctgagggctgagaaaaaacacagaatcttggccagcagccagcagctgcatggtgaaagatgcattcacttctcctttgagagttggggttgagggcaaacatagaacccaggtttggcttacaacccagtgtcccggaagccctccttcgggagaactgtaagtaagaggtgggtgtgtctaaagacaataccattaatgaatgttctggccttacctaaaaaggtttagcaatttggggataactcttggatctagcttatgtgcgttcacatgcacatttgctagcccagagcttttaaaatgaggtctggcatatacttgattacaaatgaaaactcagaaaccaattttatttattaaatcatatcttttgtttttccccctcccttctaatcccccaaaggacctatttgagctgttccccaattcatctgcttattttggaccatgaatctgccagagtgatattttctgttatttctcctccaaatttttccctgatgtttccaataaagatttacttgggtggccccttaaggtgacatcaggatgctcttatgtccttccagaataagcatacacttcactcctctccctttcatctccctctgcattcttaattccttgcttttctcacttggagccgagggtgctttagagaggtggttttccatgaatcagccaagattcctgtagaagttgggtataccaaccaccaccaccaccgccccctattccagtttcaaagctcctcggctatgctaatgtcccctcagagatgaggtttgacttttaggcccgtatgactcctccatagcctggccaaggagaccatgagtagccatgtctggtttactctttatcctgagactgtttgtttatagcttaaaacagaagtgtgtcttcccagcacaaacctaatcaatcagtgtatcagtgcatctggtggcaacagctcagcccattcaaagagcaaggattcaggaaaggcacactgatggtggggagcctcttaagagcctctaatgttctcccaaaaccagagttgagagtcggagtgccagtcgtcggggcccactattcctgaataagggacatgcaagggccagaagtagcttgactctcgcctaaatatctgtgcctttgcctgtcctttctcccactctactgaaacccggaacagattcccgcttgccttctgatgaagagaggttaggtaaagagagtttggaggaaaaaagacaccaggaggcaggctgcggggtaggagagggttctgagaggaggcagcaatccagaatacctccttttctagccagcatcccttgaacttttgaaaggttgtgcctaccactggctggcacaccagggcaatgatttccctgcagaaggaaggaaagaatgtttcacccttgcatccttcttggagaagctacagcctgtgctcagttgagtggttcacactcagactttggctttatggttttccttcctccttgtctttgccctgaccttgatcaacaggggtgaaaagaaccaccctgaggtttccatgcctctcccattttagtggtagcattttgtgtctttactccacccttcaccctagttccaccaaggttcacacaccagatgtaactgtttttcagctgagttgtatggattaacttcagtccactgtaaatacacctgggatggggtggggttggggttgtttagggagaagcagccagacttgctttgtgaactgaatgtatttttatgcaattttgagtggcctttcaaccctaagatgaatggttttgttttactggttgttgttatatagttttgagtattctgtgtttgaaagtttgggaataataatattcacttctatatgatgcctgtaaacacaacagtatttataaatgagtaaataaaactgtgttttaactttg

SEQ ID NO: 454377 - DNA, 10105 bp, Homo sapiens
agggagcgtgcgggcggtactactggcgggaggagtaaagatggcggcgcgagggtctccgccctctgctccgggctgaagcgctctgagagaggcggcagcggcaactcgagccccaacagtaatttagtgttggtagttttggcagcagctgccgaggccggagcaatggcggaactggagcacctaggagggaagcgggcagagtcggcgcgaatgcggcgggcagagcagcttcggcgctggcggggctcgctgacagagcaggagcctgcggagcgacgaggcgcggggcggcagccgctgaccaggcgcgggagccccagggtccgcttcgaggacggtgctgtctttctggccgcctgctctagcggggacaccgacgaggtgagaaagcttctggcaagaggtgctgatatcaacacggtcaacgtggacggcttgacagccctgcaccaggcatgtattgatgaaaatttggacatggtgaagtttctggtggagaacagagccaatgtaaaccagcaagacaacgagggctggacaccccttcatgcagcagcttcctgtggctatctcaacatagcagagtatttcattaatcacggagccagtgtaggtattgtcaatagtgaaggtgaagttccctctgaccttgcagaagagccagccatgaaggatcttcttctggagcaagtaaagaagcaaggaattgatctagagcagtcaagaaaagaagaagagcagcagatgttgcaggatgcccgccagtggctcaacagtgggaaaatagaggatgtgaggcaggctcgctcaggggctacagcccttcatgtggctgctgccaagggctactctgaagtcctcagacttttaattcaggctggctatgaactcaatgttcaggattatgatggctggactcccctccatgctgctgcacactggggagtgaaggaggcttgctccatcctggcagaagcactttgtgacatggatattcgaaataaactgggccagacaccatttgatgtggctgatgagggtctcgtggagcatttggagttgctccagaagaagcagaatgtgcttcgaagtgaaaaggagacacggaataaactcattgagtcagatctgaacagcaagattcagagtgggttctttaagaacaaagagaagatgctctatgaggaggagacacctaagtcccaagaaatggaggaagaaaataaagaatctagtagctccagctcagaggaggaggaaggtgaagatgaagcttctgagtcagaaactgagaaggaggcagataaaaagccagaagcctttgtcaatcattccaactctgaaagcaagagtagtatcacagagcagataccagcaccagctcaaaataccttctctgcctcttctgctaggaggttctcttctggcctttttaacaagccagaagagcccaaagatgaatctccttcttcatggagattgggactgagaaaaactggcagccacaacatgctgagtgaggtggccaattccagggaacctataagggaccgaggctcttccatctatcgctcctcttcaagccctcgaatttctgctctactggacaacaaagataaggagagagaaaacaaaagctatattagttcactagcaccccggaagctcaacagcacaagtgatattgaagaaaaggagaacagagaatcagctgttaatctagtgaggagtggctcctatacccggcagctatggagggatgaagcaaaaggaaatgaaatcccacagacaattgctccctccacctatgtatcaacttacttgaaaaggactcctcacaaatcccaggccgacacaacagcagagaaaacagcagacaatgtctcttctagcaccccgctctgtgtgatcaccaatcgccctcttcctagcactgccaatggggttacagctactcctgtgctctccattactggaacagattcctctgtggaagccagggagaagaggaggtcctatctgactcctgtacgggatgaggaagcagagtctttacggaaagcacgctccagacaagctcggcagacacgaaggtctactcaaggtgtcaccctaacagaccttcaagaagcagaaaggacattcagccggtcgagggcagagaggcaagctcaggagcagcctcgtgagaagcccacagacactgaagggcttgaggggagccctgagaagcatgagccctcagcagttccagcaacagaagctggggagggccagcagccctggggcaggagtctggatgaagagcctatctgtcatcgcctgaggtgcccagctcagccagacaaacccaccacgccagcatctccttctacgtcaagaccctcactctacaccagttcccacctgctatggacaaatagattttcagtccctgattctgagagttcagagactaccacaaacactacaactgcaaaggaaatggacaaaaatgagaatgaagaagcagatttggatgagcagtcctctaagaggctgtccatccgagagaggaggcggcccaaggaacgacgaagaggcacaggcatcaatttctggacaaaggatgaggatgaaactgatggctctgaagaggtcaaagaaacgtggcatgaaagactttctaggttggaatcgggaggtagtaatcctacaaccagtgattcttacggtgaccgggcttcagcaagagcccgtcgggaggcccgggaggcccgcctagccaccctgaccagccgtgtagaagaagacagcaacagagattataaaaaactctatgagagtgctctgactgaaaaccaaaaactgaaaacaaaacttcaggaagcccagctagagctagcagatataaagtccaagcttgagaaggtggcccagcagaaacaagaaaagacctctgaccgatcatcagtgctggagatggagaaacgggagaggcgagccttggagcgcaaaatgtcagaaatggaggaagaaatgaaggtgttaacagaactgaaatccgacaaccagaggctgaaagatgaaaatggtgccctcatcagagtcatcagcaaactgtccaagtaggctaggctccagatttatgaggaaagaaagggacagcatttgctgcccccacccctcttttccagtccttgccttccaaccaaaagaaatggatgttttggtggaaggacacttctttctatcaccctcttcagtcacctctatacactctacattttctctgcactttcaatgccctgttcttccaaacccctatcccaagttttatgacagttttaattgaagcatgattgtggtaattcgagccatctggagaatgctctggggagtacaccaggctcagctgtggacccctcaacttcctgctgctcagctactttgtccacattggatttggtccaaacatgtaagacttctaccctaatcagtatccttcagctttttacattaacccagtgtcctctgatataggtgagtcttgtggtagccactccaggatcctgattggggtgccaagagaaacagcaggatgttgaattgatcatcagatgccctctggaatggttagcatccaaggtgacagtgactgcattgaggcgctctattcttcttcacctctcaggaactgacttttattttttctatcaacacccagtaatctccctaactagttttaacccttattcctccctcatacctagccatttctccaaggcgcaaatggccctggcttcatttattcctttcctttctatccttttatgtccaggcctggaaagaatacaaatccagtgcaaaattaaaccattagttcttgatgataacctagcattaatacttacagtattttctttttgtaggagttttatcccttggttcacttgagtgtgcaagtcattaaatcctcatcattttagggttgccagtgatattcagtgtttagagtggttcattcccttaatatatactacctctgtctgttaattctttcctaacatgacatgtagctctccatggtcctccctctgaaacaccacatgctgtttaaactagaagctgtaattcaagatcccaattccaccaggtgcagtggctcatgcctgtaatcccagcacttcaggaggccgaggtggacagatcacgaggtcaggagttcgagaccatcctggctaacacggtgaaacccaatctctactaaaaatacaaaaaattagccaggcgtggtggcaggcgcctgtagtcccagctactcaggaggctgaggcaggagaatggcgtgaacccgggaggcggagcttgcagtgagccttgatcacgccactgcactccagcctgggtgacagagcaagactccatctcaaaaaaaataataataataaataaataaaaaatcccaattacagaacaggagatatgtttcctctgacaaaaccccatttttagagtgtataaaattctgtctttcatttccaaccatttttcaagagaagctgctactatcttgagacttcgtattatcatgggagtactgtaagttcagttctcagggaatgctaaattagagtaataagttttatatccttcattctgggagaggaaatcaacataaggtgttgactaattgattatcctggaacattttgaatattggggaaggaagatgatacttctttctcaagaaaagaaaattggattattaggaatacatcttgacccttttccactcaatagaccagggaaaggggttacagagagcctcctcagatctgtttgtgcctttcaaaagtactgggggcagattctcaaaactcttagattggtgttgcatccctgccacttcacatgacccttccatgttaaagctgacttttcttgccagaaagttttccttgtgacaagaaatttgcaagcttttcaatctcaggaatactggattctatagccaagaactcatgaaagtaagtgtaaactatcctaggtaatttcaggtactttctcttatgcaattaattttattaactgatttctggtctatctccagagataaaataccattccttcacaactgtattgtctggaagccccatgagatggtaattataggccttctactagccagcagttctctctggatactggcatcagcaggtctcctttttcttgtgctgcttggacaggtacctactgctggcctcttcagtggccacaatcctcagtcctcacctgctggtttggagactcatgagcaccccaggcagctcaagctgaataaatagctgcagacatggccaacaacatggggctcaggtctgtcacttaacttagagtctttacatgaaatatcagaatgggaaagagaatgttcctggtaaaactctgttttcattaatttgttatttttcaaaaaccgagccacacctttggaagtaatgatttggccattccagagattctggggctaaagtttgtttttccagggctgctgatccttttccagatagctccagagtatgatgaccccagccccatcccaatctctagcgaaagggttatgcaaatctcagggtgttgcctctaaagaatctaaagaatagacatgctttgggcttactcagtgtaccagattctctagtgggccattctcatttgatgttccctagaacctccctgtcttccaactgcaggatgtgtttacttctcttctgggcttcccctggtttctgtcctagttcccaccccaagtttaagaagacttagattcatttattgctatctgaggccactagtgagatttcagatctctcttttgcaacattttacccatttcccttccccaaaccatgtgcttattagatggttccactcaggaagcaaggaagctaaaactcaagttaatggtctgtggatcccacgaaagtgtgtgtaaactactgactgtttctccactagaggcatttaattgagccaaagatgatggaagaagaaactctcaaagccatgtactttgttaggtgtctggatttttggcctgtttgcagcctctcctagccacagacagacactgtctcctctcagagaaaggccagtgtttcggtccaggccactggtgagtgtcggcacccttgaggtgggcatggagtgagcagaagaagcctggagaagagagaactatttaaaagtgttgccagttattcagcttccaggcggctttgcacctccaaaggtgcaaaaaggaaaaagaaagcagaaaggattcagcatttaagcagaaagaaaagggaaattctactctaccagatgagccactggttccactggagcttatcagtgaagtaacactgcaggagccctggtatccttccctcagagatatcatcaggggccctcaaaccccattgtttatgccagcactgaccgcactttaagcacacacttaccaatcagaggtcgtgtaattggcctaaatctaggcccagttattactacaaatcttagtcaccatactctctcgcccaggctggagtgcagtggtgtgatctcagctcactgcaacctccacctcccaggctcaagggatcctctcacctcagctcccgagcagctaggactgcaggtgtgcaccaccatgcccagctaatttttgaatttttttgtagagatggggttttgccatgttgcccaggctggtctgaagctgctgggctcaagcaatccacctggctgggcctcccaaagcgataggattacaggcgtaagggcccacgcccagcctaccatactgattttcaaggcagggtctaacccttcataagatgtgagttcttccaacccaataagcaggcagctttgaggacaaaaaggcaacattaaaagataagaccctagaagtcagaacatctgtattccaaggccaccccttctccttttagtcatgtgactttgggcaggtcaccctccctgtctgtaaaatgaggttggactggataatctttatgtgccctttccttttggcttaaaattctgtgatttattcattcttaggaagatcagcatatttattgggatttctgcttcaaaaattctttctaacctcaaaaatccaagtccagaattttttgttttcttctggatttaaactgtttaatatgagcacatcaaggttgacttctcatcctttttgggaagtgaatttaatattgagggtaattgaatgatgttgcaatggctttccctcctgctggcttggtaagaatattaaagcctgcagaggtggaaattggagctcatggagaaatggatagaaagcaatttgttgcaggcagcctttggacaagttgttttaataggaaatagacctgctgcttcataggtttcctcaaccacctttcctcagctttcttaaaatgggatctacattggctcttcacacccaaatagcagactaatcgtttttctgcttagcaccgtctggttcattgtcttgaactctgccttacagcagcaagaaaattttcctcgacaagaacctcaatctttagttccattgagctccccctctggattttggacttaccagaagtaggaggttctgataccattcaagatggtctttccttcaaagcaggtctgaagaggagactaccaaagcagtgtttacaaacccagagtccacacaaccatattgcatagaacagcacttggctttcacaagcctcctacaggacctggtgtaattggagtgaaagggcagagaccctggaagtggaggtggctgtgtgctgcgatgggaagaaggcagaaggcccaggggctttggacatagagcagggtggaagctgcaagtactgggaaggaagagagtttcacagaaacaaagctttgtcacacagaaatgagttctgtctcactggtgacttcatccctcaggctccagctgagcagagattttaatcagcttccttaatgggtattgacactgctcaggaagcagtagaccctgtcagggacagctattgatcttttgtgttctgattagattggaaaatagatcaacttcattgtagtccaggaactgttggtcacagctactaggaatgaggtgatttctgagggctgagaaaaaacacagaatcttggccagcagccagcagctgcatggtgaaagatgcattcacttctcctttgagagttggggttgagggcaaacatagaacccaggtttggcttacaacccagtgtcccggaagccctccttcgggagaactgtaagtaagaggtgggtgtgtctaaagacaataccattaatgaatgttctggccttacctaaaaaggtttagcaatttggggataactcttggatctagcttatgtgcgttcacatgcacatttgctagcccagagcttttaaaatgaggtctggcatatacttgattacaaatgaaaactcagaaaccaattttatttattaaatcatatcttttgtttttccccctcccttctaatcccccaaaggacctatttgagctgttccccaattcatctgcttattttggaccatgaatctgccagagtgatattttctgttatttctcctccaaatttttccctgatgtttccaataaagatttacttgggtggccccttaaggtgacatcaggatgctcttatgtccttccagaataagcatacacttcactcctctccctttcatctccctctgcattcttaattccttgcttttctcacttggagccgagggtgctttagagaggtggttttccatgaatcagccaagattcctgtagaagttgggtataccaaccaccaccaccaccgccccctattccagtttcaaagctcctcggctatgctaatgtcccctcagagatgaggtttgacttttaggcccgtatgactcctccatagcctggccaaggagaccatgagtagccatgtctggtttactctttatcctgagactgtttgtttatagcttaaaacagaagtgtgtcttcccagcacaaacctaatcaatcagtgtatcagtgcatctggtggcaacagctcagcccattcaaagagcaaggattcaggaaaggcacactgatggtggggagcctcttaagagcctctaatgttctcccaaaaccagagttgagagtcggagtgccagtcgtcggggcccactattcctgaataagggacatgcaagggccagaagtagcttgactctcgcctaaatatctgtgcctttgcctgtcctttctcccactctactgaaacccggaacagattcccgcttgccttctgatgaagagaggttaggtaaagagagtttggaggaaaaaagacaccaggaggcaggctgcggggtaggagagggttctgagaggaggcagcaatccagaatacctccttttctagccagcatcccttgaacttttgaaaggttgtgcctaccactggctggcacaccagggcaatgatttccctgcagaaggaaggaaagaatgtttcacccttgcatccttcttggagaagctacagcctgtgctcagttgagtggttcacactcagactttggctttatggttttccttcctccttgtctttgccctgaccttgatcaacaggggtgaaaagaaccaccctgaggtttccatgcctctcccattttagtggtagcattttgtgtctttactccacccttcaccctagttccaccaaggttcacacaccagatgtaactgtttttcagctgagttgtatggattaacttcagtccactgtaaatacacctgggatggggtggggttggggttgtttagggagaagcagccagacttgctttgtgaactgaatgtatttttatgcaattttgagtggcctttcaaccctaagatgaatggttttgttttactggttgttgttatatagttttgagtattctgtgtttgaaagtttgggaataataatattcacttctatatgatgcctgtaaacacaacagtatttataaatgagtaaataaaactgtgttttaactttg

SEQ ID NO: 454378 - DNA, 9677 bp, Homo sapiens
aatcgagctcggccagattagcgacagcgattctaggatagtcagtagatagaattgtgaagatgataagtgtagagggaaggttaatggttgatattggcgcagataaggccacagacaattgctccctccacctatgtatcaacttacttgaaaagatccatcaagatgtgaaactcgcaagtttggtgcagagaagtgcttcatttggtagaagtagtgaccccacaagtccctacatttcagccaatcgcaattcatctcctgctacctcacccattaccattggttcatctacctctcggggcagccagtggcaacctgcctcttcttgccctgcaccaatcagtgcaaacactactgcatctgtacatcatggcaggactcctcacaaatcccaggccgacacaacagcagagaaaacagcagacaatgtctcttctagcaccccgctctgtgtgatcaccaatcgccctcttcctagcactgccaatggggttacagctactcctgtgctctccattactggaacagattcctctgtggaagccagggagaagaggaggtcctatctgactcctgtacgggatgaggaagcagagtctttacggaaagcacgctccagacaagctcggcagacacgaaggtctactcaaggtgtcaccctaacagaccttcaagaagcagaaaggacattcagccggtcgagggcagagaggcaagctcaggagcagcctcgtgagaagcccacagacactgaagggcttgaggggagccctgagaagcatgagccctcagcagttccagcaacagaagctggggagggccagcagccctggggcaggagtctggatgaagagcctatctgtcatcgcctgaggtgcccagctcagccagacaaacccaccacgccagcatctccttctacgtcaagaccctcactctacaccagttcccacctgctatggacaaatagattttcagtccctgattctgagagttcagagactaccacaaacactacaactgcaaaggaaatggacaaaaatgagaatgaagaagcagatttggatgagcagtcctctaagaggctgtccatccgagagaggaggcggcccaaggaacgacgaagaggcacaggcatcaatttctggacaaaggatgaggatgaaactgatggctctgaagaggtcaaagaaacgtggcatgaaagactttctaggttggaatcgggaggtagtaatcctacaaccagtgattcttacggtgaccgggcttcagcaagagcccgtcgggaggcccgggaggcccgcctagccaccctgaccagccgtgtagaagaagacagcaacagagattataaaaaactctatgagagtgctctgactgaaaaccaaaaactgaaaacaaaacttcaggaagcccagctagagctagcagatataaagtccaagcttgagaaggtggcccagcagaaacaagaaaagacctctgaccgatcatcagtgctggagatggagaaacgggagaggcgagccttggagcgcaaaatgtcagaaatggaggaagaaatgaaggtgttaacagaactgaaatccgacaaccagaggctgaaagatgaaaatggtgccctcatcagagtcatcagcaaactgtccaagtaggctaggctccagatttatgaggaaagaaagggacagcatttgctgcccccacccctcttttccagtccttgccttccaaccaaaagaaatggatgttttggtggaaggacacttctttctatcaccctcttcagtcacctctatacactctacattttctctgcactttcaatgccctgttcttccaaacccctatcccaagttttatgacagttttaattgaagcatgattgtggtaattcgagccatctggagaatgctctggggagtacaccaggctcagctgtggacccctcaacttcctgctgctcagctactttgtccacattggatttggtccaaacatgtaagacttctaccctaatcagtatccttcagctttttacattaacccagtgtcctctgatataggtgagtcttgtggtagccactccaggatcctgattggggtgccaagagaaacagcaggatgttgaattgatcatcagatgccctctggaatggttagcatccaaggtgacagtgactgcattgaggcgctctattcttcttcacctctcaggaactgacttttattttttctatcaacacccagtaatctccctaactagttttaacccttattcctccctcatacctagccatttctccaaggcgcaaatggccctggcttcatttattcctttcctttctatccttttatatttttcccttccccaccccctcactcaatggtataaaagctaggacagagcacctgacctcagttgtctttggccattgtgggaagtcattattctggagacaagaaaatcatcactctggtgccttggtggcagcaccactgcctgctccctggaaggtagactatggcataagtgtcagctcattgttttcgtctcccacttatcttcccccttcaaagtgattttctttataagaaaatttgggctctgaatactccattctgcctcacttccttgaccttgttttcctctcttcgccctgacacctgcttctaatgagaaatgaagtcagtgcaaggaggaatgagaggtggggaggggagattgttgagagatggactaggaagtggaagcaggctggaaagacacatatggcgaaagtcaagtatctgaggccacttgcaacattgtgacaaagaagatggaagatagcagcctactgggctgtgagaatagtggtgaatttgattatttccagtggttagatttagcagagagatttactttcttagaaattaataggggaaatggcacttaatagaggtttaatggaatgaagtactttcaacccattgatgagagtcatggaagtttagagtggcaagacccagaggtcattaggtccagctttctattattgtgtcacagggacccctgctaccacagctttcacccatgggcatggtcaggtagcctctggtggctatgcatttattactcaaaagttgggcaactctaataacgagagagtttttcctcatatcagctgaagtctgcctgtggattctccttgtagtccagatctactatctgcaactctttaacggcacttgagatatgtgcagtgggtggtctccccctcagtcttactttgagctgctgttactctagtcctttaagtcattcctcatatggcatgcttttcttacctgtcacatcttggccatcctcctctagacaaaaccagcctttaaaatatcatgtccaggcctggaaagaatacaaatccagtgcaaaattaaaccattagttcttgatgataacctagcattaatacttacagtattttctttttgtaggagttttatcccttggttcacttgagtgtgcaagtcattaaatcctcatcattttagggttgccagtgatattcagtgtttagagtggttcattcccttaatatatactacctctgtctgttaattctttcctaacatgacatgtagctctccatggtcctccctctgaaacaccacatgctgtttaaactagaagctgtaattcaagatcccaattccaccaggtgcagtggctcatgcctgtaatcccagcacttcaggaggccgaggtggacagatcacgaggtcaggagttcgagaccatcctggctaacacggtgaaacccaatctctactaaaaatacaaaaaattagccaggcgtggtggcaggcgcctgtagtcccagctactcaggaggctgaggcaggagaatggcgtgaacccgggaggcggagcttgcagtgagccttgatcacgccactgcactccagcctgggtgacagagcaagactccatctcaaaaaaaataataataataaataaataaaaaatcccaattacagaacaggagatatgtttcctctgacaaaaccccatttttagagtgtataaaattctgtctttcatttccaaccatttttcaagagaagctgctactatcttgagacttcgtattatcatgggagtactgtaagttcagttctcagggaatgctaaattagagtaataagttttatatccttcattctgggagaggaaatcaacataaggtgttgactaattgattatcctggaacattttgaatattggggaaggaagatgatacttctttctcaagaaaagaaaattggattattaggaatacatcttgacccttttccactcaatagaccagggaaaggggttacagagagcctcctcagatctgtttgtgcctttcaaaagtactgggggcagattctcaaaactcttagattggtgttgcatccctgccacttcacatgacccttccatgttaaagctgacttttcttgccagaaagttttccttgtgacaagaaatttgcaagcttttcaatctcaggaatactggattctatagccaagaactcatgaaagtaagtgtaaactatcctaggtaatttcaggtactttctcttatgcaattaattttattaactgatttctggtctatctccagagataaaataccattccttcacaactgtattgtctggaagccccatgagatggtaattataggccttctactagccagcagttctctctggatactggcatcagcaggtctcctttttcttgtgctgcttggacaggtacctactgctggcctcttcagtggccacaatcctcagtcctcacctgctggtttggagactcatgagcaccccaggcagctcaagctgaataaatagctgcagacatggccaacaacatggggctcaggtctgtcacttaacttagagtctttacatgaaatatcagaatgggaaagagaatgttcctggtaaaactctgttttcattaatttgttatttttcaaaaaccgagccacacctttggaagtaatgatttggccattccagagattctggggctaaagtttgtttttccagggctgctgatccttttccagatagctccagagtatgatgaccccagccccatcccaatctctagcgaaagggttatgcaaatctcagggtgttgcctctaaagaatctaaagaatagacatgctttgggcttactcagtgtaccagattctctagtgggccattctcatttgatgttccctagaacctccctgtcttccaactgcaggatgtgtttacttctcttctgggcttcccctggtttctgtcctagttcccaccccaagtttaagaagacttagattcatttattgctatctgaggccactagtgagatttcagatctctcttttgcaacattttacccatttcccttccccaaaccatgtgcttattagatggttccactcaggaagcaaggaagctaaaactcaagttaatggtctgtggatcccacgaaagtgtgtgtaaactactgactgtttctccactagaggcatttaattgagccaaagatgatggaagaagaaactctcaaagccatgtactttgttaggtgtctggatttttggcctgtttgcagcctctcctagccacagacagacactgtctcctctcagagaaaggccagtgtttcggtccaggccactggtgagtgtcggcacccttgaggtgggcatggagtgagcagaagaagcctggagaagagagaactatttaaaagtgttgccagttattcagcttccaggcggctttgcacctccaaaggtgcaaaaaggaaaaagaaagcagaaaggattcagcatttaagcagaaagaaaagggaaattctactctaccagatgagccactggttccactggagcttatcagtgaagtaacactgcaggagccctggtatccttccctcagagatatcatcaggggccctcaaaccccattgtttatgccagcactgaccgcactttaagcacacacttaccaatcagaggtcgtgtaattggcctaaatctaggcccagttattactacaaatcttagtcaccatactctctcgcccaggctggagtgcagtggtgtgatctcagctcactgcaacctccacctcccaggctcaagggatcctctcacctcagctcccgagcagctaggactgcaggtgtgcaccaccatgcccagctaatttttgaatttttttgtagagatggggttttgccatgttgcccaggctggtctgaagctgctgggctcaagcaatccacctggctgggcctcccaaagcgataggattacaggcgtaagggcccacgcccagcctaccatactgattttcaaggcagggtctaacccttcataagatgtgagttcttccaacccaataagcaggcagctttgaggacaaaaaggcaacattaaaagataagaccctagaagtcagaacatctgtattccaaggccaccccttctccttttagtcatgtgactttgggcaggtcaccctccctgtctgtaaaatgaggttggactggataatctttatgtgccctttccttttggcttaaaattctgtgatttattcattcttaggaagatcagcatatttattgggatttctgcttcaaaaattctttctaacctcaaaaatccaagtccagaattttttgttttcttctggatttaaactgtttaatatgagcacatcaaggttgacttctcatcctttttgggaagtgaatttaatattgagggtaattgaatgatgttgcaatggctttccctcctgctggcttggtaagaatattaaagcctgcagaggtggaaattggagctcatggagaaatggatagaaagcaatttgttgcaggcagcctttggacaagttgttttaataggaaatagacctgctgcttcataggtttcctcaaccacctttcctcagctttcttaaaatgggatctacattggctcttcacacccaaatagcagactaatcgtttttctgcttagcaccgtctggttcattgtcttgaactctgccttacagcagcaagaaaattttcctcgacaagaacctcaatctttagttccattgagctccccctctggattttggacttaccagaagtaggaggttctgataccattcaagatggtctttccttcaaagcaggtctgaagaggagactaccaaagcagtgtttacaaacccagagtccacacaaccatattgcatagaacagcacttggctttcacaagcctcctacaggacctggtgtaattggagtgaaagggcagagaccctggaagtggaggtggctgtgtgctgcgatgggaagaaggcagaaggcccaggggctttggacatagagcagggtggaagctgcaagtactgggaaggaagagagtttcacagaaacaaagctttgtcacacagaaatgagttctgtctcactggtgacttcatccctcaggctccagctgagcagagattttaatcagcttccttaatgggtattgacactgctcaggaagcagtagaccctgtcagggacagctattgatcttttgtgttctgattagattggaaaatagatcaacttcattgtagtccaggaactgttggtcacagctactaggaatgaggtgatttctgagggctgagaaaaaacacagaatcttggccagcagccagcagctgcatggtgaaagatgcattcacttctcctttgagagttggggttgagggcaaacatagaacccaggtttggcttacaacccagtgtcccggaagccctccttcgggagaactgtaagtaagaggtgggtgtgtctaaagacaataccattaatgaatgttctggccttacctaaaaaggtttagcaatttggggataactcttggatctagcttatgtgcgttcacatgcacatttgctagcccagagcttttaaaatgaggtctggcatatacttgattacaaatgaaaactcagaaaccaattttatttattaaatcatatcttttgtttttccccctcccttctaatcccccaaaggacctatttgagctgttccccaattcatctgcttattttggaccatgaatctgccagagtgatattttctgttatttctcctccaaatttttccctgatgtttccaataaagatttacttgggtggccccttaaggtgacatcaggatgctcttatgtccttccagaataagcatacacttcactcctctccctttcatctccctctgcattcttaattccttgcttttctcacttggagccgagggtgctttagagaggtggttttccatgaatcagccaagattcctgtagaagttgggtataccaaccaccaccaccaccgccccctattccagtttcaaagctcctcggctatgctaatgtcccctcagagatgaggtttgacttttaggcccgtatgactcctccatagcctggccaaggagaccatgagtagccatgtctggtttactctttatcctgagactgtttgtttatagcttaaaacagaagtgtgtcttcccagcacaaacctaatcaatcagtgtatcagtgcatctggtggcaacagctcagcccattcaaagagcaaggattcaggaaaggcacactgatggtggggagcctcttaagagcctctaatgttctcccaaaaccagagttgagagtcggagtgccagtcgtcggggcccactattcctgaataagggacatgcaagggccagaagtagcttgactctcgcctaaatatctgtgcctttgcctgtcctttctcccactctactgaaacccggaacagattcccgcttgccttctgatgaagagaggttaggtaaagagagtttggaggaaaaaagacaccaggaggcaggctgcggggtaggagagggttctgagaggaggcagcaatccagaatacctccttttctagccagcatcccttgaacttttgaaaggttgtgcctaccactggctggcacaccagggcaatgatttccctgcagaaggaaggaaagaatgtttcacccttgcatccttcttggagaagctacagcctgtgctcagttgagtggttcacactcagactttggctttatggttttccttcctccttgtctttgccctgaccttgatcaacaggggtgaaaagaaccaccctgaggtttccatgcctctcccattttagtggtagcattttgtgtctttactccacccttcaccctagttccaccaaggttcacacaccagatgtaactgtttttcagctgagttgtatggattaacttcagtccactgtaaatacacctgggatggggtggggttggggttgtttagggagaagcagccagacttgctttgtgaactgaatgtatttttatgcaattttgagtggcctttcaaccctaagatgaatggttttgttttactggttgttgttatatagttttgagtattctgtgtttgaaagtttgggaataataatattcacttctatatgatgcctgtaaacacaacagtatttataaatgagtaaataaaactgtgttttaactttg

SEQ ID NO: 454379 - DNA, 8793 bp, Homo sapiens
aggcagagagccttctcagcagatgatggaacgggaagccagagaaatgtgaagtgcgaaaagaactcagtgcttcaatgctggtttgaaaatcagaagggccatgtgaaaaggaatgtaggagcttctgcaagcagtaagcagccactaccctgcaaggcagtgggtacctgaaacctcacaggactggattcctgccaacagcctggatgagcttgaagcagattcttccccagatgctcctgataaaagccagcagcagactccttgatttcagaccgttgagaacttgaggagggaacccagcagaactgtgcagacttctgacctacaaaactgttggaatcgggaggtagtaatcctacaaccagtgattcttacggtgaccgggcttcagcaagagcccgtcgggaggcccgggaggcccgcctagccaccctgaccagccgtgtagaagaagacagcaacagagattataaaaaactctatgagagtgctctgactgaaaaccaaaaactgaaaacaaaacttcaggaagcccagctagagctagcagatataaagtccaagcttgagaaggtggcccagcagaaacaagaaaagacctctgaccgatcatcagtgctggagatggagaaacgggagaggcgagccttggagcgcaaaatgtcagaaatggaggaagaaatgaaggtgttaacagaactgaaatccgacaaccagaggctgaaagatgaaaatggtgccctcatcagagtcatcagcaaactgtccaagtaggctaggctccagatttatgaggaaagaaagggacagcatttgctgcccccacccctcttttccagtccttgccttccaaccaaaagaaatggatgttttggtggaaggacacttctttctatcaccctcttcagtcacctctatacactctacattttctctgcactttcaatgccctgttcttccaaacccctatcccaagttttatgacagttttaattgaagcatgattgtggtaattcgagccatctggagaatgctctggggagtacaccaggctcagctgtggacccctcaacttcctgctgctcagctactttgtccacattggatttggtccaaacatgtaagacttctaccctaatcagtatccttcagctttttacattaacccagtgtcctctgatataggtgagtcttgtggtagccactccaggatcctgattggggtgccaagagaaacagcaggatgttgaattgatcatcagatgccctctggaatggttagcatccaaggtgacagtgactgcattgaggcgctctattcttcttcacctctcaggaactgacttttattttttctatcaacacccagtaatctccctaactagttttaacccttattcctccctcatacctagccatttctccaaggcgcaaatggccctggcttcatttattcctttcctttctatccttttatatttttcccttccccaccccctcactcaatggtataaaagctaggacagagcacctgacctcagttgtctttggccattgtgggaagtcattattctggagacaagaaaatcatcactctggtgccttggtggcagcaccactgcctgctccctggaaggtagactatggcataagtgtcagctcattgttttcgtctcccacttatcttcccccttcaaagtgattttctttataagaaaatttgggctctgaatactccattctgcctcacttccttgaccttgttttcctctcttcgccctgacacctgcttctaatgagaaatgaagtcagtgcaaggaggaatgagaggtggggaggggagattgttgagagatggactaggaagtggaagcaggctggaaagacacatatggcgaaagtcaagtatctgaggccacttgcaacattgtgacaaagaagatggaagatagcagcctactgggctgtgagaatagtggtgaatttgattatttccagtggttagatttagcagagagatttactttcttagaaattaataggggaaatggcacttaatagaggtttaatggaatgaagtactttcaacccattgatgagagtcatggaagtttagagtggcaagacccagaggtcattaggtccagctttctattattgtgtcacagggacccctgctaccacagctttcacccatgggcatggtcaggtagcctctggtggctatgcatttattactcaaaagttgggcaactctaataacgagagagtttttcctcatatcagctgaagtctgcctgtggattctccttgtagtccagatctactatctgcaactctttaacggcacttgagatatgtgcagtgggtggtctccccctcagtcttactttgagctgctgttactctagtcctttaagtcattcctcatatggcatgcttttcttacctgtcacatcttggccatcctcctctagacaaaaccagcctttaaaatatcatgtccaggcctggaaagaatacaaatccagtgcaaaattaaaccattagttcttgatgataacctagcattaatacttacagtattttctttttgtaggagttttatcccttggttcacttgagtgtgcaagtcattaaatcctcatcattttagggttgccagtgatattcagtgtttagagtggttcattcccttaatatatactacctctgtctgttaattctttcctaacatgacatgtagctctccatggtcctccctctgaaacaccacatgctgtttaaactagaagctgtaattcaagatcccaattccaccaggtgcagtggctcatgcctgtaatcccagcacttcaggaggccgaggtggacagatcacgaggtcaggagttcgagaccatcctggctaacacggtgaaacccaatctctactaaaaatacaaaaaattagccaggcgtggtggcaggcgcctgtagtcccagctactcaggaggctgaggcaggagaatggcgtgaacccgggaggcggagcttgcagtgagccttgatcacgccactgcactccagcctgggtgacagagcaagactccatctcaaaaaaaataataataataaataaataaaaaatcccaattacagaacaggagatatgtttcctctgacaaaaccccatttttagagtgtataaaattctgtctttcatttccaaccatttttcaagagaagctgctactatcttgagacttcgtattatcatgggagtactgtaagttcagttctcagggaatgctaaattagagtaataagttttatatccttcattctgggagaggaaatcaacataaggtgttgactaattgattatcctggaacattttgaatattggggaaggaagatgatacttctttctcaagaaaagaaaattggattattaggaatacatcttgacccttttccactcaatagaccagggaaaggggttacagagagcctcctcagatctgtttgtgcctttcaaaagtactgggggcagattctcaaaactcttagattggtgttgcatccctgccacttcacatgacccttccatgttaaagctgacttttcttgccagaaagttttccttgtgacaagaaatttgcaagcttttcaatctcaggaatactggattctatagccaagaactcatgaaagtaagtgtaaactatcctaggtaatttcaggtactttctcttatgcaattaattttattaactgatttctggtctatctccagagataaaataccattccttcacaactgtattgtctggaagccccatgagatggtaattataggccttctactagccagcagttctctctggatactggcatcagcaggtctcctttttcttgtgctgcttggacaggtacctactgctggcctcttcagtggccacaatcctcagtcctcacctgctggtttggagactcatgagcaccccaggcagctcaagctgaataaatagctgcagacatggccaacaacatggggctcaggtctgtcacttaacttagagtctttacatgaaatatcagaatgggaaagagaatgttcctggtaaaactctgttttcattaatttgttatttttcaaaaaccgagccacacctttggaagtaatgatttggccattccagagattctggggctaaagtttgtttttccagggctgctgatccttttccagatagctccagagtatgatgaccccagccccatcccaatctctagcgaaagggttatgcaaatctcagggtgttgcctctaaagaatctaaagaatagacatgctttgggcttactcagtgtaccagattctctagtgggccattctcatttgatgttccctagaacctccctgtcttccaactgcaggatgtgtttacttctcttctgggcttcccctggtttctgtcctagttcccaccccaagtttaagaagacttagattcatttattgctatctgaggccactagtgagatttcagatctctcttttgcaacattttacccatttcccttccccaaaccatgtgcttattagatggttccactcaggaagcaaggaagctaaaactcaagttaatggtctgtggatcccacgaaagtgtgtgtaaactactgactgtttctccactagaggcatttaattgagccaaagatgatggaagaagaaactctcaaagccatgtactttgttaggtgtctggatttttggcctgtttgcagcctctcctagccacagacagacactgtctcctctcagagaaaggccagtgtttcggtccaggccactggtgagtgtcggcacccttgaggtgggcatggagtgagcagaagaagcctggagaagagagaactatttaaaagtgttgccagttattcagcttccaggcggctttgcacctccaaaggtgcaaaaaggaaaaagaaagcagaaaggattcagcatttaagcagaaagaaaagggaaattctactctaccagatgagccactggttccactggagcttatcagtgaagtaacactgcaggagccctggtatccttccctcagagatatcatcaggggccctcaaaccccattgtttatgccagcactgaccgcactttaagcacacacttaccaatcagaggtcgtgtaattggcctaaatctaggcccagttattactacaaatcttagtcaccatactctctcgcccaggctggagtgcagtggtgtgatctcagctcactgcaacctccacctcccaggctcaagggatcctctcacctcagctcccgagcagctaggactgcaggtgtgcaccaccatgcccagctaatttttgaatttttttgtagagatggggttttgccatgttgcccaggctggtctgaagctgctgggctcaagcaatccacctggctgggcctcccaaagcgataggattacaggcgtaagggcccacgcccagcctaccatactgattttcaaggcagggtctaacccttcataagatgtgagttcttccaacccaataagcaggcagctttgaggacaaaaaggcaacattaaaagataagaccctagaagtcagaacatctgtattccaaggccaccccttctccttttagtcatgtgactttgggcaggtcaccctccctgtctgtaaaatgaggttggactggataatctttatgtgccctttccttttggcttaaaattctgtgatttattcattcttaggaagatcagcatatttattgggatttctgcttcaaaaattctttctaacctcaaaaatccaagtccagaattttttgttttcttctggatttaaactgtttaatatgagcacatcaaggttgacttctcatcctttttgggaagtgaatttaatattgagggtaattgaatgatgttgcaatggctttccctcctgctggcttggtaagaatattaaagcctgcagaggtggaaattggagctcatggagaaatggatagaaagcaatttgttgcaggcagcctttggacaagttgttttaataggaaatagacctgctgcttcataggtttcctcaaccacctttcctcagctttcttaaaatgggatctacattggctcttcacacccaaatagcagactaatcgtttttctgcttagcaccgtctggttcattgtcttgaactctgccttacagcagcaagaaaattttcctcgacaagaacctcaatctttagttccattgagctccccctctggattttggacttaccagaagtaggaggttctgataccattcaagatggtctttccttcaaagcaggtctgaagaggagactaccaaagcagtgtttacaaacccagagtccacacaaccatattgcatagaacagcacttggctttcacaagcctcctacaggacctggtgtaattggagtgaaagggcagagaccctggaagtggaggtggctgtgtgctgcgatgggaagaaggcagaaggcccaggggctttggacatagagcagggtggaagctgcaagtactgggaaggaagagagtttcacagaaacaaagctttgtcacacagaaatgagttctgtctcactggtgacttcatccctcaggctccagctgagcagagattttaatcagcttccttaatgggtattgacactgctcaggaagcagtagaccctgtcagggacagctattgatcttttgtgttctgattagattggaaaatagatcaacttcattgtagtccaggaactgttggtcacagctactaggaatgaggtgatttctgagggctgagaaaaaacacagaatcttggccagcagccagcagctgcatggtgaaagatgcattcacttctcctttgagagttggggttgagggcaaacatagaacccaggtttggcttacaacccagtgtcccggaagccctccttcgggagaactgtaagtaagaggtgggtgtgtctaaagacaataccattaatgaatgttctggccttacctaaaaaggtttagcaatttggggataactcttggatctagcttatgtgcgttcacatgcacatttgctagcccagagcttttaaaatgaggtctggcatatacttgattacaaatgaaaactcagaaaccaattttatttattaaatcatatcttttgtttttccccctcccttctaatcccccaaaggacctatttgagctgttccccaattcatctgcttattttggaccatgaatctgccagagtgatattttctgttatttctcctccaaatttttccctgatgtttccaataaagatttacttgggtggccccttaaggtgacatcaggatgctcttatgtccttccagaataagcatacacttcactcctctccctttcatctccctctgcattcttaattccttgcttttctcacttggagccgagggtgctttagagaggtggttttccatgaatcagccaagattcctgtagaagttgggtataccaaccaccaccaccaccgccccctattccagtttcaaagctcctcggctatgctaatgtcccctcagagatgaggtttgacttttaggcccgtatgactcctccatagcctggccaaggagaccatgagtagccatgtctggtttactctttatcctgagactgtttgtttatagcttaaaacagaagtgtgtcttcccagcacaaacctaatcaatcagtgtatcagtgcatctggtggcaacagctcagcccattcaaagagcaaggattcaggaaaggcacactgatggtggggagcctcttaagagcctctaatgttctcccaaaaccagagttgagagtcggagtgccagtcgtcggggcccactattcctgaataagggacatgcaagggccagaagtagcttgactctcgcctaaatatctgtgcctttgcctgtcctttctcccactctactgaaacccggaacagattcccgcttgccttctgatgaagagaggttaggtaaagagagtttggaggaaaaaagacaccaggaggcaggctgcggggtaggagagggttctgagaggaggcagcaatccagaatacctccttttctagccagcatcccttgaacttttgaaaggttgtgcctaccactggctggcacaccagggcaatgatttccctgcagaaggaaggaaagaatgtttcacccttgcatccttcttggagaagctacagcctgtgctcagttgagtggttcacactcagactttggctttatggttttccttcctccttgtctttgccctgaccttgatcaacaggggtgaaaagaaccaccctgaggtttccatgcctctcccattttagtggtagcattttgtgtctttactccacccttcaccctagttccaccaaggttcacacaccagatgtaactgtttttcagctgagttgtatggattaacttcagtccactgtaaatacacctgggatggggtggggttggggttgtttagggagaagcagccagacttgctttgtgaactgaatgtatttttatgcaattttgagtggcctttcaaccctaagatgaatggttttgttttactggttgttgttatatagttttgagtattctgtgtttgaaagtttgggaataataatattcacttctatatgatgcctgtaaacacaacagtatttataaatgagtaaataaaactgtgttttaactttg

SEQ ID NO: 454380 - DNA, 8619 bp, Homo sapiens
ctcagcaggttacatgttcgaattgacttgctagtagcatctcacctccttgagtgaaggaacgtcttcttgaaggacaacttaaaagcctactcagagtatcaagattcagtgggtagagcatcagcattcttctgctgtccttgacataggtgggtagttatgttggaatcgggaggtagtaatcctacaaccagtgattcttacggtgaccgggcttcagcaagagcccgtcgggaggcccgggaggcccgcctagccaccctgaccagccgtgtagaagaagacagcaacagagattataaaaaactctatgagagtgctctgactgaaaaccaaaaactgaaaacaaaacttcaggaagcccagctagagctagcagatataaagtccaagcttgagaaggtggcccagcagaaacaagaaaagacctctgaccgatcatcagtgctggagatggagaaacgggagaggcgagccttggagcgcaaaatgtcagaaatggaggaagaaatgaaggtgttaacagaactgaaatccgacaaccagaggctgaaagatgaaaatggtgccctcatcagagtcatcagcaaactgtccaagtaggctaggctccagatttatgaggaaagaaagggacagcatttgctgcccccacccctcttttccagtccttgccttccaaccaaaagaaatggatgttttggtggaaggacacttctttctatcaccctcttcagtcacctctatacactctacattttctctgcactttcaatgccctgttcttccaaacccctatcccaagttttatgacagttttaattgaagcatgattgtggtaattcgagccatctggagaatgctctggggagtacaccaggctcagctgtggacccctcaacttcctgctgctcagctactttgtccacattggatttggtccaaacatgtaagacttctaccctaatcagtatccttcagctttttacattaacccagtgtcctctgatataggtgagtcttgtggtagccactccaggatcctgattggggtgccaagagaaacagcaggatgttgaattgatcatcagatgccctctggaatggttagcatccaaggtgacagtgactgcattgaggcgctctattcttcttcacctctcaggaactgacttttattttttctatcaacacccagtaatctccctaactagttttaacccttattcctccctcatacctagccatttctccaaggcgcaaatggccctggcttcatttattcctttcctttctatccttttatatttttcccttccccaccccctcactcaatggtataaaagctaggacagagcacctgacctcagttgtctttggccattgtgggaagtcattattctggagacaagaaaatcatcactctggtgccttggtggcagcaccactgcctgctccctggaaggtagactatggcataagtgtcagctcattgttttcgtctcccacttatcttcccccttcaaagtgattttctttataagaaaatttgggctctgaatactccattctgcctcacttccttgaccttgttttcctctcttcgccctgacacctgcttctaatgagaaatgaagtcagtgcaaggaggaatgagaggtggggaggggagattgttgagagatggactaggaagtggaagcaggctggaaagacacatatggcgaaagtcaagtatctgaggccacttgcaacattgtgacaaagaagatggaagatagcagcctactgggctgtgagaatagtggtgaatttgattatttccagtggttagatttagcagagagatttactttcttagaaattaataggggaaatggcacttaatagaggtttaatggaatgaagtactttcaacccattgatgagagtcatggaagtttagagtggcaagacccagaggtcattaggtccagctttctattattgtgtcacagggacccctgctaccacagctttcacccatgggcatggtcaggtagcctctggtggctatgcatttattactcaaaagttgggcaactctaataacgagagagtttttcctcatatcagctgaagtctgcctgtggattctccttgtagtccagatctactatctgcaactctttaacggcacttgagatatgtgcagtgggtggtctccccctcagtcttactttgagctgctgttactctagtcctttaagtcattcctcatatggcatgcttttcttacctgtcacatcttggccatcctcctctagacaaaaccagcctttaaaatatcatgtccaggcctggaaagaatacaaatccagtgcaaaattaaaccattagttcttgatgataacctagcattaatacttacagtattttctttttgtaggagttttatcccttggttcacttgagtgtgcaagtcattaaatcctcatcattttagggttgccagtgatattcagtgtttagagtggttcattcccttaatatatactacctctgtctgttaattctttcctaacatgacatgtagctctccatggtcctccctctgaaacaccacatgctgtttaaactagaagctgtaattcaagatcccaattccaccaggtgcagtggctcatgcctgtaatcccagcacttcaggaggccgaggtggacagatcacgaggtcaggagttcgagaccatcctggctaacacggtgaaacccaatctctactaaaaatacaaaaaattagccaggcgtggtggcaggcgcctgtagtcccagctactcaggaggctgaggcaggagaatggcgtgaacccgggaggcggagcttgcagtgagccttgatcacgccactgcactccagcctgggtgacagagcaagactccatctcaaaaaaaataataataataaataaataaaaaatcccaattacagaacaggagatatgtttcctctgacaaaaccccatttttagagtgtataaaattctgtctttcatttccaaccatttttcaagagaagctgctactatcttgagacttcgtattatcatgggagtactgtaagttcagttctcagggaatgctaaattagagtaataagttttatatccttcattctgggagaggaaatcaacataaggtgttgactaattgattatcctggaacattttgaatattggggaaggaagatgatacttctttctcaagaaaagaaaattggattattaggaatacatcttgacccttttccactcaatagaccagggaaaggggttacagagagcctcctcagatctgtttgtgcctttcaaaagtactgggggcagattctcaaaactcttagattggtgttgcatccctgccacttcacatgacccttccatgttaaagctgacttttcttgccagaaagttttccttgtgacaagaaatttgcaagcttttcaatctcaggaatactggattctatagccaagaactcatgaaagtaagtgtaaactatcctaggtaatttcaggtactttctcttatgcaattaattttattaactgatttctggtctatctccagagataaaataccattccttcacaactgtattgtctggaagccccatgagatggtaattataggccttctactagccagcagttctctctggatactggcatcagcaggtctcctttttcttgtgctgcttggacaggtacctactgctggcctcttcagtggccacaatcctcagtcctcacctgctggtttggagactcatgagcaccccaggcagctcaagctgaataaatagctgcagacatggccaacaacatggggctcaggtctgtcacttaacttagagtctttacatgaaatatcagaatgggaaagagaatgttcctggtaaaactctgttttcattaatttgttatttttcaaaaaccgagccacacctttggaagtaatgatttggccattccagagattctggggctaaagtttgtttttccagggctgctgatccttttccagatagctccagagtatgatgaccccagccccatcccaatctctagcgaaagggttatgcaaatctcagggtgttgcctctaaagaatctaaagaatagacatgctttgggcttactcagtgtaccagattctctagtgggccattctcatttgatgttccctagaacctccctgtcttccaactgcaggatgtgtttacttctcttctgggcttcccctggtttctgtcctagttcccaccccaagtttaagaagacttagattcatttattgctatctgaggccactagtgagatttcagatctctcttttgcaacattttacccatttcccttccccaaaccatgtgcttattagatggttccactcaggaagcaaggaagctaaaactcaagttaatggtctgtggatcccacgaaagtgtgtgtaaactactgactgtttctccactagaggcatttaattgagccaaagatgatggaagaagaaactctcaaagccatgtactttgttaggtgtctggatttttggcctgtttgcagcctctcctagccacagacagacactgtctcctctcagagaaaggccagtgtttcggtccaggccactggtgagtgtcggcacccttgaggtgggcatggagtgagcagaagaagcctggagaagagagaactatttaaaagtgttgccagttattcagcttccaggcggctttgcacctccaaaggtgcaaaaaggaaaaagaaagcagaaaggattcagcatttaagcagaaagaaaagggaaattctactctaccagatgagccactggttccactggagcttatcagtgaagtaacactgcaggagccctggtatccttccctcagagatatcatcaggggccctcaaaccccattgtttatgccagcactgaccgcactttaagcacacacttaccaatcagaggtcgtgtaattggcctaaatctaggcccagttattactacaaatcttagtcaccatactctctcgcccaggctggagtgcagtggtgtgatctcagctcactgcaacctccacctcccaggctcaagggatcctctcacctcagctcccgagcagctaggactgcaggtgtgcaccaccatgcccagctaatttttgaatttttttgtagagatggggttttgccatgttgcccaggctggtctgaagctgctgggctcaagcaatccacctggctgggcctcccaaagcgataggattacaggcgtaagggcccacgcccagcctaccatactgattttcaaggcagggtctaacccttcataagatgtgagttcttccaacccaataagcaggcagctttgaggacaaaaaggcaacattaaaagataagaccctagaagtcagaacatctgtattccaaggccaccccttctccttttagtcatgtgactttgggcaggtcaccctccctgtctgtaaaatgaggttggactggataatctttatgtgccctttccttttggcttaaaattctgtgatttattcattcttaggaagatcagcatatttattgggatttctgcttcaaaaattctttctaacctcaaaaatccaagtccagaattttttgttttcttctggatttaaactgtttaatatgagcacatcaaggttgacttctcatcctttttgggaagtgaatttaatattgagggtaattgaatgatgttgcaatggctttccctcctgctggcttggtaagaatattaaagcctgcagaggtggaaattggagctcatggagaaatggatagaaagcaatttgttgcaggcagcctttggacaagttgttttaataggaaatagacctgctgcttcataggtttcctcaaccacctttcctcagctttcttaaaatgggatctacattggctcttcacacccaaatagcagactaatcgtttttctgcttagcaccgtctggttcattgtcttgaactctgccttacagcagcaagaaaattttcctcgacaagaacctcaatctttagttccattgagctccccctctggattttggacttaccagaagtaggaggttctgataccattcaagatggtctttccttcaaagcaggtctgaagaggagactaccaaagcagtgtttacaaacccagagtccacacaaccatattgcatagaacagcacttggctttcacaagcctcctacaggacctggtgtaattggagtgaaagggcagagaccctggaagtggaggtggctgtgtgctgcgatgggaagaaggcagaaggcccaggggctttggacatagagcagggtggaagctgcaagtactgggaaggaagagagtttcacagaaacaaagctttgtcacacagaaatgagttctgtctcactggtgacttcatccctcaggctccagctgagcagagattttaatcagcttccttaatgggtattgacactgctcaggaagcagtagaccctgtcagggacagctattgatcttttgtgttctgattagattggaaaatagatcaacttcattgtagtccaggaactgttggtcacagctactaggaatgaggtgatttctgagggctgagaaaaaacacagaatcttggccagcagccagcagctgcatggtgaaagatgcattcacttctcctttgagagttggggttgagggcaaacatagaacccaggtttggcttacaacccagtgtcccggaagccctccttcgggagaactgtaagtaagaggtgggtgtgtctaaagacaataccattaatgaatgttctggccttacctaaaaaggtttagcaatttggggataactcttggatctagcttatgtgcgttcacatgcacatttgctagcccagagcttttaaaatgaggtctggcatatacttgattacaaatgaaaactcagaaaccaattttatttattaaatcatatcttttgtttttccccctcccttctaatcccccaaaggacctatttgagctgttccccaattcatctgcttattttggaccatgaatctgccagagtgatattttctgttatttctcctccaaatttttccctgatgtttccaataaagatttacttgggtggccccttaaggtgacatcaggatgctcttatgtccttccagaataagcatacacttcactcctctccctttcatctccctctgcattcttaattccttgcttttctcacttggagccgagggtgctttagagaggtggttttccatgaatcagccaagattcctgtagaagttgggtataccaaccaccaccaccaccgccccctattccagtttcaaagctcctcggctatgctaatgtcccctcagagatgaggtttgacttttaggcccgtatgactcctccatagcctggccaaggagaccatgagtagccatgtctggtttactctttatcctgagactgtttgtttatagcttaaaacagaagtgtgtcttcccagcacaaacctaatcaatcagtgtatcagtgcatctggtggcaacagctcagcccattcaaagagcaaggattcaggaaaggcacactgatggtggggagcctcttaagagcctctaatgttctcccaaaaccagagttgagagtcggagtgccagtcgtcggggcccactattcctgaataagggacatgcaagggccagaagtagcttgactctcgcctaaatatctgtgcctttgcctgtcctttctcccactctactgaaacccggaacagattcccgcttgccttctgatgaagagaggttaggtaaagagagtttggaggaaaaaagacaccaggaggcaggctgcggggtaggagagggttctgagaggaggcagcaatccagaatacctccttttctagccagcatcccttgaacttttgaaaggttgtgcctaccactggctggcacaccagggcaatgatttccctgcagaaggaaggaaagaatgtttcacccttgcatccttcttggagaagctacagcctgtgctcagttgagtggttcacactcagactttggctttatggttttccttcctccttgtctttgccctgaccttgatcaacaggggtgaaaagaaccaccctgaggtttccatgcctctcccattttagtggtagcattttgtgtctttactccacccttcaccctagttccaccaaggttcacacaccagatgtaactgtttttcagctgagttgtatggattaacttcagtccactgtaaatacacctgggatggggtggggttggggttgtttagggagaagcagccagacttgctttgtgaactgaatgtatttttatgcaattttgagtggcctttcaaccctaagatgaatggttttgttttactggttgttgttatatagttttgagtattctgtgtttgaaagtttgggaataataatattcacttctatatgatgcctgtaaacacaacagtatttataaatgagtaaataaaactgtgttttaactttg

SEQ ID NO: 454381 - DNA, 8354 bp, Homo sapiens
cagtctcattgttccgaaacaggagaggcgagccttggagcgcaaaatgtcagaaatggaggaagaaatgaagaacctccaccagctaaaacagattcaaaccttgaagcagatgaacgagcaactgcaggctgagaacagggccctgacccgagtggtggccagactctcggagtccatcgagtcctcggacacccaggagctctagttcttgcccctactctccaactcacttccctcctccactactccaggtgttaacagaactgaaatccgacaaccagaggctgaaagatgaaaatggtgccctcatcagagtcatcagcaaactgtccaagtaggctaggctccagatttatgaggaaagaaagggacagcatttgctgcccccacccctcttttccagtccttgccttccaaccaaaagaaatggatgttttggtggaaggacacttctttctatcaccctcttcagtcacctctatacactctacattttctctgcactttcaatgccctgttcttccaaacccctatcccaagttttatgacagttttaattgaagcatgattgtggtaattcgagccatctggagaatgctctggggagtacaccaggctcagctgtggacccctcaacttcctgctgctcagctactttgtccacattggatttggtccaaacatgtaagacttctaccctaatcagtatccttcagctttttacattaacccagtgtcctctgatataggtgagtcttgtggtagccactccaggatcctgattggggtgccaagagaaacagcaggatgttgaattgatcatcagatgccctctggaatggttagcatccaaggtgacagtgactgcattgaggcgctctattcttcttcacctctcaggaactgacttttattttttctatcaacacccagtaatctccctaactagttttaacccttattcctccctcatacctagccatttctccaaggcgcaaatggccctggcttcatttattcctttcctttctatccttttatatttttcccttccccaccccctcactcaatggtataaaagctaggacagagcacctgacctcagttgtctttggccattgtgggaagtcattattctggagacaagaaaatcatcactctggtgccttggtggcagcaccactgcctgctccctggaaggtagactatggcataagtgtcagctcattgttttcgtctcccacttatcttcccccttcaaagtgattttctttataagaaaatttgggctctgaatactccattctgcctcacttccttgaccttgttttcctctcttcgccctgacacctgcttctaatgagaaatgaagtcagtgcaaggaggaatgagaggtggggaggggagattgttgagagatggactaggaagtggaagcaggctggaaagacacatatggcgaaagtcaagtatctgaggccacttgcaacattgtgacaaagaagatggaagatagcagcctactgggctgtgagaatagtggtgaatttgattatttccagtggttagatttagcagagagatttactttcttagaaattaataggggaaatggcacttaatagaggtttaatggaatgaagtactttcaacccattgatgagagtcatggaagtttagagtggcaagacccagaggtcattaggtccagctttctattattgtgtcacagggacccctgctaccacagctttcacccatgggcatggtcaggtagcctctggtggctatgcatttattactcaaaagttgggcaactctaataacgagagagtttttcctcatatcagctgaagtctgcctgtggattctccttgtagtccagatctactatctgcaactctttaacggcacttgagatatgtgcagtgggtggtctccccctcagtcttactttgagctgctgttactctagtcctttaagtcattcctcatatggcatgcttttcttacctgtcacatcttggccatcctcctctagacaaaaccagcctttaaaatatcatgtccaggcctggaaagaatacaaatccagtgcaaaattaaaccattagttcttgatgataacctagcattaatacttacagtattttctttttgtaggagttttatcccttggttcacttgagtgtgcaagtcattaaatcctcatcattttagggttgccagtgatattcagtgtttagagtggttcattcccttaatatatactacctctgtctgttaattctttcctaacatgacatgtagctctccatggtcctccctctgaaacaccacatgctgtttaaactagaagctgtaattcaagatcccaattccaccaggtgcagtggctcatgcctgtaatcccagcacttcaggaggccgaggtggacagatcacgaggtcaggagttcgagaccatcctggctaacacggtgaaacccaatctctactaaaaatacaaaaaattagccaggcgtggtggcaggcgcctgtagtcccagctactcaggaggctgaggcaggagaatggcgtgaacccgggaggcggagcttgcagtgagccttgatcacgccactgcactccagcctgggtgacagagcaagactccatctcaaaaaaaataataataataaataaataaaaaatcccaattacagaacaggagatatgtttcctctgacaaaaccccatttttagagtgtataaaattctgtctttcatttccaaccatttttcaagagaagctgctactatcttgagacttcgtattatcatgggagtactgtaagttcagttctcagggaatgctaaattagagtaataagttttatatccttcattctgggagaggaaatcaacataaggtgttgactaattgattatcctggaacattttgaatattggggaaggaagatgatacttctttctcaagaaaagaaaattggattattaggaatacatcttgacccttttccactcaatagaccagggaaaggggttacagagagcctcctcagatctgtttgtgcctttcaaaagtactgggggcagattctcaaaactcttagattggtgttgcatccctgccacttcacatgacccttccatgttaaagctgacttttcttgccagaaagttttccttgtgacaagaaatttgcaagcttttcaatctcaggaatactggattctatagccaagaactcatgaaagtaagtgtaaactatcctaggtaatttcaggtactttctcttatgcaattaattttattaactgatttctggtctatctccagagataaaataccattccttcacaactgtattgtctggaagccccatgagatggtaattataggccttctactagccagcagttctctctggatactggcatcagcaggtctcctttttcttgtgctgcttggacaggtacctactgctggcctcttcagtggccacaatcctcagtcctcacctgctggtttggagactcatgagcaccccaggcagctcaagctgaataaatagctgcagacatggccaacaacatggggctcaggtctgtcacttaacttagagtctttacatgaaatatcagaatgggaaagagaatgttcctggtaaaactctgttttcattaatttgttatttttcaaaaaccgagccacacctttggaagtaatgatttggccattccagagattctggggctaaagtttgtttttccagggctgctgatccttttccagatagctccagagtatgatgaccccagccccatcccaatctctagcgaaagggttatgcaaatctcagggtgttgcctctaaagaatctaaagaatagacatgctttgggcttactcagtgtaccagattctctagtgggccattctcatttgatgttccctagaacctccctgtcttccaactgcaggatgtgtttacttctcttctgggcttcccctggtttctgtcctagttcccaccccaagtttaagaagacttagattcatttattgctatctgaggccactagtgagatttcagatctctcttttgcaacattttacccatttcccttccccaaaccatgtgcttattagatggttccactcaggaagcaaggaagctaaaactcaagttaatggtctgtggatcccacgaaagtgtgtgtaaactactgactgtttctccactagaggcatttaattgagccaaagatgatggaagaagaaactctcaaagccatgtactttgttaggtgtctggatttttggcctgtttgcagcctctcctagccacagacagacactgtctcctctcagagaaaggccagtgtttcggtccaggccactggtgagtgtcggcacccttgaggtgggcatggagtgagcagaagaagcctggagaagagagaactatttaaaagtgttgccagttattcagcttccaggcggctttgcacctccaaaggtgcaaaaaggaaaaagaaagcagaaaggattcagcatttaagcagaaagaaaagggaaattctactctaccagatgagccactggttccactggagcttatcagtgaagtaacactgcaggagccctggtatccttccctcagagatatcatcaggggccctcaaaccccattgtttatgccagcactgaccgcactttaagcacacacttaccaatcagaggtcgtgtaattggcctaaatctaggcccagttattactacaaatcttagtcaccatactctctcgcccaggctggagtgcagtggtgtgatctcagctcactgcaacctccacctcccaggctcaagggatcctctcacctcagctcccgagcagctaggactgcaggtgtgcaccaccatgcccagctaatttttgaatttttttgtagagatggggttttgccatgttgcccaggctggtctgaagctgctgggctcaagcaatccacctggctgggcctcccaaagcgataggattacaggcgtaagggcccacgcccagcctaccatactgattttcaaggcagggtctaacccttcataagatgtgagttcttccaacccaataagcaggcagctttgaggacaaaaaggcaacattaaaagataagaccctagaagtcagaacatctgtattccaaggccaccccttctccttttagtcatgtgactttgggcaggtcaccctccctgtctgtaaaatgaggttggactggataatctttatgtgccctttccttttggcttaaaattctgtgatttattcattcttaggaagatcagcatatttattgggatttctgcttcaaaaattctttctaacctcaaaaatccaagtccagaattttttgttttcttctggatttaaactgtttaatatgagcacatcaaggttgacttctcatcctttttgggaagtgaatttaatattgagggtaattgaatgatgttgcaatggctttccctcctgctggcttggtaagaatattaaagcctgcagaggtggaaattggagctcatggagaaatggatagaaagcaatttgttgcaggcagcctttggacaagttgttttaataggaaatagacctgctgcttcataggtttcctcaaccacctttcctcagctttcttaaaatgggatctacattggctcttcacacccaaatagcagactaatcgtttttctgcttagcaccgtctggttcattgtcttgaactctgccttacagcagcaagaaaattttcctcgacaagaacctcaatctttagttccattgagctccccctctggattttggacttaccagaagtaggaggttctgataccattcaagatggtctttccttcaaagcaggtctgaagaggagactaccaaagcagtgtttacaaacccagagtccacacaaccatattgcatagaacagcacttggctttcacaagcctcctacaggacctggtgtaattggagtgaaagggcagagaccctggaagtggaggtggctgtgtgctgcgatgggaagaaggcagaaggcccaggggctttggacatagagcagggtggaagctgcaagtactgggaaggaagagagtttcacagaaacaaagctttgtcacacagaaatgagttctgtctcactggtgacttcatccctcaggctccagctgagcagagattttaatcagcttccttaatgggtattgacactgctcaggaagcagtagaccctgtcagggacagctattgatcttttgtgttctgattagattggaaaatagatcaacttcattgtagtccaggaactgttggtcacagctactaggaatgaggtgatttctgagggctgagaaaaaacacagaatcttggccagcagccagcagctgcatggtgaaagatgcattcacttctcctttgagagttggggttgagggcaaacatagaacccaggtttggcttacaacccagtgtcccggaagccctccttcgggagaactgtaagtaagaggtgggtgtgtctaaagacaataccattaatgaatgttctggccttacctaaaaaggtttagcaatttggggataactcttggatctagcttatgtgcgttcacatgcacatttgctagcccagagcttttaaaatgaggtctggcatatacttgattacaaatgaaaactcagaaaccaattttatttattaaatcatatcttttgtttttccccctcccttctaatcccccaaaggacctatttgagctgttccccaattcatctgcttattttggaccatgaatctgccagagtgatattttctgttatttctcctccaaatttttccctgatgtttccaataaagatttacttgggtggccccttaaggtgacatcaggatgctcttatgtccttccagaataagcatacacttcactcctctccctttcatctccctctgcattcttaattccttgcttttctcacttggagccgagggtgctttagagaggtggttttccatgaatcagccaagattcctgtagaagttgggtataccaaccaccaccaccaccgccccctattccagtttcaaagctcctcggctatgctaatgtcccctcagagatgaggtttgacttttaggcccgtatgactcctccatagcctggccaaggagaccatgagtagccatgtctggtttactctttatcctgagactgtttgtttatagcttaaaacagaagtgtgtcttcccagcacaaacctaatcaatcagtgtatcagtgcatctggtggcaacagctcagcccattcaaagagcaaggattcaggaaaggcacactgatggtggggagcctcttaagagcctctaatgttctcccaaaaccagagttgagagtcggagtgccagtcgtcggggcccactattcctgaataagggacatgcaagggccagaagtagcttgactctcgcctaaatatctgtgcctttgcctgtcctttctcccactctactgaaacccggaacagattcccgcttgccttctgatgaagagaggttaggtaaagagagtttggaggaaaaaagacaccaggaggcaggctgcggggtaggagagggttctgagaggaggcagcaatccagaatacctccttttctagccagcatcccttgaacttttgaaaggttgtgcctaccactggctggcacaccagggcaatgatttccctgcagaaggaaggaaagaatgtttcacccttgcatccttcttggagaagctacagcctgtgctcagttgagtggttcacactcagactttggctttatggttttccttcctccttgtctttgccctgaccttgatcaacaggggtgaaaagaaccaccctgaggtttccatgcctctcccattttagtggtagcattttgtgtctttactccacccttcaccctagttccaccaaggttcacacaccagatgtaactgtttttcagctgagttgtatggattaacttcagtccactgtaaatacacctgggatggggtggggttggggttgtttagggagaagcagccagacttgctttgtgaactgaatgtatttttatgcaattttgagtggcctttcaaccctaagatgaatggttttgttttactggttgttgttatatagttttgagtattctgtgtttgaaagtttgggaataataatattcacttctatatgatgcctgtaaacacaacagtatttataaatgagtaaataaaactgtgttttaactttg

SEQ ID NO: 454382 - DNA, 4517 bp, Homo sapiens
  misc_feature (65)..(65): n is a, c, g, or t
ctatctcgaccgcgctcctgagtggaaccatctaataagcacatggtttggggaagggaaatggntaaaatgttgcaaaagagagatctgaaattctctagtgggccattctcatttgatgttccctagaacctccctgtcttccaactgcaggatgtgtttacttctcttctgggcttcccctggtttctgtcctagttcccaccccaagtttaagaagacttagattcatttattgctatctgaggccactagtgagatttcagatctctcttttgcaacattttacccatttcccttccccaaaccatgtgcttattagatggttccactcaggaagcaaggaagctaaaactcaagttaatggtctgtggatcccacgaaagtgtgtgtaaactactgactgtttctccactagaggcatttaattgagccaaagatgatggaagaagaaactctcaaagccatgtactttgttaggtgtctggatttttggcctgtttgcagcctctcctagccacagacagacactgtctcctctcagagaaaggccagtgtttcggtccaggccactggtgagtgtcggcacccttgaggtgggcatggagtgagcagaagaagcctggagaagagagaactatttaaaagtgttgccagttattcagcttccaggcggctttgcacctccaaaggtgcaaaaaggaaaaagaaagcagaaaggattcagcatttaagcagaaagaaaagggaaattctactctaccagatgagccactggttccactggagcttatcagtgaagtaacactgcaggagccctggtatccttccctcagagatatcatcaggggccctcaaaccccattgtttatgccagcactgaccgcactttaagcacacacttaccaatcagaggtcgtgtaattggcctaaatctaggcccagttattactacaaatcttagtcaccatactctctcgcccaggctggagtgcagtggtgtgatctcagctcactgcaacctccacctcccaggctcaagggatcctctcacctcagctcccgagcagctaggactgcaggtgtgcaccaccatgcccagctaatttttgaatttttttgtagagatggggttttgccatgttgcccaggctggtctgaagctgctgggctcaagcaatccacctggctgggcctcccaaagcgataggattacaggcgtaagggcccacgcccagcctaccatactgattttcaaggcagggtctaacccttcataagatgtgagttcttccaacccaataagcaggcagctttgaggacaaaaaggcaacattaaaagataagaccctagaagtcagaacatctgtattccaaggccaccccttctccttttagtcatgtgactttgggcaggtcaccctccctgtctgtaaaatgaggttggactggataatctttatgtgccctttccttttggcttaaaattctgtgatttattcattcttaggaagatcagcatatttattgggatttctgcttcaaaaattctttctaacctcaaaaatccaagtccagaattttttgttttcttctggatttaaactgtttaatatgagcacatcaaggttgacttctcatcctttttgggaagtgaatttaatattgagggtaattgaatgatgttgcaatggctttccctcctgctggcttggtaagaatattaaagcctgcagaggtggaaattggagctcatggagaaatggatagaaagcaatttgttgcaggcagcctttggacaagttgttttaataggaaatagacctgctgcttcataggtttcctcaaccacctttcctcagctttcttaaaatgggatctacattggctcttcacacccaaatagcagactaatcgtttttctgcttagcaccgtctggttcattgtcttgaactctgccttacagcagcaagaaaattttcctcgacaagaacctcaatctttagttccattgagctccccctctggattttggacttaccagaagtaggaggttctgataccattcaagatggtctttccttcaaagcaggtctgaagaggagactaccaaagcagtgtttacaaacccagagtccacacaaccatattgcatagaacagcacttggctttcacaagcctcctacaggacctggtgtaattggagtgaaagggcagagaccctggaagtggaggtggctgtgtgctgcgatgggaagaaggcagaaggcccaggggctttggacatagagcagggtggaagctgcaagtactgggaaggaagagagtttcacagaaacaaagctttgtcacacagaaatgagttctgtctcactggtgacttcatccctcaggctccagctgagcagagattttaatcagcttccttaatgggtattgacactgctcaggaagcagtagaccctgtcagggacagctattgatcttttgtgttctgattagattggaaaatagatcaacttcattgtagtccaggaactgttggtcacagctactaggaatgaggtgatttctgagggctgagaaaaaacacagaatcttggccagcagccagcagctgcatggtgaaagatgcattcacttctcctttgagagttggggttgagggcaaacatagaacccaggtttggcttacaacccagtgtcccggaagccctccttcgggagaactgtaagtaagaggtgggtgtgtctaaagacaataccattaatgaatgttctggccttacctaaaaaggtttagcaatttggggataactcttggatctagcttatgtgcgttcacatgcacatttgctagcccagagcttttaaaatgaggtctggcatatacttgattacaaatgaaaactcagaaaccaattttatttattaaatcatatcttttgtttttccccctcccttctaatcccccaaaggacctatttgagctgttccccaattcatctgcttattttggaccatgaatctgccagagtgatattttctgttatttctcctccaaatttttccctgatgtttccaataaagatttacttgggtggccccttaaggtgacatcaggatgctcttatgtccttccagaataagcatacacttcactcctctccctttcatctccctctgcattcttaattccttgcttttctcacttggagccgagggtgctttagagaggtggttttccatgaatcagccaagattcctgtagaagttgggtataccaaccaccaccaccaccgccccctattccagtttcaaagctcctcggctatgctaatgtcccctcagagatgaggtttgacttttaggcccgtatgactcctccatagcctggccaaggagaccatgagtagccatgtctggtttactctttatcctgagactgtttgtttatagcttaaaacagaagtgtgtcttcccagcacaaacctaatcaatcagtgtatcagtgcatctggtggcaacagctcagcccattcaaagagcaaggattcaggaaaggcacactgatggtggggagcctcttaagagcctctaatgttctcccaaaaccagagttgagagtcggagtgccagtcgtcggggcccactattcctgaataagggacatgcaagggccagaagtagcttgactctcgcctaaatatctgtgcctttgcctgtcctttctcccactctactgaaacccggaacagattcccgcttgccttctgatgaagagaggttaggtaaagagagtttggaggaaaaaagacaccaggaggcaggctgcggggtaggagagggttctgagaggaggcagcaatccagaatacctccttttctagccagcatcccttgaacttttgaaaggttgtgcctaccactggctggcacaccagggcaatgatttccctgcagaaggaaggaaagaatgtttcacccttgcatccttcttggagaagctacagcctgtgctcagttgagtggttcacactcagactttggctttatggttttccttcctccttgtctttgccctgaccttgatcaacaggggtgaaaagaaccaccctgaggtttccatgcctctcccattttagtggtagcattttgtgtctttactccacccttcaccctagttccaccaaggttcacacaccagatgtaactgtttttcagctgagttgtatggattaacttcagtccactgtaaatacacctgggatggggtggggttggggttgtttagggagaagcagccagacttgctttgtgaactgaatgtatttttatgcaattttgagtggcctttcaaccctaagatgaatggttttgttttactggttgttgttatatagttttgagtattctgtgtttgaaagtttgggaataataatattcacttctatatgatgcctgtaaacacaacagtatttataaatgagtaaataaaactgtgttttaactttg

SEQ ID NO: 454383 - DNA, 4444 bp, Homo sapiens
ggctagtcgtatgagaatatgcaaagagcctttggaattcacccatttttgccattgcccaaaagatcttccaactgcaggatgtgtttacttctcttctgggcttcccctggtttctgtcctagttcccaccccaagtttaagaagacttagattcatttattgctatctgaggccactagtgagatttcagatctctcttttgcaacattttacccatttcccttccccaaaccatgtgcttattagatggttccactcaggaagcaaggaagctaaaactcaagttaatggtctgtggatcccacgaaagtgtgtgtaaactactgactgtttctccactagaggcatttaattgagccaaagatgatggaagaagaaactctcaaagccatgtactttgttaggtgtctggatttttggcctgtttgcagcctctcctagccacagacagacactgtctcctctcagagaaaggccagtgtttcggtccaggccactggtgagtgtcggcacccttgaggtgggcatggagtgagcagaagaagcctggagaagagagaactatttaaaagtgttgccagttattcagcttccaggcggctttgcacctccaaaggtgcaaaaaggaaaaagaaagcagaaaggattcagcatttaagcagaaagaaaagggaaattctactctaccagatgagccactggttccactggagcttatcagtgaagtaacactgcaggagccctggtatccttccctcagagatatcatcaggggccctcaaaccccattgtttatgccagcactgaccgcactttaagcacacacttaccaatcagaggtcgtgtaattggcctaaatctaggcccagttattactacaaatcttagtcaccatactctctcgcccaggctggagtgcagtggtgtgatctcagctcactgcaacctccacctcccaggctcaagggatcctctcacctcagctcccgagcagctaggactgcaggtgtgcaccaccatgcccagctaatttttgaatttttttgtagagatggggttttgccatgttgcccaggctggtctgaagctgctgggctcaagcaatccacctggctgggcctcccaaagcgataggattacaggcgtaagggcccacgcccagcctaccatactgattttcaaggcagggtctaacccttcataagatgtgagttcttccaacccaataagcaggcagctttgaggacaaaaaggcaacattaaaagataagaccctagaagtcagaacatctgtattccaaggccaccccttctccttttagtcatgtgactttgggcaggtcaccctccctgtctgtaaaatgaggttggactggataatctttatgtgccctttccttttggcttaaaattctgtgatttattcattcttaggaagatcagcatatttattgggatttctgcttcaaaaattctttctaacctcaaaaatccaagtccagaattttttgttttcttctggatttaaactgtttaatatgagcacatcaaggttgacttctcatcctttttgggaagtgaatttaatattgagggtaattgaatgatgttgcaatggctttccctcctgctggcttggtaagaatattaaagcctgcagaggtggaaattggagctcatggagaaatggatagaaagcaatttgttgcaggcagcctttggacaagttgttttaataggaaatagacctgctgcttcataggtttcctcaaccacctttcctcagctttcttaaaatgggatctacattggctcttcacacccaaatagcagactaatcgtttttctgcttagcaccgtctggttcattgtcttgaactctgccttacagcagcaagaaaattttcctcgacaagaacctcaatctttagttccattgagctccccctctggattttggacttaccagaagtaggaggttctgataccattcaagatggtctttccttcaaagcaggtctgaagaggagactaccaaagcagtgtttacaaacccagagtccacacaaccatattgcatagaacagcacttggctttcacaagcctcctacaggacctggtgtaattggagtgaaagggcagagaccctggaagtggaggtggctgtgtgctgcgatgggaagaaggcagaaggcccaggggctttggacatagagcagggtggaagctgcaagtactgggaaggaagagagtttcacagaaacaaagctttgtcacacagaaatgagttctgtctcactggtgacttcatccctcaggctccagctgagcagagattttaatcagcttccttaatgggtattgacactgctcaggaagcagtagaccctgtcagggacagctattgatcttttgtgttctgattagattggaaaatagatcaacttcattgtagtccaggaactgttggtcacagctactaggaatgaggtgatttctgagggctgagaaaaaacacagaatcttggccagcagccagcagctgcatggtgaaagatgcattcacttctcctttgagagttggggttgagggcaaacatagaacccaggtttggcttacaacccagtgtcccggaagccctccttcgggagaactgtaagtaagaggtgggtgtgtctaaagacaataccattaatgaatgttctggccttacctaaaaaggtttagcaatttggggataactcttggatctagcttatgtgcgttcacatgcacatttgctagcccagagcttttaaaatgaggtctggcatatacttgattacaaatgaaaactcagaaaccaattttatttattaaatcatatcttttgtttttccccctcccttctaatcccccaaaggacctatttgagctgttccccaattcatctgcttattttggaccatgaatctgccagagtgatattttctgttatttctcctccaaatttttccctgatgtttccaataaagatttacttgggtggccccttaaggtgacatcaggatgctcttatgtccttccagaataagcatacacttcactcctctccctttcatctccctctgcattcttaattccttgcttttctcacttggagccgagggtgctttagagaggtggttttccatgaatcagccaagattcctgtagaagttgggtataccaaccaccaccaccaccgccccctattccagtttcaaagctcctcggctatgctaatgtcccctcagagatgaggtttgacttttaggcccgtatgactcctccatagcctggccaaggagaccatgagtagccatgtctggtttactctttatcctgagactgtttgtttatagcttaaaacagaagtgtgtcttcccagcacaaacctaatcaatcagtgtatcagtgcatctggtggcaacagctcagcccattcaaagagcaaggattcaggaaaggcacactgatggtggggagcctcttaagagcctctaatgttctcccaaaaccagagttgagagtcggagtgccagtcgtcggggcccactattcctgaataagggacatgcaagggccagaagtagcttgactctcgcctaaatatctgtgcctttgcctgtcctttctcccactctactgaaacccggaacagattcccgcttgccttctgatgaagagaggttaggtaaagagagtttggaggaaaaaagacaccaggaggcaggctgcggggtaggagagggttctgagaggaggcagcaatccagaatacctccttttctagccagcatcccttgaacttttgaaaggttgtgcctaccactggctggcacaccagggcaatgatttccctgcagaaggaaggaaagaatgtttcacccttgcatccttcttggagaagctacagcctgtgctcagttgagtggttcacactcagactttggctttatggttttccttcctccttgtctttgccctgaccttgatcaacaggggtgaaaagaaccaccctgaggtttccatgcctctcccattttagtggtagcattttgtgtctttactccacccttcaccctagttccaccaaggttcacacaccagatgtaactgtttttcagctgagttgtatggattaacttcagtccactgtaaatacacctgggatggggtggggttggggttgtttagggagaagcagccagacttgctttgtgaactgaatgtatttttatgcaattttgagtggcctttcaaccctaagatgaatggttttgttttactggttgttgttatatagttttgagtattctgtgtttgaaagtttgggaataataatattcacttctatatgatgcctgtaaacacaacagtatttataaatgagtaaataaaactgtgttttaactttg

SEQ ID NO: 454384 - DNA, 11095 bp, Homo sapiens
agggagcgtgcgggcggtactactggcgggaggagtaaagatggcggcgcgagggtctccgccctctgctccgggctgaagcgctctgagagaggcggcagcggcaactcgagccccaacagtaatttagtgttggtagttttggcagcagctgccgaggccggagcaatggcggaactggagcacctaggagggaagcgggcagagtcggcgcgaatgcggcgggcagagcagcttcggcgctggcggggctcgctgacagagcaggagcctgcggagcgacgaggcgcggggcggcagccgctgaccaggcgcgggagccccagggtccgcttcgaggacggtgctgtctttctggccgcctgctctagcggggacaccgacgaggtgagaaagcttctggcaagaggtgctgatatcaacacggtcaacgtggacggcttgacagccctgcaccaggcatgtattgatgaaaatttggacatggtgaagtttctggtggagaacagagccaatgtaaaccagcaagacaacgagggctggacaccccttcatgcagcagcttcctgtggctatctcaacatagcagagtatttcattaatcacggagccagtgtaggtattgtcaatagtgaaggtgaagttccctctgaccttgcagaagagccagccatgaaggatcttcttctggagcaagtaaagaagcaaggaattgatctagagcagtcaagaaaagaagaagagcagcagatgttgcaggatgcccgccagtggctcaacagtgggaaaatagaggatgtgaggcaggctcgctcaggggctacagcccttcatgtggctgctgccaagggctactctgaagtcctcagacttttaattcaggctggctatgaactcaatgttcaggattatgatggctggactcccctccatgctgctgcacactggggagtgaaggaggcttgctccatcctggcagaagcactttgtgacatggatattcgaaataaactgggccagacaccatttgatgtggctgatgagggtctcgtggagcatttggagttgctccagaagaagcagaatgtgcttcgaagtgaaaaggagacacggaataaactcattgagtcagatctgaacagcaagattcagagtgggttctttaagaacaaagagaagatgctctatgaggaggagacacctaagtcccaagaaatggaggaagaaaataaagaatctagtagctccagctcagaggaggaggaaggtgaagatgaagcttctgagtcagaaactgagaaggaggcagataaaaagccagaagcctttgtcaatcattccaactctgaaagcaagagtagtatcacagagcagataccagcaccagctcaaaataccttctctgcctcttctgctaggaggttctcttctggcctttttaacaagccagaagagcccaaagatgaatctccttcttcatggagattgggactgagaaaaactggcagccacaacatgctgagtgaggtggccaattccagggaacctataagggaccgaggctcttccatctatcgctcctcttcaagccctcgaatttctgctctactggacaacaaagataaggagagagaaaacaaaagctatattagttcactagcaccccggaagctcaacagcacaagtgatattgaagaaaaggagaacagagaatcagctgttaatctagtgaggagtggctcctatacccggcagctatggagggatgaagcaaaaggaaatgaaatcccacagacaattgctccctccacctatgtatcaacttacttgaaaaggactcctcacaaatcccaggccgacacaacagcagagaaaacagcagacaatgtctcttctagcaccccgctctgtgtgatcaccaatcgccctcttcctagcactgccaatggggttacagctactcctgtgctctccattactggaacagattcctctgtggaagccagggagaagaggaggtcctatctgactcctgtacgggatgaggaagcagagtctttacggaaagcacgctccagacaagctcggcagacacgaaggtctactcaaggtgtcaccctaacagaccttcaagaagcagaaaggacattcagccggtcgagggcagagaggcaagctcaggagcagcctcgtgagaagcccacagacactgaagggcttgaggggagccctgagaagcatgagccctcagcagttccagcaacagaagctggggagggccagcagccctggggcaggagtctggatgaagagcctatctgtcatcgcctgaggtgcccagctcagccagacaaacccaccacgccagcatctccttctacgtcaagaccctcactctacaccagttcccacctgctatggacaaatagattttcagtccctgattctgagagttcagagactaccacaaacactacaactgcaaaggaaatggacaaaaatgagaatgaagaagcagatttggatgagcagtcctctaagaggctgtccatccgagagaggaggcggcccaaggaacgacgaagaggcacaggcatcaatttctggacaaaggatgaggatgaaactgatggctctgaagaggtcaaagaaacgtggcatgaaagactttctaggttggaatcgggaggtagtaatcctacaaccagtgattcttacggtgaccgggcttcagcaagagcccgtcgggaggcccgggaggcccgcctagccaccctgaccagccgtgtagaagaagacagcaacagagattataaaaaactctatgagagtgctctgactgaaaaccaaaaactgaaaacaaaacttcaggaagcccagctagagctagcagatataaagtccaagcttgagaaggtggcccagcagaaacaagaaaagacctctgaccgatcatcagtgctggagatggagaaacgggagaggcgagccttggagcgcaaaatgtcagaaatggaggaagaaatgaaggtgttaacagaactgaaatccgacaaccagaggctgaaagatgaaaatggtgccctcatcagagtcatcagcaaactgtccaagtaggctaggctccagatttatgaggaaagaaagggacagcatttgctgcccccacccctcttttccagtccttgccttccaaccaaaagaaatggatgttttggtggaaggacacttctttctatcaccctcttcagtcacctctatacactctacattttctctgcactttcaatgccctgttcttccaaacccctatcccaagttttatgacagttttaattgaagcatgattgtggtaattcgagccatctggagaatgctctggggagtacaccaggctcagctgtggacccctcaacttcctgctgctcagctactttgtccacattggatttggtccaaacatgtaagacttctaccctaatcagtatccttcagctttttacattaacccagtgtcctctgatataggtgagtcttgtggtagccactccaggatcctgattggggtgccaagagaaacagcaggatgttgaattgatcatcagatgccctctggaatggttagcatccaaggtgacagtgactgcattgaggcgctctattcttcttcacctctcaggaactgacttttattttttctatcaacacccagtaatctccctaactagttttaacccttattcctccctcatacctagccatttctccaaggcgcaaatggccctggcttcatttattcctttcctttctatccttttatatttttcccttccccaccccctcactcaatggtataaaagctaggacagagcacctgacctcagttgtctttggccattgtgggaagtcattattctggagacaagaaaatcatcactctggtgccttggtggcagcaccactgcctgctccctggaaggtagactatggcataagtgtcagctcattgttttcgtctcccacttatcttcccccttcaaagtgattttctttataagaaaatttgggctctgaatactccattctgcctcacttccttgaccttgttttcctctcttcgccctgacacctgcttctaatgagaaatgaagtcagtgcaaggaggaatgagaggtggggaggggagattgttgagagatggactaggaagtggaagcaggctggaaagacacatatggcgaaagtcaagtatctgaggccacttgcaacattgtgacaaagaagatggaagatagcagcctactgggctgtgagaatagtggtgaatttgattatttccagtggttagatttagcagagagatttactttcttagaaattaataggggaaatggcacttaatagaggtttaatggaatgaagtactttcaacccattgatgagagtcatggaagtttagagtggcaagacccagaggtcattaggtccagctttctattattgtgtcacagggacccctgctaccacagctttcacccatgggcatggtcaggtagcctctggtggctatgcatttattactcaaaagttgggcaactctaataacgagagagtttttcctcatatcagctgaagtctgcctgtggattctccttgtagtccagatctactatctgcaactctttaacggcacttgagatatgtgcagtgggtggtctccccctcagtcttactttgagctgctgttactctagtcctttaagtcattcctcatatggcatgcttttcttacctgtcacatcttggccatcctcctctagacaaaaccagcctttaaaatatcatgtccaggcctggaaagaatacaaatccagtgcaaaattaaaccattagttcttgatgataacctagcattaatacttacagtattttctttttgtaggagttttatcccttggttcacttgagtgtgcaagtcattaaatcctcatcattttagggttgccagtgatattcagtgtttagagtggttcattcccttaatatatactacctctgtctgttaattctttcctaacatgacatgtagctctccatggtcctccctctgaaacaccacatgctgtttaaactagaagctgtaattcaagatcccaattccaccaggtgcagtggctcatgcctgtaatcccagcacttcaggaggccgaggtggacagatcacgaggtcaggagttcgagaccatcctggctaacacggtgaaacccaatctctactaaaaatacaaaaaattagccaggcgtggtggcaggcgcctgtagtcccagctactcaggaggctgaggcaggagaatggcgtgaacccgggaggcggagcttgcagtgagccttgatcacgccactgcactccagcctgggtgacagagcaagactccatctcaaaaaaaataataataataaataaataaaaaatcccaattacagaacaggagatatgtttcctctgacaaaaccccatttttagagtgtataaaattctgtctttcatttccaaccatttttcaagagaagctgctactatcttgagacttcgtattatcatgggagtactgtaagttcagttctcagggaatgctaaattagagtaataagttttatatccttcattctgggagaggaaatcaacataaggtgttgactaattgattatcctggaacattttgaatattggggaaggaagatgatacttctttctcaagaaaagaaaattggattattaggaatacatcttgacccttttccactcaatagaccagggaaaggggttacagagagcctcctcagatctgtttgtgcctttcaaaagtactgggggcagattctcaaaactcttagattggtgttgcatccctgccacttcacatgacccttccatgttaaagctgacttttcttgccagaaagttttccttgtgacaagaaatttgcaagcttttcaatctcaggaatactggattctatagccaagaactcatgaaagtaagtgtaaactatcctaggtaatttcaggtactttctcttatgcaattaattttattaactgatttctggtctatctccagagataaaataccattccttcacaactgtattgtctggaagccccatgagatggtaattataggccttctactagccagcagttctctctggatactggcatcagcaggtctcctttttcttgtgctgcttggacaggtacctactgctggcctcttcagtggccacaatcctcagtcctcacctgctggtttggagactcatgagcaccccaggcagctcaagctgaataaatagctgcagacatggccaacaacatggggctcaggtctgtcacttaacttagagtctttacatgaaatatcagaatgggaaagagaatgttcctggtaaaactctgttttcattaatttgttatttttcaaaaaccgagccacacctttggaagtaatgatttggccattccagagattctggggctaaagtttgtttttccagggctgctgatccttttccagatagctccagagtatgatgaccccagccccatcccaatctctagcgaaagggttatgcaaatctcagggtgttgcctctaaagaatctaaagaatagacatgctttgggcttactcagtgtaccagattctctagtgggccattctcatttgatgttccctagaacctccctgtcttccaactgcaggatgtgtttacttctcttctgggcttcccctggtttctgtcctagttcccaccccaagtttaagaagacttagattcatttattgctatctgaggccactagtgagatttcagatctctcttttgcaacattttacccatttcccttccccaaaccatgtgcttattagatggttccactcaggaagcaaggaagctaaaactcaagttaatggtctgtggatcccacgaaagtgtgtgtaaactactgactgtttctccactagaggcatttaattgagccaaagatgatggaagaagaaactctcaaagccatgtactttgttaggtgtctggatttttggcctgtttgcagcctctcctagccacagacagacactgtctcctctcagagaaaggccagtgtttcggtccaggccactggtgagtgtcggcacccttgaggtgggcatggagtgagcagaagaagcctggagaagagagaactatttaaaagtgttgccagttattcagcttccaggcggctttgcacctccaaaggtgcaaaaaggaaaaagaaagcagaaaggattcagcatttaagcagaaagaaaagggaaattctactctaccagatgagccactggttccactggagcttatcagtgaagtaacactgcaggagccctggtatccttccctcagagatatcatcaggggccctcaaaccccattgtttatgccagcactgaccgcactttaagcacacacttaccaatcagaggtcgtgtaattggcctaaatctaggcccagttattactacaaatcttagtcaccatactctctcgcccaggctggagtgcagtggtgtgatctcagctcactgcaacctccacctcccaggctcaagggatcctctcacctcagctcccgagcagctaggactgcaggtgtgcaccaccatgcccagctaatttttgaatttttttgtagagatggggttttgccatgttgcccaggctggtctgaagctgctgggctcaagcaatccacctggctgggcctcccaaagcgataggattacaggcgtaagggcccacgcccagcctaccatactgattttcaaggcagggtctaacccttcataagatgtgagttcttccaacccaataagcaggcagctttgaggacaaaaaggcaacattaaaagataagaccctagaagtcagaacatctgtattccaaggccaccccttctccttttagtcatgtgactttgggcaggtcaccctccctgtctgtaaaatgaggttggactggataatctttatgtgccctttccttttggcttaaaattctgtgatttattcattcttaggaagatcagcatatttattgggatttctgcttcaaaaattctttctaacctcaaaaatccaagtccagaattttttgttttcttctggatttaaactgtttaatatgagcacatcaaggttgacttctcatcctttttgggaagtgaatttaatattgagggtaattgaatgatgttgcaatggctttccctcctgctggcttggtaagaatattaaagcctgcagaggtggaaattggagctcatggagaaatggatagaaagcaatttgttgcaggcagcctttggacaagttgttttaataggaaatagacctgctgcttcataggtttcctcaaccacctttcctcagctttcttaaaatgggatctacattggctcttcacacccaaatagcagactaatcgtttttctgcttagcaccgtctggttcattgtcttgaactctgccttacagcagcaagaaaattttcctcgacaagaacctcaatctttagttccattgagctccccctctggattttggacttaccagaagtaggaggttctgataccattcaagatggtctttccttcaaagcaggtctgaagaggagactaccaaagcagtgtttacaaacccagagtccacacaaccatattgcatagaacagcacttggctttcacaagcctcctacaggacctggtgtaattggagtgaaagggcagagaccctggaagtggaggtggctgtgtgctgcgatgggaagaaggcagaaggcccaggggctttggacatagagcagggtggaagctgcaagtactgggaaggaagagagtttcacagaaacaaagctttgtcacacagaaatgagttctgtctcactggtgacttcatccctcaggctccagctgagcagagattttaatcagcttccttaatgggtattgacactgctcaggaagcagtagaccctgtcagggacagctattgatcttttgtgttctgattagattggaaaatagatcaacttcattgtagtccaggaactgttggtcacagctactaggaatgaggtgatttctgagggctgagaaaaaacacagaatcttggccagcagccagcagctgcatggtgaaagatgcattcacttctcctttgagagttggggttgagggcaaacatagaacccaggtttggcttacaacccagtgtcccggaagccctccttcgggagaactgtaagtaagaggtgggtgtgtctaaagacaataccattaatgaatgttctggccttacctaaaaaggtttagcaatttggggataactcttggatctagcttatgtgcgttcacatgcacatttgctagcccagagcttttaaaatgaggtctggcatatacttgattacaaatgaaaactcagaaaccaattttatttattaaatcatatcttttgtttttccccctcccttctaatcccccaaaggacctatttgagctgttccccaattcatctgcttattttggaccatgaatctgccagagtgatattttctgttatttctcctccaaatttttccctgatgtttccaataaagatttacttgggtggccccttaaggtgacatcaggatgctcttatgtccttccagaataagcatacacttcactcctctccctttcatctccctctgcattcttaattccttgcttttctcacttggagccgagggtgctttagagaggtggttttccatgaatcagccaagattcctgtagaagttgggtataccaaccaccaccaccaccgccccctattccagtttcaaagctcctcggctatgctaatgtcccctcagagatgaggtttgacttttaggcccgtatgactcctccatagcctggccaaggagaccatgagtagccatgtctggtttactctttatcctgagactgtttgtttatagcttaaaacagaagtgtgtcttcccagcacaaacctaatcaatcagtgtatcagtgcatctggtggcaacagctcagcccattcaaagagcaaggattcaggaaaggcacactgatggtggggagcctcttaagagcctctaatgttctcccaaaaccagagttgagagtcggagtgccagtcgtcggggcccactattcctgaataagggacatgcaagggccagaagtagcttgactctcgcctaaatatctgtgcctttgcctgtcctttctcccactctactgaaacccggaacagattcccgcttgccttctgatgaagagaggttaggtaaagagagtttggaggaaaaaagacaccaggaggcagcaatccagaatacctccttttctagccagcatcccttgaacttttgaaaggttgtgcctaccactggctggcacaccagggcaatgatttccctgcagaaggaaggaaagaatgtttcacccttgcatccttcttggagaagctacagcctgtgctcagttgagtggttcacactcagactttggctttatggttttccttcctccttgtctttgccctgaccttgatcaacaggggtgaaaagaaccaccctgaggtttccatgcctctcccattttagtggtagcattttgtgtctttactccacccttcaccctagttccaccaaggttcacacaccagatgtaactgtttttcagctgagttgtatggattaacttcagtccactgtaaatacacctgggatggggtggggttggggttgtttagggagaagcagccagacttgctttgtgaactgaatgtatttttatgcaattttgagtggcctttcaaccctaagatgaatggttttgttttactggttgttgttatatagttttgagtattctgtgtttgaaagtttgggaataataatattcacttctatatgatgcctgtaaacacaacagtatttataaatgagtaaataaaactgtgttttaactttg

SEQ ID NO: 454385 - DNA, 11076 bp, Homo sapiens
agggagcgtgcgggcggtactactggcgggaggagtaaagatggcggcgcgagggtctccgccctctgctccgggctgaagcgctctgagagaggcggcagcggcaactcgagccccaacagtaatttagtgttggtagttttggcagcagctgccgaggccggagcaatggcggaactggagcacctaggagggaagcgggcagagtcggcgcgaatgcggcgggcagagcagcttcggcgctggcggggctcgctgacagagcaggagcctgcggagcgacgaggcgcggggcggcagccgctgaccaggcgcgggagccccagggtccgcttcgaggacggtgctgtctttctggccgcctgctctagcggggacaccgacgaggtgagaaagcttctggcaagaggtgctgatatcaacacggtcaacgtggacggcttgacagccctgcaccaggcatgtattgatgaaaatttggacatggtgaagtttctggtggagaacagagccaatgtaaaccagcaagacaacgagggctggacaccccttcatgcagcagcttcctgtggctatctcaacatagcagagtatttcattaatcacggagccagtgtaggtattgtcaatagtgaaggtgaagttccctctgaccttgcagaagagccagccatgaaggatcttcttctggagcaagtaaagaagcaaggaattgatctagagcagtcaagaaaagaagaagagcagcagatgttgcaggatgcccgccagtggctcaacagtgggaaaatagaggatgtgaggcaggctcgctcaggggctacagcccttcatgtggctgctgccaagggctactctgaagtcctcagacttttaattcaggctggctatgaactcaatgttcaggattatgatggctggactcccctccatgctgctgcacactggggagtgaaggaggcttgctccatcctggcagaagcactttgtgacatggatattcgaaataaactgggccagacaccatttgatgtggctgatgagggtctcgtggagcatttggagttgctccagaagaagcagaatgtgcttcgaagtgaaaaggagacacggaataaactcattgagtcagatctgaacagcaagattcagagtgggttctttaagaacaaagagaagatgctctatgaggaggagacacctaagtcccaagaaatggaggaagaaaataaagaatctagtagctccagctcagaggaggaggaaggtgaagatgaagcttctgagtcagaaactgagaaggaggcagataaaaagccagaagcctttgtcaatcattccaactctgaaagcaagagtagtatcacagagcagataccagcaccagctcaaaataccttctctgcctcttctgctaggaggttctcttctggcctttttaacaagccagaagagcccaaagatgaatctccttcttcatggagattgggactgagaaaaactggcagccacaacatgctgagtgaggtggccaattccagggaacctataagggaccgaggctcttccatctatcgctcctcttcaagccctcgaatttctgctctactggacaacaaagataaggagagagaaaacaaaagctatattagttcactagcaccccggaagctcaacagcacaagtgatattgaagaaaaggagaacagagaatcagctgttaatctagtgaggagtggctcctatacccggcagctatggagggatgaagcaaaaggaaatgaaatcccacagacaattgctccctccacctatgtatcaacttacttgaaaaggactcctcacaaatcccaggccgacacaacagcagagaaaacagcagacaatgtctcttctagcaccccgctctgtgtgatcaccaatcgccctcttcctagcactgccaatggggttacagctactcctgtgctctccattactggaacagattcctctgtggaagccagggagaagaggaggtcctatctgactcctgtacgggatgaggaagcagagtctttacggaaagcacgctccagacaagctcggcagacacgaaggtctactcaaggtgtcaccctaacagaccttcaagaagcagaaaggacattcagccggtcgagggcagagaggcaagctcaggagcagcctcgtgagaagcccacagacactgaagggcttgaggggagccctgagaagcatgagccctcagcagttccagcaacagaagctggggagggccagcagccctggggcaggagtctggatgaagagcctatctgtcatcgcctgaggtgcccagctcagccagacaaacccaccacgccagcatctccttctacgtcaagaccctcactctacaccagttcccacctgctatggacaaatagattttcagtccctgattctgagagttcagagactaccacaaacactacaactgcaaaggaaatggacaaaaatgagaatgaagaagcagatttggatgagcagtcctctaagaggctgtccatccgagagaggaggcggcccaaggaacgacgaagaggcacaggcatcaatttctggacaaaggatgaggatgaaactgatggctctgaagaggtcaaagaaacgtggcatgaaagactttctaggttggaatcgggaggtagtaatcctacaaccagtgattcttacggtgaccgggcttcagcaagagcccgtcgggaggcccgggaggcccgcctagccaccctgaccagccgtgtagaagaagacagcaacagagattataaaaaactctatgagagtgctctgactgaaaaccaaaaactgaaaacaaaacttcaggaagcccagctagagctagcagatataaagtccaagcttgagaaggtggcccagcagaaacaagaaaagacctctgaccgatcatcagtgctggagatggagaaacgggagaggcgagccttggagcgcaaaatgtcagaaatggaggaagaaatgaaggtgttaacagaactgaaatccgacaaccagaggctgaaagatgaaaatggtgccctcatcagagtcatcagcaaactgtccaagtaggctaggctccagatttatgaggaaagaaagggacagcatttgctgcccccacccctcttttccagtccttgccttccaaccaaaagaaatggatgttttggtggaaggacacttctttctatcaccctcttcagtcacctctatacactctacattttctctgcactttcaatgccctgttcttccaaacccctatcccaagttttatgacagttttaattgaagcatgattgtggtaattcgagccatctggagaatgctctggggagtacaccaggctcagctgtggacccctcaacttcctgctgctcagctactttgtccacattggatttggtccaaacatgtaagacttctaccctaatcagtatccttcagctttttacattaacccagtgtcctctgatataggtgagtcttgtggtagccactccaggatcctgattggggtgccaagagaaacagcaggatgttgaattgatcatcagatgccctctggaatggttagcatccaaggtgacagtgactgcattgaggcgctctattcttcttcacctctcaggaactgacttttattttttctatcaacacccagtaatctccctaactagttttaacccttattcctccctcatacctagccatttctccaaggcgcaaatggccctggcttcatttattcctttcctttctatccttttatatttttcccttccccaccccctcactcaatggtataaaagctaggacagagcacctgacctcagttgtctttggccattgtgggaagtcattattctggagacaagaaaatcatcactctggtgccttggtggcagcaccactgcctgctccctggaaggtagactatggcataagtgtcagctcattgttttcgtctcccacttatcttcccccttcaaagtgattttctttataagaaaatttgggctctgaatactccattctgcctcacttccttgaccttgttttcctctcttcgccctgacacctgcttctaatgagaaatgaagtcagtgcaaggaggaatgagaggtggggaggggagattgttgagagatggactaggaagtggaagcaggctggaaagacacatatggcgaaagtcaagtatctgaggccacttgcaacattgtgacaaagaagatggaagatagcagcctactgggctgtgagaatagtggtgaatttgattatttccagtggttagatttagcagagagatttactttcttagaaattaataggggaaatggcacttaatagaggtttaatggaatgaagtactttcaacccattgatgagagtcatggaagtttagagtggcaagacccagaggtcattaggtccagctttctattattgtgtcacagggacccctgctaccacagctttcacccatgggcatggtcaggtagcctctggtggctatgcatttattactcaaaagttgggcaactctaataacgagagagtttttcctcatatcagctgaagtctgcctgtggattctccttgtagtccagatctactatctgcaactctttaacggcacttgagatatgtgcagtgggtggtctccccctcagtcttactttgagctgctgttactctagtcctttaagtcattcctcatatggcatgcttttcttacctgtcacatcttggccatcctcctctagacaaaaccagcctttaaaatatcatgtccaggcctggaaagaatacaaatccagtgcaaaattaaaccattagttcttgatgataacctagcattaatacttacagtattttctttttgtaggagttttatcccttggttcacttgagtgtgcaagtcattaaatcctcatcattttagggttgccagtgatattcagtgtttagagtggttcattcccttaatatatactacctctgtctgttaattctttcctaacatgacatgtagctctccatggtcctccctctgaaacaccacatgctgtttaaactagaagctgtaattcaagatcccaattccaccaggtgcagtggctcatgcctgtaatcccagcacttcaggaggccgaggtggacagatcacgaggtcaggagttcgagaccatcctggctaacacggtgaaacccaatctctactaaaaatacaaaaaattagccaggcgtggtggcaggcgcctgtagtcccagctactcaggaggctgaggcaggagaatggcgtgaacccgggaggcggagcttgcagtgagccttgatcacgccactgcactccagcctgggtgacagagcaagactccatctcaaaaaaaataataataataaataaataaaaaatcccaattacagaacaggagatatgtttcctctgacaaaaccccatttttagagtgtataaaattctgtctttcatttccaaccatttttcaagagaagctgctactatcttgagacttcgtattatcatgggagtactgtaagttcagttctcagggaatgctaaattagagtaataagttttatatccttcattctgggagaggaaatcaacataaggtgttgactaattgattatcctggaacattttgaatattggggaaggaagatgatacttctttctcaagaaaagaaaattggattattaggaatacatcttgacccttttccactcaatagaccagggaaaggggttacagagagcctcctcagatctgtttgtgcctttcaaaagtactgggggcagattctcaaaactcttagattggtgttgcatccctgccacttcacatgacccttccatgttaaagctgacttttcttgccagaaagttttccttgtgacaagaaatttgcaagcttttcaatctcaggaatactggattctatagccaagaactcatgaaagtaagtgtaaactatcctaggtaatttcaggtactttctcttatgcaattaattttattaactgatttctggtctatctccagagataaaataccattccttcacaactgtattgtctggaagccccatgagatggtaattataggccttctactagccagcagttctctctggatactggcatcagcaggtctcctttttcttgtgctgcttggacaggtacctactgctggcctcttcagtggccacaatcctcagtcctcacctgctggtttggagactcatgagcaccccaggcagctcaagctgaataaatagctgcagacatggccaacaacatggggctcaggtctgtcacttaacttagagtctttacatgaaatatcagaatgggaaagagaatgttcctggtaaaactctgttttcattaatttgttatttttcaaaaaccgagccacacctttggaagtaatgatttggccattccagagattctggggctaaagtttgtttttccagggctgctgatccttttccagatagctccagagtatgatgaccccagccccatcccaatctctagcgaaagggttatgcaaatctcagggtgttgcctctaaagaatctaaagaatagacatgctttgggcttactcagtgtaccagattctctagtgggccattctcatttgatgttccctagaacctccctgtcttccaactgcaggatgtgtttacttctcttctgggcttcccctggtttctgtcctagttcccaccccaagtttaagaagacttagattcatttattgctatctgaggccactagtgagatttcagatctctcttttgcaacattttacccatttcccttccccaaaccatgtgcttattagatggttccactcaggaagcaaggaagctaaaactcaagttaatggtctgtggatcccacgaaagtgtgtgtaaactactgactgtttctccactagaggcatttaattgagccaaagatgatggaagaagaaactctcaaagccatgtactttgttaggtgtctggatttttggcctgtttgcagcctctcctagccacagacagacactgtctcctctcagagaaaggccagtgtttcggtccaggccactggtgagtgtcggcacccttgaggtgggcatggagtgagcagaagaagcctggagaagagagaactatttaaaagtgttgccagttattcagcttccaggcggctttgcacctccaaaggtgcaaaaaggaaaaagaaagcagaaaggattcagcatttaagcagaaagaaaagggaaattctactctaccagatgagccactggttccactggagcttatcagtgaagtaacactgcaggagccctggtatccttccctcagagatatcatcaggggccctcaaaccccattgtttatgccagcactgaccgcactttaagcacacacttaccaatcagaggtcgtgtaattggcctaaatctaggcccagttattactacaaatcttagtcaccatactctctcgcccaggctggagtgcagtggtgtgatctcagctcactgcaacctccacctcccaggctcaagggatcctctcacctcagctcccgagcagctaggactgcaggtgtgcaccaccatgcccagctaatttttgaatttttttgtagagatggggttttgccatgttgcccaggctggtctgaagctgctgggctcaagcaatccacctggctgggcctcccaaagcgataggattacaggcgtaagggcccacgcccagcctaccatactgattttcaaggcagggtctaacccttcataagatgtgagttcttccaacccaataagcaggcagctttgaggacaaaaaggcaacattaaaagataagaccctagaagtcagaacatctgtattccaaggccaccccttctccttttagtcatgtgactttgggcaggtcaccctccctgtctgtaaaatgaggttggactggataatctttatgtgccctttccttttggcttaaaattctgtgatttattcattcttaggaagatcagcatatttattgggatttctgcttcaaaaattctttctaacctcaaaaatccaagtccagaattttttgttttcttctggatttaaactgtttaatatgagcacatcaaggttgacttctcatcctttttgggaagtgaatttaatattgagggtaattgaatgatgttgcaatggctttccctcctgctggcttggtaagaatattaaagcctgcagaggtggaaattggagctcatggagaaatggatagaaagcaatttgttgcaggcagcctttggacaagttgttttaataggaaatagacctgctgcttcataggtttcctcaaccacctttcctcagctttcttaaaatgggatctacattggctcttcacacccaaatagcagactaatcgtttttctgcttagcaccgtctggttcattgtcttgaactctgccttacagcagcaagaaaattttcctcgacaagaacctcaatctttagttccattgagctccccctctggattttggacttaccagaagtaggaggttctgataccattcaagatggtctttccttcaaagcaggtctgaagaggagactaccaaagcagtgtttacaaacccagagtccacacaaccatattgcatagaacagcacttggctttcacaagcctcctacaggacctggtgtaattggagtgaaagggcagagaccctggaagtggaggtggctgtgtgctgcgatgggaagaaggcagaaggcccaggggctttggacatagagcagggtggaagctgcaagtactgggaaggaagagagtttcacagaaacaaagctttgtcacacagaaatgagttctgtctcactggtgacttcatccctcaggctccagctgagcagagattttaatcagcttccttaatgggtattgacactgctcaggaagcagtagaccctgtcagggacagctattgatcttttgtgttctgattagattggaaaatagatcaacttcattgtagtccaggaactgttggtcacagctactaggaatgaggtgatttctgagggctgagaaaaaacacagaatcttggccagcagccagcagctgcatggtgaaagatgcattcacttctcctttgagagttggggttgagggcaaacatagaacccaggtttggcttacaacccagtgtcccggaagccctccttcgggagaactgtaagtaagaggtgggtgtgtctaaagacaataccattaatgaatgttctggccttacctaaaaaggtttagcaatttggggataactcttggatctagcttatgtgcgttcacatgcacatttgctagcccagagcttttaaaatgaggtctggcatatacttgattacaaatgaaaactcagaaaccaattttatttattaaatcatatcttttgtttttccccctcccttctaatcccccaaaggacctatttgagctgttccccaattcatctgcttattttggaccatgaatctgccagagtgatattttctgttatttctcctccaaatttttccctgatgtttccaataaagatttacttgggtggccccttaaggtgacatcaggatgctcttatgtccttccagaataagcatacacttcactcctctccctttcatctccctctgcattcttaattccttgcttttctcacttggagccgagggtgctttagagaggtggttttccatgaatcagccaagattcctgtagaagttgggtataccaaccaccaccaccaccgccccctattccagtttcaaagctcctcggctatgctaatgtcccctcagagatgaggtttgacttttaggcccgtatgactcctccatagcctggccaaggagaccatgagtagccatgtctggtttactctttatcctgagactgtttgtttatagcttaaaacagaagtgtgtcttcccagcacaaacctaatcaatcagtgtatcagtgcatctggtggcaacagctcagcccattcaaagagcaaggattcaggaaaggcacactgatggtggggagcctcttaagagcctctaatgttctcccaaaaccagagttgagagtcggagtgccagtcgtcggggcccactattcctgaataagggacatgcaagggccagaagtagcttgactctcgcctaaatatctgtgcctttgcctgtcctttctcccactctactgaaacccggaacagattcccgcttgccttctgatgaagagaggttaggtaaagagagtttggaggaaaaaagacaccaggaggcaggctgcggggtaggagagggttctgagaggaggcagcaatccagaatacctccttttctagccagcatcccttgaacttttgaaaggttgtgcctaccactggctggcacaccagggcaatgatttccctgcagaaggaaggaaagaatgtttcacccttgcatccttcttggagaagctacagcctgtgctcagttgagtggttcacactcagactttggctttatggttttccttcctccttgtctttgccctgaccttgatcaacagggttgtgtctttactccacccttcaccctagttccaccaaggttcacacaccagatgtaactgtttttcagctgagttgtatggattaacttcagtccactgtaaatacacctgggatggggtggggttggggttgtttagggagaagcagccagacttgctttgtgaactgaatgtatttttatgcaattttgagtggcctttcaaccctaagatgaatggttttgttttactggttgttgttatatagttttgagtattctgtgtttgaaagtttgggaataataatattcacttctatatgatgcctgtaaacacaacagtatttataaatgagtaaataaaactgtgttttaactttg

SEQ ID NO: 454386 - DNA, 2371 bp, Homo sapiens
agactctcttctttgagttcttaaagtcactcaaagaagagagcatagagccagtaaaatctttagaaccagagatcctagaatcactgaagtctgcgggaagttcgacggagactctcttcctgcccaggggctttggacatagagcagggtggaagctgcaagtactgggaaggaagagagtttcacagaaacaaagctttgtcacacagaaatgagttctgtctcactggtgacttcatccctcaggctccagctgagcagagattttaatcagcttccttaatgggtattgacactgctcaggaagcagtagaccctgtcagggacagctattgatcttttgtgttctgattagattggaaaatagatcaacttcattgtagtccaggaactgttggtcacagctactaggaatgaggtgatttctgagggctgagaaaaaacacagaatcttggccagcagccagcagctgcatggtgaaagatgcattcacttctcctttgagagttggggttgagggcaaacatagaacccaggtttggcttacaacccagtgtcccggaagccctccttcgggagaactgtaagtaagaggtgggtgtgtctaaagacaataccattaatgaatgttctggccttacctaaaaaggtttagcaatttggggataactcttggatctagcttatgtgcgttcacatgcacatttgctagcccagagcttttaaaatgaggtctggcatatacttgattacaaatgaaaactcagaaaccaattttatttattaaatcatatcttttgtttttccccctcccttctaatcccccaaaggacctatttgagctgttccccaattcatctgcttattttggaccatgaatctgccagagtgatattttctgttatttctcctccaaatttttccctgatgtttccaataaagatttacttgggtggccccttaaggtgacatcaggatgctcttatgtccttccagaataagcatacacttcactcctctccctttcatctccctctgcattcttaattccttgcttttctcacttggagccgagggtgctttagagaggtggttttccatgaatcagccaagattcctgtagaagttgggtataccaaccaccaccaccaccgccccctattccagtttcaaagctcctcggctatgctaatgtcccctcagagatgaggtttgacttttaggcccgtatgactcctccatagcctggccaaggagaccatgagtagccatgtctggtttactctttatcctgagactgtttgtttatagcttaaaacagaagtgtgtcttcccagcacaaacctaatcaatcagtgtatcagtgcatctggtggcaacagctcagcccattcaaagagcaaggattcaggaaaggcacactgatggtggggagcctcttaagagcctctaatgttctcccaaaaccagagttgagagtcggagtgccagtcgtcggggcccactattcctgaataagggacatgcaagggccagaagtagcttgactctcgcctaaatatctgtgcctttgcctgtcctttctcccactctactgaaacccggaacagattcccgcttgccttctgatgaagagaggttaggtaaagagagtttggaggaaaaaagacaccaggaggcaggctgcggggtaggagagggttctgagaggaggcagcaatccagaatacctccttttctagccagcatcccttgaacttttgaaaggttgtgcctaccactggctggcacaccagggcaatgatttccctgcagaaggaaggaaagaatgtttcacccttgcatccttcttggagaagctacagcctgtgctcagttgagtggttcacactcagactttggctttatggttttccttcctccttgtctttgccctgaccttgatcaacaggggtgaaaagaaccaccctgaggtttccatgcctctcccattttagtggtagcattttgtgtctttactccacccttcaccctagttccaccaaggttcacacaccagatgtaactgtttttcagctgagttgtatggattaacttcagtccactgtaaatacacctgggatggggtggggttggggttgtttagggagaagcagccagacttgctttgtgaactgaatgtatttttatgcaattttgagtggcctttcaaccctaagatgaatggttttgttttactggttgttgttatatagttttgagtattctgtgtttgaaagtttgggaataataatattcacttctatatgatgcctgtaaacacaacagtatttataaatgagtaaataaaactgtgttttaactttg

SEQ ID NO: 454387 - DNA, 8332 bp, Homo sapiens
agggagcgtgcgggcggtactactggcgggaggagtaaagatggcggcgcgagggtctccgccctctgctccgggctgaagcgctctgagagaggcggcagcggcaactcgagccccaacagtaatttagtgttggtagttttggcagcagctgccgaggccggagcaatggcggaactggagcacctaggagggaagcgggcagagtcggcgcgaatgcggcgggcagagcagcttcggcgctggcggggctcgctgacagagcaggagcctgcggagcgacgaggcgcggggcggcagccgctgaccaggcgcgggagccccagggtccgcttcgaggacggtgctgtctttctggccgcctgctctagcggggacaccgacgaggtgagaaagcttctggcaagaggtgctgatatcaacacggtcaacgtggacggcttgacagccctgcaccaggcatgtattgatgaaaatttggacatggtgaagtttctggtggagaacagagccaatgtaaaccagcaagacaacgagggctggacaccccttcatgcagcagcttcctgtggctatctcaacatagcagagtatttcattaatcacggagccagtgtaggtattgtcaatagtgaaggtgaagttccctctgaccttgcagaagagccagccatgaaggatcttcttctggagcaagtaaagaagcaaggaattgatctagagcagtcaagaaaagaagaagagcagcagatgttgcaggatgcccgccagtggctcaacagtgggaaaatagaggatgtgaggcaggctcgctcaggggctacagcccttcatgtggctgctgccaagggctactctgaagtcctcagacttttaattcaggctggctatgaactcaatgttcaggattatgatggctggactcccctccatgctgctgcacactggggagtgaaggaggcttgctccatcctggcagaagcactttgtgacatggatattcgaaataaactgggccagacaccatttgatgtggctgatgagggtctcgtggagcatttggagttgctccagaagaagcagaatgtgcttcgaagtgaaaaggagacacggaataaactcattgagtcagatctgaacagcaagattcagagtgggttctttaagaacaaagagaagatgctctatgaggaggagacacctaagtcccaagaaatggaggaagaaaataaagaatctagtagctccagctcagaggaggaggaaggtgaagatgaagcttctgagtcagaaactgagaaggaggcagataaaaagccagaagcctttgtcaatcattccaactctgaaagcaagagtagtatcacagagcagataccagcaccagctcaaaataccttctctgcctcttctgctaggaggttctcttctggcctttttaacaagccagaagagcccaaagatgaatctccttcttcatggagattgggactgagaaaaactggcagccacaacatgctgagtgaggtggccaattccagggaacctataagggaccgaggctcttccatctatcgctcctcttcaagccctcgaatttctgctctactggacaacaaagataaggagagagaaaacaaaagctatattagttcactagcaccccggaagctcaacagcacaagtgatattgaagaaaaggagaacagagaatcagctgttaatctagtgaggagtggctcctatacccggcagctatggagggatgaagcaaaaggaaatgaaatcccacagacaattgctccctccacctatgtatcaacttacttgaaaaggactcctcacaaatcccaggccgacacaacagcagagaaaacagcagacaatgtctcttctagcaccccgctctgtgtgatcaccaatcgccctcttcctagcactgccaatggggttacagctactcctgtgctctccattactggaacagattcctctgtggaagccagggagaagaggaggtcctatctgactcctgtacgggatgaggaagcagagtctttacggaaagcacgctccagacaagctcggcagacacgaaggtctactcaaggtgtcaccctaacagaccttcaagaagcagaaaggacattcagccggtcgagggcagagaggcaagctcaggagcagcctcgtgagaagcccacagacactgaagggcttgaggggagccctgagaagcatgagccctcagcagttccagcaacagaagctggggagggccagcagccctggggcaggagtctggatgaagagcctatctgtcatcgcctgaggtgcccagctcagccagacaaacccaccacgccagcatctccttctacgtcaagaccctcactctacaccagttcccacctgctatggacaaatagattttcagtccctgattctgagagttcagagactaccacaaacactacaactgcaaaggaaatggacaaaaatgagaatgaagaagcagatttggatgagcagtcctctaagaggctgtccatccgagagaggaggcggcccaaggaacgacgaagaggcacaggcatcaatttctggacaaaggatgaggatgaaactgatggctctgaagaggtcaaagaaacgtggcatgaaagactttctaggttggaatcgggaggtagtaatcctacaaccagtgattcttacggtgaccgggcttcagcaagagcccgtcgggaggcccgggaggcccgcctagccaccctgaccagccgtgtagaagaagacagcaacagagattataaaaaactctatgagagtgctctgactgaaaaccaaaaactgaaaacaaaacttcaggaagcccagctagagctagcagatataaagtccaagcttgagaaggtggcccagcagaaacaagaaaagacctctgaccgatcatcagtgctggagatggagaaacgggagaggcgagccttggagcgcaaaatgtcagaaatggaggaagaaatgaaggtgttaacagaactgaaatccgacaaccagaggctgaaagatgaaaatggtgccctcatcagagtcatcagcaaactgtccaagtaggctaggctccagatttatgaggaaagaaagggacagcatttgctgcccccacccctcttttccagtccttgccttccaaccaaaagaaatggatgttttggtggaaggacacttctttctatcaccctcttcagtcacctctatacactctacattttctctgcactttcaatgccctgttcttccaaacccctatcccaagttttatgacagttttaattgaagcatgattgtggtaattcgagccatctggagaatgctctggggagtacaccaggctcagctgtggacccctcaacttcctgctgctcagctactttgtccacattggatttggtccaaacatgtaagacttctaccctaatcagtatccttcagctttttacattaacccagtgtcctctgatataggtgagtcttgtggtagccactccaggatcctgattggggtgccaagagaaacagcaggatgttgaattgatcatcagatgccctctggaatggttagcatccaaggtgacagtgactgcattgaggcgctctattcttcttcacctctcaggaactgacttttattttttctatcaacacccagtaatctccctaactagttttaacccttattcctccctcatacctagccatttctccaaggcgcaaatggccctggcttcatttattcctttcctttctatccttttatatttttcccttccccaccccctcactcaatggtataaaagctaggacagagcacctgacctcagttgtctttggccattgtgggaagtcattattctggagacaagaaaatcatcactctggtgccttggtggcagcaccactgcctgctccctggaaggtagactatggcataagtgtcagctcattgttttcgtctcccacttatcttcccccttcaaagtgattttctttataagaaaatttgggctctgaatactccattctgcctcacttccttgaccttgttttcctctcttcgccctgacacctgcttctaatgagaaatgaagtcagtgcaaggaggaatgagaggtggggaggggagattgttgagagatggactaggaagtggaagcaggctggaaagacacatatggcgaaagtcaagtatctgaggccacttgcaacattgtgacaaagaagatggaagatagcagcctactgggctgtgagaatagtggtgaatttgattatttccagtggttagatttagcagagagatttactttcttagaaattaataggggaaatggcacttaatagaggtttaatggaatgaagtactttcaacccattgatgagagtcatggaagtttagagtggcaagacccagaggtcattaggtccagctttctattattgtgtcacagggacccctgctaccacagctttcacccatgggcatggtcaggtagcctctggtggctatgcatttattactcaaaagttgggcaactctaataacgagagagtttttcctcatatcagctgaagtctgcctgtggattctccttgtagtccagatctactatctgcaactctttaacggcacttgagatatgtgcagtgggtggtctccccctcagtcttactttgagctgctgttactctagtcctttaagtcattcctcatatggcatgcttttcttacctgtcacatcttggccatcctcctctagacaaaaccagcctttaaaatatcatgtccaggcctggaaagaatacaaatccagtgcaaaattaaaccattagttcttgatgataacctagcattaatacttacagtattttctttttgtaggagttttatcccttggttcacttgagtgtgcaagtcattaaatcctcatcattttagggttgccagtgatattcagtgtttagagtggttcattcccttaatatatactacctctgtctgttaattctttcctaacatgacatgtagctctccatggtcctccctctgaaacaccacatgctgtttaaactagaagctgtaattcaagatcccaattccaccaggtgcagtggctcatgcctgtaatcccagcacttcaggaggccgaggtggacagatcacgaggtcaggagttcgagaccatcctggctaacacggtgaaacccaatctctactaaaaatacaaaaaattagccaggcgtggtggcaggcgcctgtagtcccagctactcaggaggctgaggcaggagaatggcgtgaacccgggaggcggagcttgcagtgagccttgatcacgccactgcactccagcctgggtgacagagcaagactccatctcaaaaaaaataataataataaataaataaaaaatcccaattacagaacaggagatatgtttcctctgacaaaaccccatttttagagtgtataaaattctgtctttcatttccaaccatttttcaagagaagctgctactatcttgagacttcgtattatcatgggagtactgtaagttcagttctcagggaatgctaaattagagtaataagttttatatccttcattctgggagaggaaatcaacataaggtgttgactaattgattatcctggaacattttgaatattggggaaggaagatgatacttctttctcaagaaaagaaaattggattattaggaatacatcttgacccttttccactcaatagaccagggaaaggggttacagagagcctcctcagatctgtttgtgcctttcaaaagtactgggggcagattctcaaaactcttagattggtgttgcatccctgccacttcacatgacccttccatgttaaagctgacttttcttgccagaaagttttccttgtgacaagaaatttgcaagcttttcaatctcaggaatactggattctatagccaagaactcatgaaagtaagtgtaaactatcctaggtaatttcaggtactttctcttatgcaattaattttattaactgatttctggtctatctccagagataaaataccattccttcacaactgtattgtctggaagccccatgagatggtaattataggccttctactagccagcagttctctctggatactggcatcagcaggtctcctttttcttgtgctgcttggacaggtacctactgctggcctcttcagtggccacaatcctcagtcctcacctgctggtttggagactcatgagcaccccaggcagctcaagctgaataaatagctgcagacatggccaacaacatggggctcaggtctgtcacttaacttagagtctttacatgaaatatcagaatgggaaagagaatgttcctggtaaaactctgttttcattaatttgttatttttcaaaaaccgagccacacctttggaagtaatgatttggccattccagagattctggggctaaagtttgtttttccagggctgctgatccttttccagatagctccagagtatgatgaccccagccccatcccaatctctagcgaaagggttatgcaaatctcagggtgttgcctctaaagaatctaaagaatagacatgctttgggcttactcagtgtaccagattctctagtgggccattctcatttgatgttccctagaacctccctgtcttccaactgcaggatgtgtttacttctcttctgggcttcccctggtttctgtcctagttcccaccccaagtttaagaagacttagattcatttattgctatctgaggccactagtgagatttcagatctctcttttgcaacattttacccatttcccttccccaaaccatgtgcttattagatggttccactcaggaagcaaggaagctaaaactcaagttaatggtctgtggatcccacgaaagtgtgtgtaaactactgactgtttctccactagaggcatttaattgagccaaagatgatggaagaagaaactctcaaagccatgtactttgttaggtgtctggatttttggcctgtttgcagcctctcctagccacagacagacactgtctcctctcagagaaaggccagtgtttcggtccaggccactggtgagtgtcggcacccttgaggtgggcatggagtgagcagaagaagcctggagaagagagaactatttaaaagtgttgccagttattcagcttccaggcggctttgcacctccaaaggtgcaaaaaggaaaaagaaagcagaaaggattcagcatttaagcagaaagaaaagggaaattctactctaccagatgagccactggttccactggagcttatcagtgaagtaacactgcaggagccctggtatccttccctcagagatatcatcaggggccctcaaaccccattgtttatgccagcactgaccgcactttaagcacacacttaccaatcagaggtcgtgtaattggcctaaatctaggcccagttattactacaaatcttagtcaccatactctctcgcccaggctggagtgcagtggtgtgatctcagctcactgcaacctccacctcccaggctcaagggatcctctcacctcagctcccgagcagctaggactgcaggtgtgcaccaccatgcccagctaatttttgaatttttttgtagagatggggttttgccatgttgcccaggctggtctgaagctgctgggctcaagcaatccacctggctgggcctcccaaagcgataggattacaggcgtaagggcccacgcccagcctaccatactgattttcaaggcagggtctaacccttcataagatgtgagttcttccaacccaataagcaggcagctttgaggacaaaaaggcaacattaaaagataagaccctagaagtcagaacatctgtattccaaggccaccccttctccttttagtcatgtgactttgggcaggtcaccctccctgtctgtaaaatgaggttggactggataatctttatgtgccctttccttttggcttaaaattctgtgatttattcattcttaggaagatcagcatatttattgggatttctgcttcaaaaattctttctaacctcaaaaatccaagtccagaattttttgttttcttctggatttaaactgtttaatatgagcacatcaaggttgacttctcatcctttttgggaagtgaatttaatattgagggtaattgaatgatgttgcctttcggagaagagggatcctcagagtcac

SEQ ID NO: 454388 - DNA, 8649 bp, Homo sapiens
agggagcgtgcgggcggtactactggcgggaggagtaaagatggcggcgcgagggtctccgccctctgctccgggctgaagcgctctgagagaggcggcagcggcaactcgagccccaacagtaatttagtgttggtagttttggcagcagctgccgaggccggagcaatggcggaactggagcacctaggagggaagcgggcagagtcggcgcgaatgcggcgggcagagcagcttcggcgctggcggggctcgctgacagagcaggagcctgcggagcgacgaggcgcggggcggcagccgctgaccaggcgcgggagccccagggtccgcttcgaggacggtgctgtctttctggccgcctgctctagcggggacaccgacgaggtgagaaagcttctggcaagaggtgctgatatcaacacggtcaacgtggacggcttgacagccctgcaccaggcatgtattgatgaaaatttggacatggtgaagtttctggtggagaacagagccaatgtaaaccagcaagacaacgagggctggacaccccttcatgcagcagcttcctgtggctatctcaacatagcagagtatttcattaatcacggagccagtgtaggtattgtcaatagtgaaggtgaagttccctctgaccttgcagaagagccagccatgaaggatcttcttctggagcaagtaaagaagcaaggaattgatctagagcagtcaagaaaagaagaagagcagcagatgttgcaggatgcccgccagtggctcaacagtgggaaaatagaggatgtgaggcaggctcgctcaggggctacagcccttcatgtggctgctgccaagggctactctgaagtcctcagacttttaattcaggctggctatgaactcaatgttcaggattatgatggctggactcccctccatgctgctgcacactggggagtgaaggaggcttgctccatcctggcagaagcactttgtgacatggatattcgaaataaactgggccagacaccatttgatgtggctgatgagggtctcgtggagcatttggagttgctccagaagaagcagaatgtgcttcgaagtgaaaaggagacacggaataaactcattgagtcagatctgaacagcaagattcagagtgggttctttaagaacaaagagaagatgctctatgaggaggagacacctaagtcccaagaaatggaggaagaaaataaagaatctagtagctccagctcagaggaggaggaaggtgaagatgaagcttctgagtcagaaactgagaaggaggcagataaaaagccagaagcctttgtcaatcattccaactctgaaagcaagagtagtatcacagagcagataccagcaccagctcaaaataccttctctgcctcttctgctaggaggttctcttctggcctttttaacaagccagaagagcccaaagatgaatctccttcttcatggagattgggactgagaaaaactggcagccacaacatgctgagtgaggtggccaattccagggaacctataagggaccgaggctcttccatctatcgctcctcttcaagccctcgaatttctgctctactggacaacaaagataaggagagagaaaacaaaagctatattagttcactagcaccccggaagctcaacagcacaagtgatattgaagaaaaggagaacagagaatcagctgttaatctagtgaggagtggctcctatacccggcagctatggagggatgaagcaaaaggaaatgaaatcccacagacaattgctccctccacctatgtatcaacttacttgaaaaggactcctcacaaatcccaggccgacacaacagcagagaaaacagcagacaatgtctcttctagcaccccgctctgtgtgatcaccaatcgccctcttcctagcactgccaatggggttacagctactcctgtgctctccattactggaacagattcctctgtggaagccagggagaagaggaggtcctatctgactcctgtacgggatgaggaagcagagtctttacggaaagcacgctccagacaagctcggcagacacgaaggtctactcaaggtgtcaccctaacagaccttcaagaagcagaaaggacattcagccggtcgagggcagagaggcaagctcaggagcagcctcgtgagaagcccacagacactgaagggcttgaggggagccctgagaagcatgagccctcagcagttccagcaacagaagctggggagggccagcagccctggggcaggagtctggatgaagagcctatctgtcatcgcctgaggtgcccagctcagccagacaaacccaccacgccagcatctccttctacgtcaagaccctcactctacaccagttcccacctgctatggacaaatagattttcagtccctgattctgagagttcagagactaccacaaacactacaactgcaaaggaaatggacaaaaatgagaatgaagaagcagatttggatgagcagtcctctaagaggctgtccatccgagagaggaggcggcccaaggaacgacgaagaggcacaggcatcaatttctggacaaaggatgaggatgaaactgatggctctgaagaggtcaaagaaacgtggcatgaaagactttctaggttggaatcgggaggtagtaatcctacaaccagtgattcttacggtgaccgggcttcagcaagagcccgtcgggaggcccgggaggcccgcctagccaccctgaccagccgtgtagaagaagacagcaacagagattataaaaaactctatgagagtgctctgactgaaaaccaaaaactgaaaacaaaacttcaggaagcccagctagagctagcagatataaagtccaagcttgagaaggtggcccagcagaaacaagaaaagacctctgaccgatcatcagtgctggagatggagaaacgggagaggcgagccttggagcgcaaaatgtcagaaatggaggaagaaatgaaggtgttaacagaactgaaatccgacaaccagaggctgaaagatgaaaatggtgccctcatcagagtcatcagcaaactgtccaagtaggctaggctccagatttatgaggaaagaaagggacagcatttgctgcccccacccctcttttccagtccttgccttccaaccaaaagaaatggatgttttggtggaaggacacttctttctatcaccctcttcagtcacctctatacactctacattttctctgcactttcaatgccctgttcttccaaacccctatcccaagttttatgacagttttaattgaagcatgattgtggtaattcgagccatctggagaatgctctggggagtacaccaggctcagctgtggacccctcaacttcctgctgctcagctactttgtccacattggatttggtccaaacatgtaagacttctaccctaatcagtatccttcagctttttacattaacccagtgtcctctgatataggtgagtcttgtggtagccactccaggatcctgattggggtgccaagagaaacagcaggatgttgaattgatcatcagatgccctctggaatggttagcatccaaggtgacagtgactgcattgaggcgctctattcttcttcacctctcaggaactgacttttattttttctatcaacacccagtaatctccctaactagttttaacccttattcctccctcatacctagccatttctccaaggcgcaaatggccctggcttcatttattcctttcctttctatccttttatatttttcccttccccaccccctcactcaatggtataaaagctaggacagagcacctgacctcagttgtctttggccattgtgggaagtcattattctggagacaagaaaatcatcactctggtgccttggtggcagcaccactgcctgctccctggaaggtagactatggcataagtgtcagctcattgttttcgtctcccacttatcttcccccttcaaagtgattttctttataagaaaatttgggctctgaatactccattctgcctcacttccttgaccttgttttcctctcttcgccctgacacctgcttctaatgagaaatgaagtcagtgcaaggaggaatgagaggtggggaggggagattgttgagagatggactaggaagtggaagcaggctggaaagacacatatggcgaaagtcaagtatctgaggccacttgcaacattgtgacaaagaagatggaagatagcagcctactgggctgtgagaatagtggtgaatttgattatttccagtggttagatttagcagagagatttactttcttagaaattaataggggaaatggcacttaatagaggtttaatggaatgaagtactttcaacccattgatgagagtcatggaagtttagagtggcaagacccagaggtcattaggtccagctttctattattgtgtcacagggacccctgctaccacagctttcacccatgggcatggtcaggtagcctctggtggctatgcatttattactcaaaagttgggcaactctaataacgagagagtttttcctcatatcagctgaagtctgcctgtggattctccttgtagtccagatctactatctgcaactctttaacggcacttgagatatgtgcagtgggtggtctccccctcagtcttactttgagctgctgttactctagtcctttaagtcattcctcatatggcatgcttttcttacctgtcacatcttggccatcctcctctagacaaaaccagcctttaaaatatcatgtccaggcctggaaagaatacaaatccagtgcaaaattaaaccattagttcttgatgataacctagcattaatacttacagtattttctttttgtaggagttttatcccttggttcacttgagtgtgcaagtcattaaatcctcatcattttagggttgccagtgatattcagtgtttagagtggttcattcccttaatatatactacctctgtctgttaattctttcctaacatgacatgtagctctccatggtcctccctctgaaacaccacatgctgtttaaactagaagctgtaattcaagatcccaattccaccaggtgcagtggctcatgcctgtaatcccagcacttcaggaggccgaggtggacagatcacgaggtcaggagttcgagaccatcctggctaacacggtgaaacccaatctctactaaaaatacaaaaaattagccaggcgtggtggcaggcgcctgtagtcccagctactcaggaggctgaggcaggagaatggcgtgaacccgggaggcggagcttgcagtgagccttgatcacgccactgcactccagcctgggtgacagagcaagactccatctcaaaaaaaataataataataaataaataaaaaatcccaattacagaacaggagatatgtttcctctgacaaaaccccatttttagagtgtataaaattctgtctttcatttccaaccatttttcaagagaagctgctactatcttgagacttcgtattatcatgggagtactgtaagttcagttctcagggaatgctaaattagagtaataagttttatatccttcattctgggagaggaaatcaacataaggtgttgactaattgattatcctggaacattttgaatattggggaaggaagatgatacttctttctcaagaaaagaaaattggattattaggaatacatcttgacccttttccactcaatagaccagggaaaggggttacagagagcctcctcagatctgtttgtgcctttcaaaagtactgggggcagattctcaaaactcttagattggtgttgcatccctgccacttcacatgacccttccatgttaaagctgacttttcttgccagaaagttttccttgtgacaagaaatttgcaagcttttcaatctcaggaatactggattctatagccaagaactcatgaaagtaagtgtaaactatcctaggtaatttcaggtactttctcttatgcaattaattttattaactgatttctggtctatctccagagataaaataccattccttcacaactgtattgtctggaagccccatgagatggtaattataggccttctactagccagcagttctctctggatactggcatcagcaggtctcctttttcttgtgctgcttggacaggtacctactgctggcctcttcagtggccacaatcctcagtcctcacctgctggtttggagactcatgagcaccccaggcagctcaagctgaataaatagctgcagacatggccaacaacatggggctcaggtctgtcacttaacttagagtctttacatgaaatatcagaatgggaaagagaatgttcctggtaaaactctgttttcattaatttgttatttttcaaaaaccgagccacacctttggaagtaatgatttggccattccagagattctggggctaaagtttgtttttccagggctgctgatccttttccagatagctccagagtatgatgaccccagccccatcccaatctctagcgaaagggttatgcaaatctcagggtgttgcctctaaagaatctaaagaatagacatgctttgggcttactcagtgtaccagattctctagtgggccattctcatttgatgttccctagaacctccctgtcttccaactgcaggatgtgtttacttctcttctgggcttcccctggtttctgtcctagttcccaccccaagtttaagaagacttagattcatttattgctatctgaggccactagtgagatttcagatctctcttttgcaacattttacccatttcccttccccaaaccatgtgcttattagatggttccactcaggaagcaaggaagctaaaactcaagttaatggtctgtggatcccacgaaagtgtgtgtaaactactgactgtttctccactagaggcatttaattgagccaaagatgatggaagaagaaactctcaaagccatgtactttgttaggtgtctggatttttggcctgtttgcagcctctcctagccacagacagacactgtctcctctcagagaaaggccagtgtttcggtccaggccactggtgagtgtcggcacccttgaggtgggcatggagtgagcagaagaagcctggagaagagagaactatttaaaagtgttgccagttattcagcttccaggcggctttgcacctccaaaggtgcaaaaaggaaaaagaaagcagaaaggattcagcatttaagcagaaagaaaagggaaattctactctaccagatgagccactggttccactggagcttatcagtgaagtaacactgcaggagccctggtatccttccctcagagatatcatcaggggccctcaaaccccattgtttatgccagcactgaccgcactttaagcacacacttaccaatcagaggtcgtgtaattggcctaaatctaggcccagttattactacaaatcttagtcaccatactctctcgcccaggctggagtgcagtggtgtgatctcagctcactgcaacctccacctcccaggctcaagggatcctctcacctcagctcccgagcagctaggactgcaggtgtgcaccaccatgcccagctaatttttgaatttttttgtagagatggggttttgccatgttgcccaggctggtctgaagctgctgggctcaagcaatccacctggctgggcctcccaaagcgataggattacaggcgtaagggcccacgcccagcctaccatactgattttcaaggcagggtctaacccttcataagatgtgagttcttccaacccaataagcaggcagctttgaggacaaaaaggcaacattaaaagataagaccctagaagtcagaacatctgtattccaaggccaccccttctccttttagtcatgtgactttgggcaggtcaccctccctgtctgtaaaatgaggttggactggataatctttatgtgccctttccttttggcttaaaattctgtgatttattcattcttaggaagatcagcatatttattgggatttctgcttcaaaaattctttctaacctcaaaaatccaagtccagaattttttgttttcttctggatttaaactgtttaatatgagcacatcaaggttgacttctcatcctttttgggaagtgaatttaatattgagggtaattgaatgatgttgcaatggctttccctcctgctggcttggtaagaatattaaagcctgcagaggtggaaattggagctcatggagaaatggatagaaagcaatttgttgcaggcagcctttggacaagttgttttaataggaaatagacctgctgcttcataggtttcctcaaccacctttcctcagctttcttaaaatgggatctacattggctcttcacacccactcataggacagatgaatcagtgtatcggccagtaccacgctgtgatgtcatgtctgttgactctacagatacccccagagtaattctcccataacgacgacgatcaatctcttaagtatcctgagatccccatc
